United States Patent Application Publication US 2022/0102000 A1 - sequence listing, part 15

SEQ ID NO: 3018 - DNA, 19276 bp, Unknown
  16S sequences of unknown bacteria
ccaatccgaagacatcaccgacgacaacgtagaaagcatcctcggcggctacgacggaataatcgtccccggcggcttcggcgaccgcggaatcgaaggcatgatctccgccatcaaatacacccgcgaacacgacatccccaccttcggcatctgcctcggtatgcagatgatggtagtcgaagccgcacgccacctcgccggcatgacagacgccaactccgccgaattcagcgacaccaccgatttcccggtcatcgacatcatgcccgaacaaaaactcatcgacaaaaaaggcggcaccatgcgcctcggtcaatacccctgccacatagcagacgacagcttagccctcaaagcctacggacaaaacaacatctccgaacgccaccgccaccgctacgaagtcaacaacgactaccgcgaaagactcgaagccgccggagtccgcttcaccggcctctccccagacaaccgcctctgcgaaatcgccgaaatccccggcaaacactggttcctcggcacccaattccaccccgaactcaaaagccgtcccaaccacccgcacccgctattcagagaattcatcaaagccgctgttgagtacgcagggggaaagaaggacctttgaaaaggtccttccctccccctgcaccccctcccttccctaaactttatacaagtttagggaagaaggctctgcgataaaccaacccgtgaacgacaaaaacatcgtttgcggttttttttttgccaaatttctaaatacctcttgacatatgatactatgcgtggtataatattatgcgtaacgcaaagaaaggtgatgtaatggatactcaactcaaacgcggactcatcgaagtctgcgtgctcgccgccctcctcgacggcgaatcctacggctgggctctcatcaaggaaatctcaaaccacgtagaaatctccgaatccaccctctaccccatcctcaaacgcctcgaagccgccgacctcttaaccgtctcctcgagagaacacaacggcagactccgcaaatactacaaaatcacagaaaaaggcgtctcccgcataaacgacttcatagacgaacaacgcgaaatgcaaaagattttcaactacatcgaagaaaaacaacactcacaccaaagaaccgaaggtgatacaaatgaccagaaatgaattcattacatccctgtcagcccgtctccaaggcatccccggaaccgaacggcaaaaagccctcgactggtactccgaactcatctgcgaccgcatggaagaaatgcccgaagcagacgctgtctccggcatcggctcagtcgatgaaatcgcggacgaaatactctcccaatacaggcaaaacacgacagctgtacattcaagcggcggcacagaaccgcaaagcagacgctctcccgacaaaggcatcaacaccgctcttgtgatattcgcggcggcagtattgtctccgatatggctcccgcttctgattgtcgggctgtcactcgctcttgtcgcggttgtactcgtctggtgcgccgtcgtcacggtcggcgtaatgcttgtctcggcggcggctgtgggtgttgtcgggcttgtttacggcttctgggcgctgtttgtgattaacccggcgtatgggcttctcgtgctcggggcggcgctgatatccgccgggctgacgctcgcgctgattccgcttatcgtcgtcacggtgaagggcgcggctaaattcaccgtctggtcggtcggaaagatatgctgccttgctcacaagaaaggaaaataacatgaagctgagaccattattcataacctccggaatactcatagttctcggcgtcgcctgcaccatagccggcgcggcgctgaacggcgggactataaagaacatcgaacaggaaaccttcgaggacaaatcacgcacattcgataactgtcgggaaatgacgatatcagactacgacaccgacgttgagataatcacgacaaatggcgaaatgcgcgtcgattacaccgagtccgataaggtcaggtacgagatatccgagaccgacggcagagtcgggataaagaaaaaagccgacctccgcctcttcgacttctctgtcgtgaccgacaaacgcaagctgattctctatgtcccggagggattcgacggcgtgctcgatgtctcaacgtcgaactcaaggctgagcgcggaggggatatccgcgggcgagacaaagcttgacaactcaaacggaagcgtgacgctgaccggctgctctctcggcgacacgacaatctccagttctaacggcagatgcacgataagcgcctgcgggagcggcgagactgttatcgactggtcgaacggcgacgtcatgaccgaggagctgaccacgtccggaaagctcacggtcgactcgtcgaacggaaccataaagctcgacgggataaccgtgaaggagctgagggcggaaatgtcgaacggacagataaccgccggaacaatctcggtcctcggaaaagcggagcttgagaactcgaacggcaggataacgataggctcaataacggcggaagagctcgaggcggaaaactcgaacggcgggataaaactcgactacgccgactgcctcagaataaagctcggcacttcgaacgccgacgtgaccggaaccctcgccgggactatcgcgtcctacagcgtccgctccgaggcgacgaacggaaagagctcactgccggacgagatgaagggcggagacagaacgctcgaggttgaagtatcgaacggaaatatagcgcttgatttcgacgggtcggatttctgcttctgaaaaaagattcgcctcaaacgaacgattcgcctcaatcccgtaggggcgaccatcgggcacccctacaaaggtagtacgttatccgtaagattacacccgctcttccactcgaggaacaggtacccgcgcccattgacggatatctttttttgaaaactctttattgcaacttcattttacaatgcgcttataataaaaagtggttgacaaacgacgtttttcgtgctataataaatatacttgcgataggaatacttacaaaggaaggtaaaaacatgaacaagcgcgtcacacaactcctgtgccttgtcatggcactcaccctcgtatcctgcggcggcggaacagccgatccggtcgagacaaccccctcagacaccacagccgatccggtcgaaaccgaggaaaccgacggtcttcccgacacgaaaatggacggttttgagttctcgatcaaccacttcaacaagtcatggctctcatgggctacgcttgatctcgaggcgaccgaggaaaacggcgatctcgtcaacgacgctatctacaggcgcaaccgttccatcgaggagcgttttgactgcaagataaacataaacgaggtcgacagaatcggcggaaacgagattcaggctgaggtcatggctggcgactccaactacgacgtctggttctcctacgacctctggacgctcggcgcggctcagtacctgatggactggaacgagctcccgcacctgagcctcgaccgtgagtggtggaatcccctcgccaccgaggtattcaatgtcggcggaaaacagtacgccgcttcaggcaatttcagcctggctgtcctctcgcgcgcctccggattcatcatgaacaaggacgtctacaacaccctgaactcagatgtcgacgtctacaaggaagccgctgacggcacgtggacaatcgacaagatggcgtcggtcgcgaagctcgcctacagcgacctcaacggcgacggcaatatcaactcgggcgaccgcttcggcgtcgtcggaagctggaaggataccttcaaccgcttcattttgggtgcgggagtcagctatgtatcgaaggacaaggacggctatcccgtgtttgacctgcccggcaacgagaacgcgatcaacaagctcataaagatctacgacaccttcatgcaggacgagatttacaagggcaatcagtccgacaacgtcgacgccaacggcggtacgggcagctttgacgacggcgaggcgctcttccaggcgaacaacctgatgggtctcgagggcaagcgcaagctcgagatcgatataggcttcatcccctgtccgaagtacgacgagagtcaggagagatattacgcgccgtcgttcggagctgagatcgcggtgctgctgaagacccttccggaggagcggttcgataacgtcggcatcatactcgaggctctggcgttcgactcgcagaagaacctgatcccgacctataaggaggtcgtgctgaagaccaagtcggcgcgtgacgacgagtctgcggcgatgatagacataatcgtggattcgatcagcttcgagttcggactgaacgcatggcaggacaccgtggcgaacccgcttgtgagacagacctacgcggcgggcaacccgaatttcgcgtcgaccctggcgtctatgcagacgtcggtcaatacggcgattgaaaagctacgcacgacgctggctgagtaaactgctttgattaatccgtaattttcaattcatacgtaataggaatccgccaaagatgcaaaaagtcaaaagaaatgcagaaaaattcacattttgatgttgaatttcttttgactttattgtataatggtattacttggtacgtaatacgtggaggtgcgatatggcttatccggattgggtggaacggcaaaggcggccgggaaccaacattagttgcatcaggggaaaatattatctctatgaagcgacatcggtatggaacaaagaaaagggacgtgcgcagaagaagactggcaaatatctcggaagaatcactgaagatggtcttatcccgccaaagcaaaagcaggataaggtgcagctcactcaccctacaattcgtgaatatggtgcaagcagtactctatgtgagattgggaaggatatttacagcaacctgaaagacagctttccacaagatgcagatattattttttgtctggcaattctcagggtgattgaaaactgcccattcaaacgagcatcttttttatatgagcgctcttatctttctgaaattctgccacacctttctctttcacctggcggtttaagttctttcctgcaagaatttggaaagaaaagagaacagcaggttggctttatgaagtcgtatctgacagattcccagtatattctatttgacggaacaaatattatcagtgattccaacggcatggaaataaaccgtcttggttacaacagtcaccggcaatttgagccgcagataaacttgatgtatgccttttcggcagatgcacataagccgggatattacagagtacttccaggcaatatacgcgatgtgaaatcttttgagctcagcgttctggaactgggaattgaaaatacagtaatcattgcagacaagggttttggctccgaggcaaactttgcacttttagaaaacagtaacctgaactatattatcccactcagacgaaataacggacattgcgataggaaaatattggtcgcagggaataaagcttcttttgatggctacttcctttttaatggcagagctatttggtattatgagtaccagcaggacggtaaacgctatatcatgtatctggatgatacactgcgtgcaaaagaggagcgggactacctgcaaagattggaagctggcacagagaattatactcacgaaggatttatagaaaagcaagctgctgttggaacgatcgcattccataccaatctgaaagacaatgcaaaggaagtttatacactgtataagacccgaggtgagattgagcaaactttcgatttcctgaaaaatttactggaacaggatcatacttacttgcgggataagtacgcagtcgaaagctgggcatttattaaccacatttcccttatgcttgtttacgaaatttactccaaactgaaatccgcgaatctcttgccaaaatactctgttcgagactttattatccacttgaaatatatccaacggataaaaataaacagctcctgggttaccggagaaatccccggcaaaacccagaaactgcttgattctttaaatgtacatattacgtaattgatgaatgttatggattacaagtaaagattgaaaaaggggcatcatacaccccctttttcttgtgctatattgcccggcagacgaactccctgtcggttctccttatctcttccccggcgtcggacgcgacgtttctcagaaccaccccgccgtcagaccactcttcgatcagcgctccgtcctttccgattccacagacgctcacgttctcgagcagcacccggtcgtggttgcagagtctcaggaaggactcaggtctctcagagaagcgcaccctcacgtttctcagcgtcatcgtcagcttgtcgtccttgtccccgtaagctgtgagcggcatcctgacgccttcagcgtctatgtccgcaaaggttatcgacgagagcgggcggtgcttctgccacgtctcgttgcccgaataattgtagtgcaggaacctgtcgacgtttctgaagcggcagctctcgacgactatgttccccggtctctcctctatcggcaggctgtagtcggcgtagtatgtgaaagccgagagcatattcctgcgtccgccctccttcggcgacggcgcggaggccgccttttcctccccggagagcgccccgcggaagccgtactcgccgggaccgcagagctcacagtcgcgcacaagcatattcgtcccgccaaacctgaaggcgctgcacgatgagtttatgtgacacctttcaacgagcgtgttgacattcgcgaacccggctatgcagtcgtcgcccgtgcggaagtctgaatctgaaatcctgatgttccggcagaccgacatatgtatcccgtcgtgcccggcaaggactgttacgttctccatcgtgacgttctcgcagcggttcaggttgtgcgcccagttgccggtgtttcttatcgtgtagccctcgaagcggacgttcttgcagtcgtggaaggtgatcccgtgcggtccgcggtagtcctcctcgccctcggggtcaaagcagttcgcgccatcgatatatgagtccttctcaccgatgacggcgacgtcctcggcgtttatcgcgcggatgagagcgttgttccagcggctcgactgacggcggacgtattcgtactcgacgcgcgtcgggtcatagctcgtgttgttctcaatggtgtggaagctcacgaaccgtctgtcggtcatctccgccttatcgatcggctggagcgtgtcgcttctgtggttgaagtagtccatcggatcgcggctgccgagcaggaccgcgccggagagaagcctcagcgtcacgtggtcgcggaggcgtatgtcgccgctcatgaatgtcccgcgcgggatcacaacctctcctccgccgtcagagaagcagcggtcaatcgcggactggatgaatttcgtctggagcgttccggcgtccggcgtcgcgccgtatccggttatcgggtattgtcttgtcattggctttcacctcatgatattatttggaaaacgctttccgtgcggtggtactaagtattatagcacgtgagaagatagtttgtcaagaaggctgacggcacatggttgttttactatatgaaggtccggaatcggtgggttttttgttgggaaaacgggtgaaaacataaaatgagagcccctcgcggagctctgcatatatgttactgtctgtagaaatcaacggtatcgtttatagccttctgaatctgctttgactgcttttcgacgtctgagacaatggtgtctttgcctttcagcgcggcgtcgttgaggatgtttgttatcttccagtcgaatacgacagcgggattcagctcgcggttcttgaagattatctcgagcatctcaagcgactcgtcgtctctcacgcgcttgttctcgagcactgtctcgtagtacgctggtctgaggtttttgtagtattcagccgccatgttctcgagtgtagcgccgatagcgtcggtcttctggttcgcgacggtgacgtacattgtgtgaacggactggaggatcggcgtcaggtattccttctggttctcgtcgtacttcggcatcgggattatagcgaagtcgaacttcgagtcgcgcatcttcttcgagtgtccgagcggctcaaagaggtagagagagcgaccctgcatgaacggattcttccagtcctgcccctcgggaacgttcgccccggcgagagtcgtgtgctcagtgtcgaacaggatagtgcggatcttatcatacatatccgccgtgcgctcgtttatgccgttaaagtacggtatgccgtcgtcgccggtctggactatcggattctcacccgcgagcatgaagtatgtcatcgcgacgctgtatattccgagaccccatctgtcctcgaagtccatttcgccgttgccgttcgtgtcctgagccgcctttttgaggtgttcgccgaagttgtcaagcgtccacttgccgctcttcacggtgtcatagatgttgtcgagtccgatgtcggcggcgatatccttattctggaaaagcacgtaatggctctcgccgagcatgaggctcacgtcgccgaggagcgagtaacacttgccgccgaaggtcaggctgtcgcgcgtgttcttgtcccaccagaccttgtcgctgatgccggtgaggtcggagatgtcgcggaagtaaccgttctgtattatcgttccggcgatatgtgaagggatatcgtagacgtcgtactcgtcctctccggcggcgacggcgttctgaatcatggttggcagatcccaggtgttctggatatacttggattcgatcttcacgttcagcttctgctcgataagcctgtcagcctcgtacatcttgtcgttgataagctcgccggttatctcgtcgcttgacagctggattatcgcccagtcggttcggttttcgccgaggagcttcactgtctcgccgccgaaatcgccggtcggaagggaggagaacagttcttcttcgctgactgtcgtttccgccgccccttcggttgtcccttcggttgacccgtcagttgtcacattatcgtcaatcgccccggagccgcaggacgcgaggagaagacagacaagaagagccgaaatgagttttcgctttttgtacatttttatcatcctttcaaaaaccggtcaattccggtttcagttcgtgtctagattatagcataaaaaaacatggaaaacaagctcaattattacgagaaaatagtacgatgttaagattaccccttgaaaaacgcaaatatccgtgctataatacagatacagcaaaagtaaaggatgtgacatatctgaaacacaagagcccatttcttgaatacgcggactttccggaaaaggcgtttctgaggctcatggatataaagactcccgccgagaacaacgcgccggtgataactcctccgcactatcagatgtccgccgagctgattctctgtgatagaatccgcggcacctgcacggtcaacggcttcagcttcgggcttgaggacaggatggttatctatatcccgccgggatacctgcattcggtttattactcgtccggagacggcactgtgttcgtcgccaagatagagccggagttcatcgcgaaatatatcgacctcgggaaggtcttctccttcgacgcgctcggcttcgagagctttgacacactgggaggggattatgacagagtcctcgcggacatcaggggagcggcggatatgacaaagccgctgtatgagcggcttgcgagcgcgcttgacatattttcggcgcttaagcggcttgaacccgggaaccgttccgccagaatgagcgacgatctgatgcggattatcgactggacagaggagaacatggacaagaggatactgctcgccgacgccgcggcgcatttcggctacagccggaactatttctgcgagaagttccgctccgcgtcgggggactcgtatctgcattacctgacgcttctgagggtttcgaaggcgtgccggctgctgtcgcacgggaagactatggcggagattgtatctgagtgcgggttttcgagcgaatcgtattttatccgtgtgttcaggcgggtgaccggcatgaccccggcaaggtacagagccgcgcacacagacggatcgagaatataaaaaaggctgacgcggacagtcagccttcttctcagtatttatcccgatgaaacgcgtacccgatgagcgacccgacgaacgccagcgccgcgtactcgaatatatagtgtatatctccctgactgtagttaagcaccattgacggcgcgaatataagcgcggtgacggcgaagtagtaccacacccacccgtgcatcttcccgaaaatcaccccgctcccgagacagcacgcgggcgtgaacaccttcagcgcgaagccgaagaaccgcgtatttctcagtataggcggcaggacatagaacacgacaagcatcgcggcgatgaacgggagccagccttttgcgccgattttctcgtcctcgctcttcttctgtttccagtatctggggtcgggagtgttattcttgttttcttccggcattgaaaaattcctccgaaatgttgtcgggcgtcgtcagttcccgctctcggctttgatggcggcgcgtctcgccatagccttttcgtattcttccttttcctcgtcggtctcgggcgcgagcggcgggacgggggtaggtcttccgttttcgtctatcgctacaagcgtcagataagcgaggtttataagcgttctcgtcccgtcctccttttcgacgtagctcttcacgcagatgtccatcgacgtgcgcccgacgcagactatctttccggtcaggacgacgaggtcgtttgcgaacgcgggcttcttgaactccagccggttgacgagcacggtcgtgacgttcttcttcgagtggcgtctggcgacgacggcggcgatgacgtctatccactccatgagctttccgccgaagagccggtcatagccgttcatcgtgcttcggttgagtatctgcaccgactcggtgtaggattcgcttggtttctttggttccatgagttctcctttttttattgcctgaacgttatcccgccgttttcgtcaagctcgacgacagcgagagactcgactctgacgccgctctcacggaggatctttccgccctcctgaaagcccttttcgatgcagattcccgctccgacaagagtagcgcccgcctgctcaacgatggacctgagcccgagcacagcctttcccttggcgagaaaatcgtcgattatgagcactctgtcttccggtgagaggaaccgtttcgcgacgcggatgatatattccttcccctttgtgaaggacagcacgggcgccgtgtagatgtcgccgtcgagattcttcgactcggactttttcgcgaagacgaccggaacgccgaaatactgcgcggtgatgcacgcgatgccgatgccggacgcctcgactgtcagtatcttcgtgaccttctcgtccccaaagagtctcgcgaactccttgccgatttcgtttatcagcgatatgtccatctggtgatttaagaagctgtcgaccttcacgaccccgccttcctttatgactccgtccttaagtattctgtcctcgagtagtttcattgcagcgtttacctttcctgttaatcccgtacgccggatattttctatattatatcacatccggagccgatattcacccgcatattgttaatttatgtccgacgcgaggatttttgtcattttccccacccgccgcatatgctgacagcggggtgatggtatgagacgaaggcgaagaaagaatatacccgcgcgtatcgggatgataatcctgactctgtcgcttcttctgatgatctttctcacctttgccgacctgagactgaagccggtcgtcataaacgcggcgagaagcagagcgagacttttcgcgtccgacgtcatctcccgctcagtagacgcggctgtcgctgagagtacggggaactttataaatgtcatatatggtgaggacggcatatcagccatagagacgaacgtgacgggaatcagccgcctgcgcgccgactccatcctgaacatccgcggagagatatccgacatagaccgcatgacgcttgacattccgctcggaaacctcgccggagggatgcttctgaccggacgcggattcccggtgagaataaagctcgtgccgataggcgacgtctcgggggagatatacagcgagttctcagagaccgggataaaccagacgctgcaccggatatacctgcgcgtgagagtctcgatgaacatgatagtggcgtcggacaccgtgaggctcgagctcgcggacgatatccttgtcgccgagaccgtgatagtcggcagagtcccggacgcgtacacagcgataaaccgcttcgagatagacgagaacgaggagaacgacctcaacgactacgcggcgcagattccctgagacaggctcgacaggtgaattacggcatatttcgcggcggaaaacaagaaataacgtaaagttaataatttcctacttgttaagcgcggctttttgtgatagaataaaatgaaggatgaccatatgactgtggtgaagcttattcagagaggattatgccgatggataacataaaggcggctttccgcaccgccgttggcggatacaacaaacaggatgtcaataattatatagcgggtctgtgcgagcgcttcgagtcagagaagaagaccctcgaggagcgcaacgccgaactcgagaaagagctggcggctttcagaaagaccgacggcacgacagagaccgtctccgaacagccaaagccgaagaacccgaaggcggtgcttgccgcgctgctctccgcggataagaatgacggcgctgaaactcaggccgcgaacacttccgaccgggagatgcttgtgaaggcggaggcgctcgtcaccgcccagaacgcgagactcgacgagcagaagaagacaatctccgagagagactcggaaatatcggaactgaaaacgcgcgtatccgatcttgagctcgagcttgagtccgcgcgcgaaaagctcgacagcttaaaggacgtgaacgagaagatagccgactacgacagaatgtccgcgaaggtcggcgacgtgctgatcaaagccgaggcggacgccgacagaatccgcgccgaagccgaggaaaaggcagccgaacgcatgaaagccgccgagctcgccgaaaaggacttctccataaaggagaccgaaatgaaggctgagctcgaacgccgccgcgaagccgccgagaaggaactcgacgcgcggatcgccgggctctcggaaaacaggttcagagagctgaacgacacgcttgaaagcgcgtccgccgagatcggaaagctgctcgacaaactcaaagcggatatagcgtcaaagtctcaggtcgcagacagcactgtccggacggtggatgaaaagtgagcagacgacgtatcggcgccatcccgcgtgaagcgtctccggacatgacaaccgacaccgcggaaaccgccgctccgaagaagctgtccccggtttcccacgcgtcccgcgacgcgctccagaagctcggggaaagaatccgcgaggcaagacagcgtatcggcatgaatcagctcgagctcgccggggacgatctcacgagaaacatgataagccggatagagacaggctccgcgctcccgtcgatccagacgctgtgcatcatcgcggacaggctcagtgtgccagccggggcgctgctctccgacctcgacgattatttcgcgtacaggatggcgggggagatgcgctcgctgctcgagagacacaggtatcagactctgatcgaccgtgtccgcgcctcgaccgaacgggacagaaagataaagaacccggcgctcgcggcggtcttcgccgaagcctgcgccggcagagccgcggagctcttcacggacggaagactcgccgaggcaagatctctcgcggaggaatcgatatccgtctccggacagtgtctcacgtccacaacggcaccggagcgcgcgtggcttgtcctcgccctgacagaccttgccgcggaaccgctgagacctgaaactcccgatggcaccgataatcagacagatacaacagatacaacggagcgccggaaggagctcgataaaatcatcttcggtgaaaacgagaccgcgatatatcttctggcgcgcgatatgctcgacgaggcggcgtcaaagatttactcttcccccgccgaaaattcagcggagcttgaggggatcctctccccgctcgtcacgtcgatgccggacgggttcatgcgcacacacgttgaggcgaagctcgatatgctgcgctcagattatctcgacgcgaaggcgaagctcgtccggatatgcggcacgtacgacgaaaagaacgctgacaggctcccgccgtcgataaggtacgatatcctgaacgacctcgagcactgctgcaagtgctgcggcgacttcgagaacgcgtacaggttctcgaccgaaaagatagcgatgctgcaaaaaatacgctgaggaagatactgtaaaaatatgccagacaataaaatatgtaaattccgggtcggtcagggctacgacgtccaccggctcgtgacagatcggcgtctcatcctcggcggggttgatatcccgtatgagaaggggctgctcggtcactctgacgcggacgtgctcgcacacgcgattatggacgccctgctcggggcggcggcgctcggggacatcgggaagctctttccggacagcaacccggaatacgagggagcggacagcctgatgctgacgcgccgtgtcgcgagggtgcttgaggaaaatagatacgcgatatcgaatgttgacgctacaattatagcgcagagtccgaagttagctccgtatattgataaaatgcgggaaaatatcgccgccgcgctgaacataccggtcacagacgtcagcgtcaaggcgacgaccgaggaaaggctcggcttcaccggcagaaaagagggtatcgcggcacaggcggcggcgctcatatatatgggaaacgctgattaattcgggcttttgtggaaaaattcttggatttatgggacttttccgtaaaaacaaccttgtcagtgtttccttgtgacgtgaggggaagcgcaaaaaactgttctttccttcagaatcaacatccgcggcgcgttccgcacgtctttctctgttatcataatatgtggatatccccggattgttccggtaatatataccgcaaatacaaatcaaaggacaaattgatagatatgatcaagatctcaccatccctgctcgcagcggatttctcaaggctcggcgaagaagtgaagcgcgtcgaggacgccggggcggagatgctccatctcgacgtgatggacggcattttcgtgccgaatatcagcttcggcggctgcgtcatctcgtcgctcagaaaaaagtcgaggatgctcttcgacgttcacctgatgataaccaaccccgcgcgctatatagacgatttcgtcaaggcgggcgcggacataataaccatccactacgagagctgcgacgaccagatttcggtactcagacagatacgcgaggcgggtgtaaaagcgtcggtctcgataaagcccgcgaccccggcgttcgtgcttgagcctctgctcgactatgtggacatgattcttgtaatgacggtagagccgggcttcggcggacaggctttcatcccggacacgctcgagagcgtccgcgccgcgtcggaaatggtcagagcgcgtggtcttgatatcgacatagaggtcgacggcggaatcaatccgtcaaacatcagggacgcctacgacgcgggagcgcgtgtgttcgtcgccggatcgtctgtcttcagggcacaggacgccgcggaggcgatatcttctctcagaaacgcggtcaactgaaaacagaatattctcagttcagcccggtggttcgtccgccgggcttgttgcgttgcccgtctgtatatcatttgaccaccagaaaccagcgccgcgcggcgaatttatttattataggtattgaaatcacaggaaaaaaatgctataatatatggtgaataaatatgctctccggaaaaagaagggcaaccgacgaaggagtccgccaagtggtattttcatcaaccgtcttcctgttcatattcctccccgtggtctggatcgcgcatatgctgatcccgccaaaaatgctgtggctcagaaacgcgctgctcgccgtcgcgagccttgtcttctacgcttacggcgaacctgtatacatcgtcgtcatgatagcctctgtcacggtgaactacttcgcggcgctgatcatctcaaagctgtccgggaaagcgagaagcgccgtatgcgcgctcgcggtgataatcgacatcgcggcgctgtgtttcttcaagtatgtcccgtggctcgtcagggtcatcgactccgcggcggggctgtcgataccggttccgggcttcacgataccggtcggaatctccttctacaccttccagatactctcctacgtcgtcgacgtgaacagcgggaagaccgaggtacagaagagcttcggcgcgctgttcctctacatctccttcttccctcagctgatcgccggacctattgtcaagtacggcgacatctgcgcgcagctctcatcgcgtgaggtgacggtcgagcgcacgtcgctcggcatacgcaggttcatcttcggtctctcaaaaaaggttctcgtgtcgaacacggcggcgatactcgcgaaggcggcttttgaggcgtcctctccgtcctcgctgatggcgtggtcgggcgcgattgcgtattgcatacagttatatttcgacttctccggctattcggacatggcgatagggctcgcgtcgatgttcggcttcgacctgccccagaacttcaactatccatatttcgcggtgacgatacgcgacttctggaagaggtggcacatctcgctgacctcttggttccgcgaatacgtctacataccgctcggcggcaaccggaaaggcagggcgagaactatcgtcaaccgtctcgccgtcttcttcctgaccggtctctggcacggggcgaacttcacgttcatcctctggggaatgtggcacgggcttctcatgatgctcgagcagttcgccgggttcgacaaattacgcgaaaagaaggctctcagaccggttctgcgtatctacacgctgctcgcggtcctgctcgggttcgtcgtgttcaactcggcgagcgtctcgtcggcgttttcgtatatcgggcggatgttctcgttctcggggaacccgtcggacgcgctcggggatttctcgccttatcttgtcataatgatgatcgctgggatagttttctcactgcctgtcgtgccgaagctccgcggtatgttctcgcgggacgggaagctcgttccggcggcggagttcgtctcttatgccgtgacgataccgcttctcgcgatgtgcgtgatgtcgctcgcgtcctcgtcgttcaatccgtttatctactacacattctgagggagggcgaaaaatgaacagaacactcaaagtgatattttgcatattcttcttcgccgtctgcctcttcttctcgctcgcgaccttcattccgggcgcgtcgaaaataacagagggcgggatagaacgcccgtcgctcgtgaaggacgggttcataaacgacgacttcggcacagattacgaggaatatttctcccgcgcgttcgcgtatcgtggatatgtggtcgatctctggtcacagacgcgcgcggcaatcggcgaggggaacgatcaggtggtcgtcggaaaggacaatttcctcttcttcgccgagacaatcgacagctacacgggcaacccgatgagcgacgacgagataaagctcgccgccgacgccatagaaaacttagcgaagaccgccgcgtcgaagggcgcgggattcctcttcgcccccgctccggacaagaacacgatctatccggaaaaaatgccggcgagatacataagaaacgaaaacaccgacatcgaccgtctcttcgcggagctctcggcgcgcgggcttgacgacattttcatcgacctgagacccatactcacagacgccaaaaatgaacggctcgtctatcaccgccgcgacactcactggaatcaggacggcgcgctcacctctctcggagctatcgcggacaggctcggtttcagtcttcctgatatgagtaccgtcacgcgcaccgaaccacgagaccttccgggcgacctcgacgcgcttctcttcccgggaaagacgctcttcgacgtgaatcccacctacgacctctcggagtactacatcttcacctcagcctactcgacgccgatggatatgcagatctcgacgcgcggcgcgggcagcggaaaggcgctcgtcttccgcgattcgttcggaaacgccatgataccgctgatttcgtcctccttcgccgagacgcgcttcgagcgggcgaacccgtaccggatcgatctgcttgacgaatttcaggctgacgacgtcattctgataatagccgaaagaaaccttcacaccctcatcggttccgattcgcgagccggtgccggaaacgccggttgaatttacccggtcatccggctttggagcctcatggcttcagaaaggaagttgcgcaaaatgaaaagaaaatatatgctgacagcggcgttcctcgccgtaactctcggttcagtctcctgcggctcggcgtactacgtcgacagcggcgcttataagaacttcgacgtcgcggctgacgccggtgtcgagttccccgccgaggcgttcgatttcggcgacttcgcggagtccgcgccggatgaggagacgtctgtaccaaacttcgtcggtgacgagaacagcttcgagatgcgtgtcgtcgacaaaatgccggtctacaaggcaataggtgatacatcgcccataaaaacactctacagcggctctacagttatcctcgggacgacagacgacccggactggtgctctgtcaccgcgacctccggacagct

SEQ ID NO: 3019 - DNA, 7962 bp, Unknown
  16S sequences of unknown bacteria
cagatgtgtataagagacaggtattcagcatcgcctgatttttcttttcctcgcctttatctttcacggccaaaatgcaggtatccgtaccgatggaaagccctctgccctgcgtggccaacataagcgcaaatggctttccaagcagccaaagcggcgcgccatccttggcttcaggccgagcctttagattgcagaggagccgctctttctgcttaaggcgccgccatatccagtccgccttttcctccacaaacgcctgtataaacgcattggagacccgcctaggcgccgaaactttaactgccccctccgctgtgatgcgcaggtttacatgctttatttttttgcgctctatacaatattcgatgcgctttccactatattcgatgcttggcacgcgtgcctgtcctcctgttttgcaaaaaagcaatggattgtgtatcattctatatacatagcatacactattttcaagaaaagagggagaacatggatctttccaaacgcatcgagacgggcactttgcttgcctacggcctactattgatctgcgctggaggttttatgacctttttccccgacgtatttatgtccatggtctcctttttgctgctatgctttttcggtatttcttttgtcttaaatgccatcgcgcttttttcccgccaccccaagcaggaaaagcggcgtgcgctgctgtccacaggctctctgatgggcgaccttgccgcctttatcctggttttgatatttgaggacaggctgtttaccataatatctctttgttttggcatttggacgctgtttaacgggctggtaaagctgatcctatacgtggaataccgtaaaaaccaggtatcgggccgcttgcttacactgtttgcggccgtggtatcgttggtgctaggattcgtttttctggccagccccgccatgcaccgtgaaacgtcggtattcatttgcggtgtgtatctgatggtatatggcattacctatattcaggatttcattcggcaggtatatccttccgcctttgtacctggcaagcgtcgtttgcatcttggatggcctgcctttctcgttgcgctgatgcccaatgcgatgatcaaaaaaatcaatgcgatgtatgcaaaaaagcaggtgccgccgcttcacgctgaaaagagcagcgccccgccggatattgaggtattcgtacacgcctcggaggaagggttttccaaatttgggcatgtggacctttattttgaagggcgcgtatatacctatggctgctatgatgaccgtaccaaatggttctttaccctgctgggcgaaggacacttgattaccacagaacacaagcaggcgtatctgcgccttgccatcgcatatagcaaaaaaaccattttcgggttcgggctgcgcctaaccgaggagcaaaagcaatttgttcggcataagctcaaggacttttccgcctacctggcgccctggtatcctgatgcacagcttgccgaacagggccggctgcccaacgagccttatgatgattatgccagccttttgtatacgcagacagatgcgcagttcttccgggtaaccaaaggccgctttaagacatatttcgtactgggcacaaattgcgttctatgggcggaccaaattttgggggccgctggtctggatatgattcgtgtcagcggcatcatcacgccgggatcgtattatgattacctaacaaagcagtatcatatggaaaacaccgccgtgatttcctataccgtataccgagaagagcaaacaacctaaaatttggcgtatttttgcctttcttgtcttgtcaacggcggtacaaaggggtaaagtatattgtaaattgcaaaggagggatgttgtgatgtcttttacctattatcccaaaggagtatgttcgcaaaagatacaaattgaattggcaaaagatcataccatccaggatatacaaatcattggtggctgtgacggaaacttaaaaggggtgcgggccctttgcatcggccaaaaggcagaggatgtgatccgctctctcagcggtatccattgcggcccgaaggccacctcttgcccggaccagatctccaaagcgcttaccatggcgctggcccagcaatgaataccaaagctagaatacaaatgagacggagttcatctatccatggcatactatgatgatttttatcaagagcccaggcaaaaacgcggatctacaccgcagcgcaggccggcgccttcctctaggcaaagcgcggcgcgcggccctcggtacgccgcttccctgaagacgaatcagccgaacaagcggcgtaccagcgggtatcaaagcggcgggggcgggcgtttccgcctgaacaggttgacgcgtaccattcttatggatcttgcattgaccatcgctgggcttttaatttttctgctatttcagcgcgtgctgcattccaacagcgtagatcctacgcagctgcccaacacatcaccggtggcctctgccccgctagacggaaccacgccttccaacggcggtacaaccaccagcgccgggccatttgccagcaaattcccggataagtttaccaccggcgaagtagaaaaaaccgacacgacctacaagagccagcatttaaatatcaccatcacacagggacagcgtggcgatgctatttactatttggcggatatttatgtcagcgatatcaaatatttgaaaacggcctttgctggaggcaaatatggcggcggcacggcttccattgcggatacgctggcagaaaacaacgggatattgggcataaacggcgattattacagcgcacgcaacgacggaatcgtcattcgcaacggcgaattgtaccgtgaaaaggtatttgccgatgtgttgatcatgaacaacgacggctccatggctacctacacggctgatgcgtttgacattgataccgtcaagcaaaatggtgcctggcaaggctggtccttcgggccgatgctgttgcaaaacgggcaacctatgacggaatttaacagcaatgtggtgcgtgccaatccgcgtaccgccatcggatactatgagccagggcattactgtttcatcgtagtcgacggccggcagcccggatattccgaagggcttgccatggcagacttatcacagctgatgtatgatcttggttgtaaagtggcctataactttgacggcggccaaacctccatgatggtgtttgacggcaaggttgtcaacaaaccctataaggatgggcgcagctgcagcgatatcgtctatgtgggcgaaggagagtgatcgcagatgttaaaacgagtcttgccgcatgtgagtatcgtgtgttctttgatgctcttggtgctgtatatcatcaatcttttcaacgatgccatgggttttttgcgcgggcctgaatttgaatttctgcttttgatcgccattttttctgctttttttaccggcgtatatctggtacgggaaaattggattaacgagcggcgaaaaaacagagataccacccgccgataagcgttgatttgccggcgctccctgctttgagggggcgcttttgttttgcccattgcatcatactacatttttctttataataagggtacgagcagagtaggaatttgtgcgttaagtgccgcctggacggggagttgtcaggcggacgaaaaggcaatcttgcggtacaaatttcgcatcccgctgctacaacgtagaggttctccttcttgctgtagcatattttgctggcaattcggccgcatggccaaaagaaaggaggagaatgctatgaacaaatccaaatcaccgctgtttaccacccatagcattgcgctgatgggtcttttattggcagcagagatcgtcttgtcccggttttgctctattgcaacctggaatatcaagatcggttttacctttatccctctggtcttgtccgccggcctctttgggccgatcggcgctggggtattggcagcgctggcggactttttgggcgctatcttattccccattggcccctacttccccggctttacctttacccagttctgcataggcgttgtgtttggtctgctgctgcaaaaaaaacagagcatgggacatatcgtcggcgcagttttgctcacacagatattgggcagtctgctgttggattcgtattggatctccgtgctttacggtagcccctatttggtgctcctgggcacgcgtgcgatccaatgcgccgtgatgagcgcattggagatcgtcgtaattccaattctcttaaagcagctagtgccccgcatgaaagccatcatggcataattttatggaaaaggcaggcatttcgtctgccttttcccatccaaaaggcggtatcgttttctatgttttccaactattcacaggcgctttgctttatgcagagcacagcgcatcttggcagtgtgcccggccttgcgcggctgcaagcgctgctgtctcggctggggcacccggagcgccaaaaccggtacattcatgtggcgggtaccaacgggaagggatctgtctgcgccatgacggcgtctatcttgcaggcagccggataccgggtcggtttatttacttctcctttcctccgtgatgtaagggaacagatccaatgcaatggcgaaatgatctctccttcctcctatatgcatctagcttcccgcatcgcggcgctcggcttgccggcagagtccctgccaacggaatttgagctgacaactgcattggcttttttatactttgcagagcagaaatgtgatgttgttgtcttggaaacaggcttggggggcgcggaggacgccaccaatgtcattcctgcgccgctggtagctaccatcacacgcattggcctggatcacatgcagtttttagggagctcgctggccgatattgcagcgcacaaagcaggcatcctgaaaaaaggctgccaggcagtgtgctatccgcaggcgtcggaggcgcagcaagtgatagacgatgtatgcaaacagcgccaaatcccctgtgtatttcccaatttttccgagctcgaagtccatagcaaggggcttgatgggcaatggtttatgtataaagggcaagggccttatgcgctttccctactagggccccatcaatgtaaaaacgcggccatagcactggaaatcatccgctgcctgcgtcgccagggttttgtgattcctgaagctgcgcttacgcaagggctgtgccaggtccaatggccggccaggctggaggtgctctgtagcgaccctctcttcttattggatggcgggcacaatctgcaatgcatccaggctgtctgccaagcgcttgatgcactgctgcaagggcagaaaatcatctgcttatttggtgtgatgcgggataaggaataccccactatgctacaagcgctggcaccttatgtctgtgcttttgtcggcgtacagccctccaacgcccgtgctttgcctctggaagcgctgggacgggcgttggcaaagacggggattccctatacgctctgcgattctatccaagcaggcgtacatacggcattgtcgctatcagaaacacaaaaagcccctatatgcgccttggggtctctatatatggcaggagacattcgccaaataatatacgaggagaaagaacatgcaaattctaaagacgcttccctatgaattttccgtttgtcaactggatagcactacatctgtcaattttggatccgaatactgcttctttgcaaggacggcggaagaaatttctttggtctgccctacgcaccaggtgccagcgcacacgctacaccgagaggatggctggcgggggctgtatatcgacggtatcttagatttttccctgatcggtatcttatccaaactcagtgcggtattggctgcttcccaggtcggaatcttcgctgtatccacttacaatacagactatatttttgttaaaaaggatcagtattcacaggctgtccaagcgctgcgccaagcaggctatgctgtagaatgaaccacctttagtaaaaagaaaagggcgctggtataaacagcgtcctttttctctatttaagttctaccaccgtcacgccggcgtcgccttctccataggcgcccatacgcatggatttaacgtgcgggtgatggcgcaagtgctcttgcaccccagcccgcagcgcccccgttccctttccatggatgatggtggtctgcgttctcccggacaaaatggcatcgtctagatgcaggtctatgaccatcactgcctcgtctaccgtcatgccgcgcacatcaatctctagcggcgcggtacgctcgccgcggcgcaccactgctttgggtgcttgctttttctgttgctggcgcacacgtaagctttccagcggtaccttcatcttgatgacgcctgcctggatcagcacttctccctttttgttggcaggctccaataccgtagcattggcatccagcgtggaggcatagacgctttctccgcgctgtacccgtttggggatgctgcccggcgcctgcggcgcttcccgttttttctcctgtatctccggcaggctacgcagctgttctctggcgctttgcaacagcttttctcgttccgcactattctctgccttggcagcctgcttggcggtttctatcgcctcgttggcctgttctcgcgctgtttccaaagtacggcgcgccttttcaagcgtttcctctgcgcgcttttgcagcttttgtgcctgggctttttgctgtgcaagctcacgatcaaacgcttccctctggctttgcagatcataggtcaactgttcacgcgactgctctgcctgttttctaagctgctccgcttcggccaaggcgcgctcaaaggcagccgcctcgctatccatctggtcttttgcacgctgtattacccgctctggcatgccaaggcggctggaaatggcaaaggcattggagctccctgcataaccaatcatgagcttgtaggtaggcctgagcgattccacatcgaattccattcctgcattcaaaaacccaggatggctcatagcatagctttttagttcactgtaatgcgtggtgcaagctaccactgcacccttttccaccatcgtttccaaaatagcgatcgccaaggccgcgccctctactgggtctgtgccggcccccagctcatccagcagcaccagtacgccgggccgggccttttttagaatgaatacgatattgaccatatgcgaagaaaaggtagagagcgactgctcaatgctctgctcatccccgatatctgcaaaaacagcacgataaaccggcatctccgccttttcgcacggcaaaaacagcccgctttgcgccaaaagcacaaataggccggcggttttcagcgttaccgtcttaccgcctgtgttggggcctgttacgagcagggctctaagatcgccgcccactgtatagtcgatgggaacgacctgcttatcgtcgatcaacggatggcgcgcctgtcgaacggtcatttgatccccctccaccaggatagggcaggtagccttatggcgatggctccaggttaccttggcaaagcattcatccagctcggagagtgtttttacattttggatcaacgtttccttctctcttccaacttcctctcccagcgtggataggatgcgctctatctcctgctgctccttcccctccaaatcctttagctcgttgttggcttctaaaacgctgtatggttcgatgaacagcgtagcgccgctggcgcttctatcgtgttcaaagcctttgatttgccctgcatactcgctttttaccggtaccacataccggccattgcgctgggtaatgatgccgtcttgcagcatgttgcgtgtcgttgggttggcaaggatggcctgcaaacgggcccttatcttg

SEQ ID NO: 3020 - DNA, 21723 bp, Unknown
  16S sequences of unknown bacteria
gacgcccgcaaggatcgccgcgcccagcgcgcccgcctcgcccgaattggtggcgaccgtctcgcagccgaatacgtcggcgatcatctgtttccacagcgcgctcttcgcgccgccgccgccgatacgaatctcgcgcggcgaattgcccatttcccgcaagatttgcagacagtccagaagggaaaaactcactccctccatgaccgcgcgcgcgaaatgcgctctcgtgtggcggggcgtaatgccgaaaaacacccctttcgcgtccgcgtcgagatggggcgtacgctcgcccatcagatacggaaggtacaaaagcccctcgcatccgacgggaaccgacgctatgtcggcgttcacgatcgcataaatgtcgtccgtctctttcgcccgttcggcgtaaaaatgatctttgaaccatttcatggacagccccgcgccctgcgtgacgcccatcacgtgccatttgccccgcaccgcgtgacagaaggtgtgcacgcgccctttcgcatccgcacggggcgtttccgtatgcgcaaagacgacgccgctcgtgccgatgttgcaactcacgataccgctctccacgatgccgttgccgatggcggcagccgcctggtcgcccgcgctgcccgcgaccgcggtcccctctttcagcccgcaaactgccgcggcggcagcacagacccttccgccgcactccgcgctttccacgatgcgcggcaggaaacggcgttcgatatgtaacttttcgagcacctcgtcggaataacaacgccccgcgatatccatcaactgcataccgctcgcatcggaaacgtcggtgatgaattcgcccgtcaacacaaagcgcacgtaatctttgggaagaaggatatgcgcggtctttgcccatatttcgggctcgtttttttgcacccagcgtattttcgaggcggtaaagcccgtgatcgcgggattggcggtgatctccgtcagccgttctttgccgacgatttccgtgatctcgtcgcattcagcctgcgtgcgctgatcgcaccagataatgcttttcctgagaacgcggcacgctttgtcgagcagaacgagcccgtgcatctgccccgatagcccgacgcctttgaccttgtcgggcgcgatccccgatttttccaacacctcgcggacggtcgcaaggacggcttccgcccagtccctcggatcctgttccgcccagccgctcttgatctgatagagcggatattcccgaaacgccgtttcgacgatctttcccgtttcgtcgaacagcaccgttttcgtgcccgacgttcccacgtcgctgccgatcaaatattgcattgttactcctttcgtgcacgtgcacggtcatctacgaaaattgccccgtactacggggaaaactcaaatattatactgcatacggatcgccagatcggtataaaagcgctcgtttgcgggacgctcgccgagcaggatatcgaacatatttttgagcgccgcgtaaccttgccgcgcgggctgttggtcgatggtggcaagcaccctcccctgccgcacgtattcgcgcgtggcgggaatgagatcgttggcgatgataaagagcggtacgccgctttccgcgaccgcctcgaccgtgcccgcaacgcccgccgcggcgacgtagacggcgcagagcgcaggacggtttttcagaagacgcgccgtcttttcgtacgcggttttgtcgtcgtcgttacattccagaatttccgcaacgcgcagatccgtatcttttaaaaccgagcggaagccgcgcacgcggtcgttatgcccgagcatcttgaacgagcccgtgacgatcgcgacttctccttgtccgcccgtggcgagcgcagtgatttttgccgccgtctgaccgctcttgtaatagtcgcaccccacgtacagcacgcggtcgctcccctccacgtccgccgtgacggtgacggcgggctttcccgcagccgcatagacgccgatctcccgcgcgatcttcgcatcgtcgatgggcgtgaacacgagcccgtctacctgatcgaagagcgaacgcatggcagaaatctgttcctccacgtcgtaccccttgatctcgcggcgcaaaacggaaaagccgtaatcgcggtattccccgagcgcctcttccacgccgcggtacacctcttcgaaaaaaggattgcctatggagttggtgatcacacccacgaccatgggccgtttgctgcgcaccagcgccacgcccgcgcggttcggggtgtaaccgctttcctcgacgatgcggcgcaccctcttttccgtttccggattgacaccgccgcggtttttcatcacgcggtcgacggtgccgcgggatacgcccgcccgttcggcaatttctttcagcgtcattatatcttccttgcgtgcacgtgcacgatctttgttgatccgattatatcacgcgccgccgcgcttgtcaagatttttataaaaaaagatgccccctaaacgggaggcatcatatctttgatttgttgcagaatttcgtcgggaagaatacccgcatacaggagtgtcggtctgccgctgccgcgcgaccatgcatccgaaagttgaatattttccgcctgtgcttgccaatcgacgatggcaaccgcgtcggagccgtcggcaaagtaactttcgctgtcgacataaacgttgtgacaaacaacgccgtccgctacgctgcccatgcccgacattgcttccaaatcgacatcgccgaccacggatccctcgatccaaccttccccgccgccgttcaaggctgccagcgcgaacgcgctgtcggctatgatgaaagccccgcatacctccgcgtcggaaatttcgcaatcgtacaatctggcgcatatgccgcccgctaatgcgcggtacagatcgcccatatacgactcgttgcggatctcgcccgaaaatttacagccacggatctcgctctttgtcatcacgccgtcgagcaagtcggaataggaaccgtattctaccccggcgtccccgacgatcccgccgaagtacgtatattcgccgatgggcatatccgcccgctcgggaaaggaaatgacgccgctgaatgcggacatcatcagattgctgcgccacaattgacctacaatgccgcccgcgatcagcgcggaataaatattcgcgtcgctctcgcagcccgcgatgaccgcctcgtcgcagcgccccacgacgccgcccgcgacaataccgctctctattttcccgctgaatttacaattcagcatgacgctccggcgcaattcgcccaccacgccgccgagcataccgacgcgcggatacaccgtggggctttctccgaaaagccccagatcgctcgtgacgctgcaaccttctatataactctggttcgcaaatccgacgagcccgcccatattgctgaacgaccaactgccgctttcgaaattttcttttctgccctgtaccagtttacagtcggtcactacgcagttctgcgcaaaaccgacgagcgcgcccaccgtgcgggtgtaacgcacttcgacgcggtaatcttccaaggtcacgtttttgaattcacagttttccgcatagccgaaaagcccgacgccttccgactgataactccaatcgaatcgctgtatggaaaggcgggcgatcttgaagccgtttccgtcaaaatggctgcggaaaggatatgcggccgtgccgatgggtttccaacggtctacgggcgcattttcgccgttctgatatttttcgcccgtatccacggcggaaaggtcgatgtcgttcgcctgtctgaaataagtgcccgcaggatattcgatcatatcgagcagcatttccgcgttgtagatgagataaggattttcctccgtgccgtcccccgtgcgcgtgggaagaacgacgggcttatactcgtcggcaatggtcacgtaataacggatggaaagatcgctcatgatgacgatatcgtcgataccgtatgtatcggtcacgccgtcgtagacgagttcgacggaaaacgtcacggtcttttccttgcggtcgcgttcggtatttccaagcacgccgtcggaatttctgtatttgatcccgttgatgacgaccgtatagataaaatcgacggtatcttccagatcgatgagcgtcacgtcgatataaaacgtgtcgccctctttaagatacgcggcggaagaaaccgcccgcaaagacgattccttttttgccgccgtgccgcgaaaggtacaactgtacagttcgacggtgtcgctcacggaaaaatcatcgtccttgtcgtccggcttttccgtttcgtcctctttgccgccgccctcgacctgatcggtcggcgggcggtttgcctcgatccttttatccgcgcaccctgcaaaaccgagcgccagcacgcagaccaacaaaaacaccagtatttttttcataattccctctttccttattatatgtcatccaagataggaagttcccggaacgttcggataactccccatcgcgatcaaaagttccaaccccaactgccgcgcggagagcacggcttcttttacattgtccgctttgcccgaaaacgcgaggatcacttcgttggagtgccgcgttcccttgtcgggcgtcatgtagttgacgatctccacttccgccgccttgacggcgttatccgccatcaccagcccgatggacgcgggcgagcccgccaaaaagccgaacgcctgcccgagttttgcgccgaacgccttttcgagcaccttgcccgcactcgaagaataggcgaattccagatgccccgcctcgctgatatacaattcccctgcatacttatcggtgagcgaaagcgcgatctcgatcgcccttctcacgtcggagggcgtatcgccgccgatgacggcgtaatttccgtgcccgccccagcctttcgtgtcgcgcggcagttcgacggaaagaatttcggtattcgtggacttgaccgcctcgtccagcgcggtgagttgccccgccgcgcccgtgcgcgaactgtacacgccgagcgagcggtatttcatacccaaacccatctgccgtaacaattgttcgtccgcgccgctgatgacgaggccgatggtatctaaaacggcggtcccgacaaattcggtgcgcgtgcaatttttggaaatagaagtcacatccatgataaacacattgtaacagattgtatcataaaagtcaagatattgaaaaaatcccccgaaaaatcgggggatcttgttaatttgttttctttttcccgaacaggcgttcgacgagtttgaccaattcgttcaaaaggacgatactgaaagcgagcgcgacgactttgagccacatgagcgcatccagcggcacggtgtcgaagaacagcccgccgaactgcgtgatgacgacctgcaaggcgaacgtgacggcaaaactcaacagcatcagtctgtttttgaagagatttttgaagatgctctctttgccgagttcgcggcagttgaaggcgttaaacagttggaacaacacgaacagcgtaaagatgacggaggacatcatcgcctcgttcccttcgggcacgccgaggaagttgaaaaggtgctgcataaggcatatcacggaaacgtaaacgccgttgagcacgatgcgccgcagcattttcgcggacacgatgctctcgccgcgcgccgtgggcttgtttttcatgagattgtcgctcatcggctccaatccgagcgtcagcgcgggcgggccgtccatgataatattgatccacagaagttcgagcgcggtaaagggcattgtaaaatccggaataattaaacgaatgatgacggacgcgaaaaccatgataaaggaagacacgttgacggtcagttgaaactggataaagcgcttgaaattttcgtaaatgcccctgccccacttgacggtggtggcgatggtggaaaaggaatcgttcaagagcacgatatcgctcgcctctttggaaacttccgtccccgaaatgcccatggcgatgccgacgtcggcatttttgagggcgggcgcgtcgttgatgccgtcgcccgtgacggcgaccacgttgcccttggattcgagttccttgacgacgcgcattttcagaagcggcgtgctgcgcgcgatgacgcggatcttgggcagaacgtccgaaaactcctcgtcggagagcgattcgagcgcggacgcttccacggcgatatgctcctcgtccaatatgttcagttcgcgcgcgatggcggaggcggtcacgatgttgtcgcccgtgagcatcttgatgtcgatgcccgcgctctggcaggtcttgaccgcgtcgtacacctcggcgcgcagcgggtcggtgatcgaggcgaacccgtcgaaaatcagcccgctctccgcgtcctcgcggtctttcgggcgggacggcacgactttatgcgcaaaggcaagcacgcggcacgccttttcctgctgggcggtaatttctttttccgcgttctcgcgctctttctccgtcatgttacagagggaaagaatcttttcggggctgcccttggagtacacgacgatccccttgtccgtttccacggcggtggtcatgtttttggtatccgaagagaaaggatacaggtcgcacactttcgccgcggcgcgcacttccttgtaggcaagcccgcacttttcggcattgacgagcagcgcgcattcggtgggattgcccacgaaggtgacgccgttctcgttttcgaagagatccgccgtactgttgatacagcagttttgcagcatgagaggatcgcacgtttcgcccgcgccgcgcatctttccgtcggtatacgcgcccacgacggtcatgcggttttcggtgagcgtacccgtcttatccgaacagatgacgttgatacagccgatggtctcgcaggcgatcatctttttgacgagcgcgttctgtttcgccatgcgcgcgatattgatggatagggagatcgccacgatggtgggaaggccttcgggcaccgccgccacgatgagcacgatgctggtgatgaaaatattgctcacgctctcgaaagatgccgccccctgcacgcacaggacgatgagttgaatgataaagatgagcgcagccgccgccgaaccgatcagggtgatgaccttgccgaggcgcgccattttttcctgcaagggcgtctgaccgcccttgtccgtctggatctcgcgcgcgatcagcccgaactcggtattgtcgcccacgttcgtgacgaccattttacccgtgccgcccgtgatgaaacagcccgaatagagcatatttacccgctccgcaacgggtacgttttccgattcgaataccgcgtccgcgttcttttccacgggcatgctctcgcccgtgagcgaggattcgtcgcacagaagggatttgctttccaaaagcctgccgtccgcggggatcttgttgcccgtttccacatagacgatatcgccggcgacgatctcctgttggggaacgtactgcaccacgccgccgcgcactactttgatctcgatgccctctttgatcttgttgagttccgcgaacgccttggcgctgcggccttccatgaccacggtcaggacgacggacacggcgatcgcaaagacgatgccgatgacctcgaaaaagtcgcccgttccggggttctgcacttcgcgcacgatgttcaccgccatggtgatgatccaggcgaagatgagcaggatgagcatgggctcggtcgccgcctcgaagatgcggcggaaaagcgatttgggcttggtacgggtaaattcgttcgtgccgtatctttcggcgttgcgctttacctgttcgggcgaaagccccgaccgggcgtctgattcgaaatctcttaccacggactccgtgtccgtattgaaaaatgccactactactaacctcccgacggtaaaaacaaaaaactcacgcacgcagacgcgtacatgagttcaaaacaagcgaaaaaagacgaaaatgatcccatgtaaacgttttgtgcgttacatgagtctcattatttaagacaagcctatgcctgacggcacgggttgtagacttgccacgcccaaaagaaattacgggcgctaactactccctcacgagttatttttttattattatattacacggcggcgcaaaagtcaacgaaatcgccgaggttgccgccaaatttttccgcaccttacgattttgcgcttttccgccgctttttaaactttaggtatgagaaaaccgcgcacgcggagactctcttcgatgccgtcgagcaccgcttcgctgtcggcgctgaccgtgtggtaatgatagtcggaagtgatgcgtttgagcggcgtggattttccgcttttcagtttttccaccatttcctccacctgcgcgcgcgcatgcacgcgcatatccgcgctgatgcgcccatacaccttgtggttgacgaaaacgtcctccaccgttccgcccgcgtcgacgatgagcagcaattcttccgccgtctcttcgtcggtgtgccgcaccttgaatacgcgctcacagcgcttttcggaaaggatatagccgcggttggtggcgatgacggggtgaccgcccgcgcgcagaagggcgatatcctgcacgatcacctgtcggctcacgccgaatttttcggaaattttcgttgcggaaagcggagcctgaccgagagcgttcaggatcccgcgccgccgttcttcaccgttcaatcttcctccctcctcatcgttactcttaccgtacgggatgcagatttttcaaggatacgtccagaatgggcgcggaatgcgtgagcgcgcccgacgacacgatatccacgccgatatccgcaaggcgggaaatattttccagggtgacgttgcccgaacactcgacgatcgcgcgatggtcgatatagcgcaccgcctcgcgcatttcctcgtccgtcatgttgtccagcatgatgatatcggcgcccgcttccacggcgtctttcaccatctgcatattttccgtttccacctcaattttcatcacgaaggaggcgtactctttggcggctctgaccgcctgtttcacgccgcccgccgcgccgatatgattatctttgagcagaatggcgtccgaaaggttatagcggtggctgccgccgcccccgacgcgcacggcgtatttttcgaatacgcgcatattgggcgtggtcttgcgcgtatccacgaggcggatccccgtccctttcaacagaccgcaaaggcgcgcggtgtacgtggcgacgccgctcatgcgctgcaaatagttgagcgcggtgcgctcgcccgtcaaaatggcgcgcatatcgccgcgcactttggcgagaagatcgccctttttcacgcggtcgccgtcctttttcagatattccaccgtcacgcggtcgctgagcagcgaaaacacgcgcccgaacacaaagagccccgcgatgacgccctcttccttagcgatcagatccgcctcgccttccgcgtatgcgggcagcacgcacgccgtcgaaacgtcctcgttggtcacgtcctctttgagcgccattaagatcagatcgtccgcatggatctttaaagtaatttcgtcaatcatattgttcctcctcctgcattgcgtcgagtaccgcgcgccggttttcttctttgagcgcggcgtagttttcgtatcgggaaagatcaacggcgggcatagagtcggaaacgccgtttaaagccatcgtttccgccgcccgtttcgcccagatcaggctttccaaaagcgaattgctcgccaagcggtttttgccgtgtacgccgttgcaagcggtctcccccgccgcgaacacgcgcggcatggaagtttcgcccttcccgttcacggcgatgccgcccataaaataatgctgggcgggcacgatggggatcggctgccgcatcaggtcgtatccctcttccagacaccgcgcgcgtatggtgggaaaatgttcggcgatcatcttttcgccgagcggccttacgtccagccagacgtgtttcagattttgttccttcatcttcgcgtaaatggcggcggtgacgatgtcgcggggcaaaagttcgttgacgaaccgttcgcccttgccgtccagaataaacgcgccttcgccgcgcaccgattcggagatgagaaagcgcctgcccgccttttccgaataaaaggtggtggggtggatctgcacgtaattcaagtgctgcgttcgtatcctgtgtttaagtgcgatcgccaccgcgtcgcccgtcagcagggagaaattcgtactgttttcgtacagtccgcccacgccgcccgcggcgagcaggacgttatccgcatagacggggaaaatttttgaatctttcctcacgacaacgccgcggcagacgcccttttcttcgacgacgtcaagcatttcggtatattcggaaaaggaaatatttttgcgcgatctcgcttcccgcagcagtttgctcgtaatttcgcggcccgtgacgtcgtcgtgaaagagaatgcgcggacgggagtgcccgccctcgcgcgtaaagcgcagcgcgcccgtttcgtcgcgggcgaattccacgccgaaccctataagatcgtcaatgatctcgggagaagagcggatcatctgttcgaccgccctctcgtcgttttcgaaatgtcccgcacgcatggtgtccttgaagtaggcgtcgaaatcctcttcgccgcgcagcatacaaatgccgccctgcgcgagataagaatcgctttcgtccagcgcgcccttgctcaaaacgagcgcctttgtagcggcgggaagattgagggcgcagaacagccccgcaacgcccgcgcccgcgatgacggcgccgtattttttttcgatattcattttcgttcggcaatctccaacatggctttgagaggtcttaacgcgttttccgcgaccgatgccgcgagcgtcacttccccgcagccgctttccagacaggaaagcactttatcgagggtgatcgtcttcatatcggggcagcacatgccgccttcggtcgtataaaagaatttctcggggcaggcgtttttcaactcgaacagcacgccgttttccgtgcagacgataaattcgcgcgaggcgctttgccttgcgtattcgataatgcccgccgtgctgcccgtgtacgacgcgagcgcgagaacgcccgcgcggcattcgggatgcgccagaacttccgcgcgcgggtgcgccgcctttgccgcaagcacggcgctttcgcgcaggtttgcatgaatgggacagcagccgccgcaaaagaaaaatttcttttcgggaagaaaggacgcgatataatgccccagattatcgtcgggaatgaacagaatatttttttgtttgagcgcgcgcacgattttgagcgcgttggaagaagtcacgcatacgtcgcagtgcgctttcaactgcgcggtggaattgatataacagaccaccgcgagatcgggcacgctctttttgagttcttcgatctgtccgatgctcgccatgtgcgccatggggcaatcggcggaaagttcgggaaggagcacctttttatcgggattgaggaccttcgcgctctcgcccataaactgcacgccgcagaatacgagcacgtccgccttggtttcggcggcgactttcgccaaataaaaactgtcccccacaaagtcggcggctgactgcacctcgtcgggcacataataatgcgccagtatcacggcgtttttttcggttttcagccgctgtatcttcgcttgtacactttccaaaattttttcctgcctttgatggaatccaaaatactatacactaaaatttgacaactgtcaagacaatcgggcgtcgtttataaaaacaagcggcgcaaaaactcgcgccgcctgcaaacgtatgaaattattcggtacggagggcgatgacgggatcttttttcgccgccgcactcgcagggatcagccccgatacgagggtgagcacgacgctgaccagaatcatgatccccgcctggtacaagggcagcgaagccagccccgcaatgcccgtgagaggcgtcaggatcaggttgacgatgaggcacagcgcgtaggacacgagcacgccgatgagccccgcgcacagcccgatgataaaggtttcggcgttgaacacatgcttgatatcgcgtttccgcgcgccgatggagcgcagaacgccgatttcctttgttcgctctaccaccgaaacgtaggtgatcacgccgatcatgaccgaggaaaccacgagcgaaatgcccgtaaacgccaccagaacataggtgatcgcgtcgagtatggtctgcacgatagacatcatcaagccgatctggtcggtgtattgaacgacgttgccctcgtcgcccagtttttcctgttcgtcgttccaggcgtcgagataattgagaatattgtctttggtttcgaaatctttggcatacagcgcgatcgaggtcgccgtatcgttgccgccgaaagcgcggattgcgctgttccaggcttcctcgttttcatagcgggtagcgggagggtcggctttccagtcgtcaagcgaataggcgagatatttgataagattggttatgcagggaactttgtagaccgtacccgattcgctcgttgcaatcccctttccttccgttgtcatccactcgatgatcttggatttcagactgttggcgcgcagtttgttcaccaacgcttcggtgcagttcagccccgaggaaaggcagccgtaattcatgtcctctttgggacgcaggatgccgacgatattcagattgataccctcgctctcgcttgcatcgagcgaatcgcgttcataggcgtaagtatacggaaatccgaaataattcgcgactacgtctgcaatgttatcggttgtgggattggtggcggatttgtccgtatcgggataaatcgtgtcgttataatagagagtaaattgtttgttgagcacggtttcgaaatcgatggagatctcttcgtccgttttgtcctccccttcctctttatcggtgaaaaggcctaaaaattcttcctgcgacaaaaatcccaactgcgcgagcaccaagtcggtgacttcgtttttcgaatcgatcacgagcacgatctcatcctcgctctcgggcatttttccctcgatgacctcgtactgggagagcacgtactgtccgtaatcgtcggacgtaagatcgtccgtgccgggcatcttgctgaatgtggaacccagcgaggacaggagcgacgccatcgaagaatattcggcggccgcgtcggaattgagcagcatgctgtaataatcgtagatcgccctgaccgaccagtttttgctctgccccttatcgtccgaagtatctggcgtcagcacgccgggattgatctccacttcggtatataagttctcgttgagcgacatgccgtacccgtactggatcgcgccgtacagcgagggatccatggcggcaatgtaatcgagatattcccgggtgatattgtttttcaccgtcatgccttcggaaagtttcgtaaggaaagaattgacgtacaccttatcgtccatgcggtcgaggtcgggtttcatcatgccgttcatcatgttgttcatgatggtttcgtaatccatggtcgtttcggtcacttgtatgggataggcggaaagcatatcttcttccgttctggttatgtaaccgccgaacccgctggaaagcgcgagcacgaggcacacgccgataatgccgatgctgcccgcgatggaagtgatcagcgttctgccctttttcgtcagaaggtttcggccgctcagtccgaacgcggtgagaaaagacatgctcgtctttttctgtttttttcctttgactttgggctgttccgcgagcggcgcggcgatctcttctcccgtttcgtcctcgacgaaaggatcgctgtcgtccaccactacgccgtccgtgaggcgcacgatacgcgtggaatattgctgggcgagttcggggttgtgcgtgaccatgatgaccagtcgttcgcccgcgatctccttgatgagatccatgatctgcacgctggtatccgaatcgagcgcgccggtcggttcgtcggcgagcaagatctcgggatcgttgaccagggcgcgcgcgatggcgacgcgctgcatctgcccgcccgaaagttggttgggctttttatcgatatgttcttcgagccccacgcgcacgagcgcctgccgcgcgcgttccttgcgctccgccgcggagatgcccgaaagggtgagcgcaagttccacgtttcccagaaccgtctgatgcggaatgagattgtacgattgaaatacgaatccgatactgtgattgcggtaagcgtcccagtctttgtcgttgtaatttttggtggaagtaccgcggatgacgagatcgccgctcgtatagtgatccagcccgccgatgatattcagaagggtggtcttgccgcagcccgaatgtccgagaacggacacgaattcgtttttgcggaaagaaagactgacgcctttgagcgcgtgcacgacggtatcggcaactttatagtccttgacgatgttttccagtttcagcattgcttttgccataataatttctccgttatttattgtccgtttaaacgatggggatcgtttccgcgtactggtccttgatctcgctcagcgcgtcgataaaaatattggtgacgcgtatgaaatcttccatttccttttccccgatcttggcgatcagtttttcgaaaaagaaattggtttcgccgcgcagtttttcatagtatttgtaggcgtcggaactcagttcgatgtaggcgattttgcggtccttttcgtccgcgacgcgccgcacgatatttttctcttccagtttgttcaccatctgcgaaaccgccgagcgcgtgatgcccagccttctggcgatctcgctcgagatcagtttctgtccttgttcggacgcgacgacgacctgcttcaaaagttgtaattccgaactgttgaaagggatctttttgctgaacagcctcatctcttcgaactttttgcagatcgaatagatttcctgcatcgtcttattattatctaacatatttgcctcccctcctcgcttcatttgttaagctcttaatcgtttattatgatactaaattgcttaacaaaagtcaaacgaaaaaacgtcggttaagcgcatttcacagacttttcatgcggcgcacattttgtgatgatttgtcgcaaaaagacgaaaaaaacgcccgcttttcaacaagcggacgccacattttaccaatcctgttttttcagagaattgctcttcacgtcgtcgtaataggaaaaatatttttccttgtaggagcgatcccgttcgttctcccgccccagaaggcgcgtaagttcctccacggtaaagtcggaaagatccacttcgccgtcgtattcggaaaataatttgtaaaggtcgcgttcggacaaatttctcacctctttttcatgcgtttcaggtacatggtggtgccgtccacctcggtaaaactttcgtatttattgagcgtgggcaatattttttccatcagttttttaaaagagttgcactcgtagtttttgggaatgaagtcggcgtgtttctgtttcatttccgcgctgacgcgggcgtagtacgccttgccgtcgttatcgtcgatgagccgctcgatgatcttgatgagatcgtcgcgctttttgcgctcggcaagttccgccttgtcgggcacgggcggcgcggcttttttgcccgtaccgctctttttctgttccttttcggcgctctcgccgttgtcgagatagacgtattcgctgaacgcgtttacgaacgcgggattgacgttccttccgcccatgcccaccacgactttattgcgctcgcgaagttcctgcaccagccgcgtgaagtcgctgtcgccgctcacaagacagaaaacgtcgatatccttttcgaagagcacgaccatggtctgaatgatgagcgcgatgtcgctgcaattttttttgctcacgatgccgaattgctgctcggcggtgatggaatagcggttgatctcctcgcgccaatttttcaacgctgctttcgaccagtcggcgaagatgcgcttgacgatgatatcgccgtagttcgacgcctcgtcgaagatctgtttggcgttgcccgcccctacgttttccgcgtcgataaagaccgccacgtttgtatttctcggcataattcactcctatatcttcattataacactcgggcgggcgcgctgtcaaacgaaaacggcggcgggaaacttcccgccgccgcaaacggctcttacgccgcgttttcgaactgagaattgtagaggtcggcgtagaagcctttctttgccagaagttcctcgtgcgtgccgctctcgatgatgtcgccgtccttcatgaccaaaatgagatcggcgttcttgatggtggataggcggtgcgcgatgatgaacgacgtgcgcccctccgtcagtttatccatggcgcgctggatgagcacttccgttctggtatcgaccgaactcgtcgcctcgtccaaaatgagcatgggcgcgttttcgaccatggcgcgcgcgatggtcacgagttgtttctgccccgcggacagattggctttgtcgctcatcacggtatcgtagccttcgggcagcgtcatgataaagtgatgcagccccactgccttgcacgcccgcacgacgtcctcgtcggaaacgccctctttactgtacaccacgttttcgcggatggtgccctcgaacagccaggtatcctgcaagaccataccgaacagatcgtgcacgttcgcgcgggtgagttcgtccgtgggcacgccgtcgatcttgatatcgccttgattgacttcgtaaaagcgcattaaaagattgaccatggtcgtcttgcccgcacccgtgggaccgacgatggcaactttctgtcccgctttggcgatcgcggaaaagtcgtgaatgatggtcctgtcctcgtcgtatccgaaagtgacgtgttcgaaggcgacctcgcctttgacgttttcgggcaaaagttgaactttcttgtctttctcgtcggaaagttctttttcgcccaaaaattcgaatacgcgctcgctcgcagccgccgcgctctgcatgctggtaaacgcctgcgcaagttgcgaaagaggcgaagtgaacagtctgacgtacagcgtgaacgatatcacgacgccgaaactcatgcccttggaaacgagcaccgcgccgacgacgcacaccgccacgtaacccaaatttccgataaagttcatgagaggcatcatcagtcccgaaagaaactgcgatttccacgcactcgaataaaggttgcggttgatggaatcgaactcggccttgacctgtttttcggcgttgtacgccttgacgacgttgtgccccgaatagacctcctccacgtgcccgttgagatcgccgagataccgctgctggcgcataaagtatttctgcgatttgcccatgataaggaacatgaacacgaacccgatcaggctcgcgacgatggcggtgaccgccatgatcgcgttggtgacgaacatcatgatgacgctgccgatgagcatgacgacggcggtaaacacggtcacgagcgactgattcagcgtctgaccgatggtatccacgtcgttggtaacccgggagagcacgtcgcccacgctgttggaatcgaaatatttgaggggcagcaagttgatttttttggagatcgcgcggcgcagcccctgcgagtttttctgcgtgaccgtcgccatgatgacgccctgcaagtacgagcagagcaatcccaccgaatagatgacgacgaggaagatacatacggaagtgacttcctgcaagttcacatcgctcaaaatccactgtaaactgttctcatcgaaatcgaaagacgcttggatcagattggtcagatcgcccagtttgttgggaccgatgagattgagcacggtgcccgcgacggcgaataagagcgcaacaatgatgggtacgataaacggttttatgaaaccgtacagttttccgagcgcttttttaaaatctttgggcttttccgctacggcggggccgggtcccatgggtccgcggtgtctgttattactcattttccagttcctccttcgaaagttgggagtaggcgatctctcggtacacttcgcacgattccatcagttccttatgcgtgcccttgccgaccactttgccctcgtcgagcacgacgatgcagtccgcgtcgcggatggtgccgatccgctgcgccacaatcagagaagtcgcgtcgcccgtctgttgtttgagcgccgaacggagcaccttatccgtcttataatcgagcgcggaaaaggaatcgtcaaaaatgtatatttcgggacgacggtagaccgccctcgcgatggcaagacgctgtttctgcccgcctgacacgttggtgccgccctgggcgatgtgcgcgtcgtattgtccttccatattttccacgaactcctgcccctgcgcgatggcgacggcgcgttttacgccttcttcggaatactccagtcccttcttttcgccgtaggtcacgttgtccttaatggtgccgctgaacatgacggcacgctgcggcacataaccgatcttatcgtgcagcgcgtcgagggtgtaatctttgacgttgacgccgtcgatcagaatttccccttccgtcgcgtcgtaaaatcggggcacgagattgatgagcgtcgattttccgctgcccgtcgaaccgataaaggcgaccgtttccccttgtttggcggtaaaactcacgttttcgagcacgtattccgaggcgtcgggatatttgaaggaaacgtttttaaacaccacattgccctgcccgccctctttgggggactgcgtcaccgtgccgcccttgatctgcgcctcggtagaaagcacttcgttgatacggcgcaccgaaaccatggcgcgcggcaggatgataaagatcatggcgagcatcatgaaggcggagaccaccatcatcgcgtagcccgaataagccgccatctgcgaaaacatttctgcacggccgggtccgtcgggaacgccgcccacaagataagcgccgatccaataaatggcgagggataacccgctcatcaatatcgtcatgaacggggatacgatcgccatcgaacggctggtaaacagttgcgtgttggtcagatcgtcgttcgccttttcgaatttcttttcctgatacccttccgcattgtaggcgcgcaccacgcgcacgcccgacaggttttcgcgcgtgaccgcgttgaggttatccgtctgtttctgcacttttttgaatttgggaaagacgatgacgagaatgaagagcatcatcagcaccatcgcaatgaccgccgccgcggtggcgacagaccactgccagctcttgcccgaaattttgacgatcgcccaaaccgccatgataggcgccttgatgaccacctgcaatcccatggaaatgagcatctgcacctgcgtgacgtcgttggacgttcgggtaatcaggctcgccgtggaaaatttattgatctcttccatggaaaaactctccactttttcgaagagctgccctctgagcctgtaagagagcgccgcggcgatgcgcgccgtgaaatacccgacgatgaccgcgccgagcgcgctccccaaggcgcaggcgagcatgatgccgccgtttttccatatttccgccatccccgcgttagagatggccaacgcggtgatcttctgcatataatcgggcagcaacagctccagccatacctgcaaaacgataaagcccagcgacagaacggcgtacagccattccttgggtttcagatttttgagcaatcgtaacataagcactccttattttgcgcctttcgcgaaagattacgcaataaattataacacgctgaaaaaatactgtcaaatgcttcatatgtgttaaatataaatatttgtgaaatattagtgaaatgatttgacttttccgtcggttgagattataataaaatacgaggtcagacaaatgaaggaagaaaaaatcagacagatcatcgacaatttatggtatatggcattgaaatcgcgcaagcacatggacgaaccgcggcgcgcggcgcatgagagaaccgtggcgcaccatcagatcttctgccttgcgatgctgcgggatacgggcggaggctcgatgagcgaactcgcgcgcaagatgggcgtttccagccagcagatgacgcgcgtcgtcaacgatctggaaaatctgggctgtgccaagcgatatatcgacgaaaacaaccgacgccacgtattggtgaaaatcaccgaagagggcgaacggacgctggacgcgcagttcaaggcggcgtacgattacatggcgcataagttcgagatattttcggacgaagaactggacgagtgtctctgtcatctcgcggcgctcacaaaatactgggacagattgcaggactgacggggagcggattcgctccccttttttcatatttcgggcgatgattgacaaacgttcggtaatactatataatgaacttaacatagtatcgggaggtatcgaaaaatgttttacttattattgcccggatgggtcgtgcccaccatcatcggcggcgtcatcgccctcgtcgtcatcattctcatcggcgtcatcgtcggggcatataacgcgttcgtacggatgcgcaacacctgcgaggaagcatgggcgaccatcgacgtatatctgaaaaagcgctacgatctgatccccaatctcgtggaaacggtcaaaggctatgcaaaacacgagagcggcacgctggaaaaggtcgtcgcggcgagaaacgcggcgatgaacgcgcagggcgtcgaggcaaaggcggaagcggaaaatatgctttcggggactttgaaatctctatttgcgctgagcgaggcgtaccccgatctgaaagcgaacgccaattttatcgatctgcagaatcaactcaaacagatcgagagcgaactcgccaacgcgaggaagtattacaacgccacggcgcgccagatcaataccaaaatgcagtctttccccagcaatatcgtcgcgcacttcatgcacctttccaaattctcttattacgagatcgaagaggaagcgcgccaaaacgtgaaagtacagttctgacggcttcgccatgaaaaacaaaatcggattattcgtttccgtctgcgttatgatggcggtgtttataacgctcgcgggcgtattgccctcgctttcgtccgaaccgccgcgggcggacgattcgtttaccgtcaaaagttacgacgcgacgtacgaattcgaacacgaccgcacgttcggcgtttcgctcgacttagtcgtcgagttcaaccgcaacggcaagcacggcatcatcgtcgaccttccctacaattcgggggaatcgtaccgcgacattgagtcagactcgcatatcgaagtcaagagagacgcgaaaaattttatttccgtctatctctatttcagcgaaacgggcacggcgcccgtacacacgccgctcgaactc

SEQ ID NO: 3021 - DNA, 2936 bp, Unknown
  16S sequences of unknown bacteria
ttcatgagcaagtagcgaagcggattgcgaatgtccgctttactaaacacaggtaaactctttttattctatcgtgatttcgtctcgtatgcaacctgattttttactgttccggcaacctgttccttcaacctcaaaacatttcccacacaaacccaaagtttttctgccaacgcagatccaaagttttcccttgactcccctcccttcccgccctatcatataatataaccagttcagcacaatagcaaaatgcaaaaacagtctgaagcaaatttatttgcgaaagactgtattggcattttggaatgggcggaacgcccattagccacagacggaagctgcgcagcagcgcatcgctcgaagagcgtgtctgtggcctatgtgctgaacgttcgattgatgtaaagaatgtagcaaaatgcaaaaacagtctggatggacttggcattttggaatggaaggagaaaatcgatccatgaatcttcccggctactactcctccggtcagtttgcccgcatggcaaacgtctctatccggacaattcgtttttacgataaacagaatattttaaagccatcctacgttaacccatccggtgcacgcttttacacagactcagattttgcaagactgcagcagatccttctgctcaaatatctgggattctcgctcgacgatatccgggaaatgacgatcaatgatacggactatcattttatgcttacgtctttgaaaatgcagaagaagctcgtacaggaccggatcgagcagatgcagctcgtagagcatgccattgaggatacggtaaatgtgatccggaaaaatgagcaggtggactggagccagatgctcgatctgattcacctgaccggaatggaaaaaagtctcaagacgcagtaccgggatgcctccaacatttctgcccgcatacggctgcaccatgagttttcgacgaatccgcagggctggttcccatgggtctatgagcagtgcgaaattgcagatgggcagctgatccttgaagttggctgcggcaacggtgcgctctggacggaaaaccgcgacaaacttccggcatcacttgccatcacactctccgatgtgtcgtccggcatgcttcgggatgcgcgcagaagcatcggagctgccgactcccgcttttccttccgctcctttgactgccatgagattccttatccggacgagagctttgatctcgtcatcgccaatcatgtcctgttctactgccaggagcccggcagggtcttttctgaggtgcgccgtgttctgaaaaaaggcggccgctttctttgcagtacctatggcagacggcatatgtgtgaaatcagcacacttgtgcaggaatttgacagccgcatcgtactctctgcggaaaagctgtatgagcggtttgggctggaaaacggtgccgacctgctcgccccgtattttccagacgtcacctgccggtattacgaagattctatcgagctggatcgcgccgagcctctgattgaatatattctttcctgtcatgggaatcagaaccagctgctgctggaccgttatcacgaattccgtacctttgtggagcgaaaggtcgcgaacggttttcacatcaccaaagatgccgggctctttctggcccggtagtctagcctgttcacgcttttctgcataaatttcactcgataaaatctcctcagatcagccattattcataaaatcctgcaaaattgaaaaaagtgcttgaaggtgacgttacgtcatcttctataatagcctcatacaacagatccggagaaattccggatcctgggaacgacagaacaatcggcggatatcgcgatccgcttcactaaagcataagctttcacaaggaggacgaataatgaaaggtattattctggccggaggctccggcacacgtctttacccgcttacgatggtgacatcaaagcagctgctcccgatctacgacaagccaatgatctactatccgatgtccgttctgatgaacgcaggcatccgtgatatcctgatcatctccactccgcaggacacgccgcgcttccacgagctgctcggtgacggacatcagttcggcgtacacctctcctatgaagtgcagccaagtccggacggactggcccaggcattcctgatcggcgaaaaatttatcggggatgacaccgtagcaatggtactgggcgacaacattttcaccgggcagggtctgaatgcccgcttgaaggatgcggtagacaatgccgaatccggcaagggtgcaacggtcttcggctactatgtggacgacccggaacggttcggtatcgttgagttcaatcaggatggcaaagcaatctccattgaggaaaagccggagcatccgaagagcaactactgcgtgaccggtctctatttttacgacaacaaagtcgtagaatacgccaaaggtttaaagccaagtgcacgcggcgagcttgagatcaccgacctgaaccgcatttatctggaaaagggtaccctgaacgtcgagctgctcggacagggcttcacctggctcgacaccggtacacatgagagtctcgtcgaagcgacgaactttgtaaagaccgtcgaggatcatcagcatcgcaaaatcgcctgcctcgaggagatcgcctaccgcaacggctggatcaccaaagaggaagtgctcaaggtatacgaggttctcaagaaaaatcagtatggccagtacctgaaagatgtgcttgataacaagtatattgatattctgcatggaatctgattccgattttactttataaggctcgcaaaaataaactttatgtaaccataaccaattttacataccagaaaggacttaccactatgaatattatcgttaccggcggtgccggatttatcggaagcaactttatttttc

SEQ ID NO: 3022 - DNA, 6440 bp, Unknown
  16S sequences of unknown bacteria
ccgaatcttctctgcattcttttctcgctcgttccgcataagcttttgcctccaatgtacattttgtactttttattatattgtactttttgtccattgtcaagtatttttgtacattttgtactaaaatactttttgaggtatggtaatgatattttctgaaagattgaaagagcttagaactgaaaaaggcgtaaagcaaaaagatgttgccgaatttataggtatctctaccaaaggttattgcttttatgagctgggacagcgggagccttcgctgcaaacgctttcaaaattatgtgattactttgaagtatctgcggattatcttatcggacgttctgacagctattaagctgtgctttaataatttcctccgcagacacatcaaacagttgagcgagaataagcacttgctttatattgatttccctttctccgctctcgtatttgaataccgaccatttacttactcccaacacttccgcaacttccgcggcggtgtttttattttgttcccttagttcccgaagggtcaggctttcgcttttgttcatctcggttttctcctttcaattcagtatgacggagttctggatcgagagtttcccgtccgtctttttcaaaactccgttcttaatcatgcgattgaccgccttccgaacggtatcacgatccaaattcaaagatttggctatcagttcataatcgacaaaggcagcttcatcggcgccgaggtgcagagaaatgacgcgcaggatctgcgcggacgttttatctatttccgtcagtttctcgattttcagtgccctcgtcatttttttcgcctcgtttttatttttgatttttgaaaaatcgaagccgccccctcatcggcggacgcaagcgccgcctcttgcgggggaaaggggtacggcgcgccgcggcttaattttagcgcccccgtcgctcacccgtctgtcccccgattgcgttgccctatgtccagcccatcgcgcgggggacgttccgcggattttctccgggcgcgtggtcgggacgcggttcggcttccggctcggcttcggcgcgggtgggcggcactgccgctctcacccccgcatccatttttccgttctcggacttccgttcccgcgcttgcccgttctcacttgcgcttccggttattcttctccgcggctctttcccccgtcgctctttcgggcttgacatttcacgggcaacgccgtttctcgcttttccggatttccccctgccgctctgcggctgcttctctctttgcgccttcggcgccgctggataagcgtgtatgtccgctgccacggctccgcgggtttattcctgctccgtcgtgccacagcgccgccgctcgggcttgatcggtttatccctgccccgctcgtttatcctgctttcttttccgcttcggcggggctttctcctcgatttcttcctcctgttctattccatagaacatccgatccagacgccgcacgttataactgccctggcgtcttaattcatcgatcgtcgggcggattgtgctgaactgcggcatttgtgagatcccgcctgctttcgaatgctgccacttttcgtcatagtacgctccgaagctcgtcgtgtcgtatcgatccgagcacgtcttttttgtattgatataatatatatcttcttccccttccgagtctgtttgccctgccgagcagtccttgatccgcactttcagtctatactgcgaaaatgtattgaatatccgcgtgtagtggttatagatcggcacatacagccgcgtcaacagatatattcttaaactcattccgccgtgccggttcatatacgtttcgctgtattctctgtatttctccgtcgcccacaaatacagcccttcctcgatcgcaaaacccggcattacgattttcggcttgcttttcgaacgcagcgttatcacctgtcctaattccgttatgtccgccatgatcgacgctgctctttgttcgtccatgataatccggaaatatgtataatagtctatcgtcgcgccgtgcgaatgcattttcatgtccgtcgtcagaaggtcgttttttacgttcgccgtctttgccttcacttcgagtccttgattcgtgttctgattcccgaactcttttcccgcttccgtgatcccgatacaaccgatctccaaggcgttttggtacggctcctccggatctattttcttgccaagtcgcagcgcgtcgaaaatcagattatggctgtattgactccgcgcgaacgagtcccgcgggcggcttcggaaaaagtcccacaccaatagcgggtgattcccgtagtcgatccactctatatcttcacgcattgagaaattcccgatattcaacggcgtcgggcaggtataaatataatactcctccgcgtacttctttatcgtgtcccagatacccacgatccgtaaattgtcatcgtattccatgggataacgcaggacgtcgtaatcgaatataaaatcattcccgatatatcccagcttttgcacgcttttcaaaaacttttcctgttcctccggcgttattatcgccctgccttcgtaatgctcgcgcattttcgcaacgaacccacgcagcttcgggaggttgaaattgccgatattcttccgaaaattttttaacgtctgttccaacacgtcccacttgaaaaacgggaactccatgcgacgctcaaacattttttcgtgcgctttctcacggaagatgatattctgcgacaaattcatgtccgcgttcgcctgcgttttccccactcgcggtttgccttctatcactaaatttcccgggtggttttccaaaaaatcctggtttcgagcttccgtttcgtctaatatttcataaccgatttttcgacggatatggttaaacaccagataggcaacaatcacccacacgaatttaggcagaaacgtcagcgccggcgttaaatctatcgctaattttgctatttgcgtatagatttttaagtccccgcccgcggcggaaaaataaaacagatacgcaaacgcttccgtcaggatcgtcagcgcgttcaggttatacgcccagatcaaccccagcagtagcacgattttccgatgttcgttcagccacccgatatatcccttaaaaaaattaataaccgggaaaatgactttatcctctatcttcacccacgcccgaaacggcttcgtcatgccgccgtggttgttatcgattttcggttgacgcatgagcttcaacaggacaatgcagagtaccggaagaatcagaaggatcaatatttgcaacagcggtttcagcattcccgcgatcccgccgaaaaagacttgcaaattctctttcgaaatcagcagtttcccgaactcgatgagcttttccttaaagcccgcgtattcacccggcaaaacctgcgtcacccccgaagggatattctgcaccgtcggcgtgatcgtacccgacagccattcgcctaaaaataactccgtcacatagtacgccgccgatagtcccaaatccttcatcgactgccacatacgcaacgccacgccgcggaaatacaataccgcatacaatacggacacgagcaccagagtcacgctcaaaagaatgtagccgattttccctttcgccttccccgcttcttcgtccattcaaaacaccttccgccacgtatagagcacgtagatccctattacaattatcactatcatcaacaggatccgcaagcccaaaatcagcttctcttttcgtttccgcctcatttcctcgccctacctttgcgggatcagactttttacatctacgcccagaaaccgcagcaacaagcccaggagcacgagcacaatgacaagttttattattaatttcaggattttcaacatttttccttgacttcctcctcgcggttaggtataatagatattaagaagtggacgcgacttcccttgcgggaagaatacatgggaaagtttttacttgcaaccgtggggcggaacttcttttttttcgtccttttttggatatttccaaggatatttttccccgaaattctttttttcgtcatgccgtacccgtttccctatgtacataggctcgggatcttgcggattaggattcgggattattttctcattcaaatgtcgtccgtcgcgttcgctgtgcatgactttccggtatttatactcgtccgtttcacgctcttttccctgtctgtccgtttttttgctcttttgctctccgactactaatgccgggtgctgtgttttcttgtgataccgaaaatgcgggaaattttctttctcggcggttttggatttttgcccggcattgccgggctttttagtttgtttgcctgcgccggattttttcgtcggcttcaccgcggtttgacgctgcgggtttatagtttttttcttacccgccgttttgtttacggcgggcttttttgcgttcttctgcttgttcattttttcgccttcgtgcgcgttttcttcttccgcttcggtttcggattctttacggctgccgttttccgtttcggcttgatgatccccgaccatttcaaaattttatatacgcccgctataagcgccgtcaacgctaaaattcccaatgccacgcctcccaggatcttcaaccatttcatggcattcgagccgttcagcttatcccacgtatttttaagccattccttcgcgtcgttcaatgcgtttttaatcgcgctgtccgtgtcgtccgcattgtccgccccgccgttcgacagatacgggttttcactcgtcccgtccaggtaaaagaaataactgtaatacatcgcgttgtcgtcgtccacaagctcgcataaattcatgcacattgtcgagatcaacggcgtaccaagcaagatccccatgaatccgcttttcgtcgaaagactgctgaaaaatttatacatccccgacccgcgcacttcgctttgggaaaagatcgtcatgcagccgtccccggtgttattcttgaaataaaaattcagatccgacacctgctccttaaataccgctaccgagaaaaagccgtacaaattttcccgcgtcacgtcgttggaatatttgaaaaaatgacgatccgtccgatttaagaacaaaatagaccactctttcccgtattcctcgcaccaatccgcatagctcgtcaacgggattttgatttctttcgcgttcccgttataatcgatctgcttcaacgccgcatacgaatacgaaagcttcgccgtataggtcgatactccgtcaaaggtgacgctgatactctccgccgtcgccaagcccagaatatccaaattttcaagaccgaggatttttgacatttccgcgtttgtcgggtggtaaatgtccgcgacgtctttgactttcaccgatccggaaaataccttcttttccgcgaaacacgcttttacaggctttccgtctttatccttctcaccctgcttcattccgtaatcgatatagttttccaaatatgtgacgaccattttccagctgtctgtaaatacgacctctaccggcagcacctctttcgccgtcgtgctcgtccgcacttctatttttgcgtttcggtaatcctccgcattttctatcgtcagtttgtctttgtacgccgcttccgtcgtaagcctttccacccggtacccgtccggggtactgtccacgaaatactctcccccgtagttcaggctgctgtgatccagcgctttgaatataatgctctcgtcatagttattcgtgattccgaaaagcgtattatacgtatattccaccgtgattttgcaggtatgcgtttccgaatcatatgcgctatattccttcttgatcgaagtcgggatataatgctccgcaccgtccaaaaattccggattcaccgcagctcttatcgcgtcaccgtaatctgtcatgaaattcgtgaaattgcaagtcacgatctcactatacagtttcacgatcggcgccgacgttttccacgtttccgaaatctttgttccgttcagcgttaactccgcatactcatatgtcagcgtgtattccacgtcctcgataatctccgccacgccgattaaagaaagattcacaagctcgctttctttggcgttcgggaaggtcacgatcagcgcttcctccgtcagctgcgtcgttactccctccggcgcgccgctgatccggatattgtcttttccgaaatcgaacagccaattacaggaattatgcagctgctcctcgatgtccgcaaatctgaatgtcagcgtcgtgctcgtcgcgcccgctaccgcttccgacgtgtaatagtctatcgtcagattgttcgcaggatcgttgttcgtcacacgcaaggacagatccttgtactgaaaatcgttgtattttacttccagcgttccct

SEQ ID NO: 3023 - DNA, 10496 bp, Unknown
  16S sequences of unknown bacteria
atgtatcgctatttggctggctgttttggcttgatctcatgtagacactatctagcaatactgcctttcctgaacaaacctttttgcgcagagtcgtcgcgtgatatataacatggaaatgtgcttctcttcccttcgtagcgcttgtatttttccttggatgaaggtataatagtccatagtatcttaggaaggagtgggttcccctgaagcatactcccctatatgaagagcacgttgccctcggggggcgcatggtggatttcggcggctgggcgctgccaacgcaatacgatagcattctcaaggaacacgcgcatgcgcgagaagccgcgggcttgttcgacgtttcccacatgggcgaaatcgccgtgaccggcgcgggcgcgaaggaatttgtgcattctattctgacgaacgatgtcttgcaagcgcaaaacggccaagccgtatacggcattttgtgctatgaaaacggctgcgcggtggacgatttgattgcctacatacagtctgacagcaaaattttgctagtggtgaacgccgccaacgacgacaaggatttcgcttacattcaatccctgtgcccgccaggcatcaagctggagcacgcttccgcgcgtttggggcagctcgccctgcaggggccgaaggcgcaggaagcgctttcccagcttacaagcgcgccgcttgcttcgctcaaatccttccatttcctggatggagaggcagttgcgggcattccctgctgcattagccgcacgggatataccggagaagatggctttgaactgtattgcgcctgggacgacacccctgccctctggcgcgctctgttgcaggtggaaggcgtgaagccgatcggattgggagcacgagatactctgcgctttgaggctaagctgcccctgtacgggcacgagttgcgtgaagacgttacgcccctggaagcgggtctttccttctttgtcaagctcgatcacaattttgtgggccgcgacgcgctggtcgcgcaaaaagccgccggccttacgcgccgtttgtgcgaagtggaactgaaggggcggggcatcccgcgcgcgggcatggcggtcgcggcaaatggcgccgaaattggccacgtcaccagcggcggcgtggcgcccacggtgaaccgtcccctcgcgctggccatgctggatgccgctttcagcgtacccggcacgcaggtggatttgatcatccgcgataagcccgttcccgctgtggtgggcaagggcatgttctataaaagaaaaaaggaacaggagtgagcgcaatggtacaggcaggattgttctattccaaagatcatgagtgggtgcgcatcgaagaagggcgcgcgttcgttggcatttcagactatgcgcaaaacgcactaggcgacgtagtgtatgtggaactgcccgagttgggcgcgcatttggaagcgggcgcacaggcgggcgtgctggagagcgtgaaggccgtaagcgaagtgtattcccctgtgggcggcgaagtatgcgaagtgaacggtgcgctggaagatgcgcccgagctcgtcaacgaagcgccttatgagaattacatcttcgtgctggaagccgccgcattcgacacgtccaatttaatggacgccgccgcttacgaagcctaccttggcaccctggaggaataacatgcgttacacaccgcatacccggcaggacatcggcaaaatgctggacgccatcggcgccggtgggctcgatgatctgttttgcgacattccggaagaagtgcgcctgcaaaggccgctggccatcggcgaaggcatgggtgaaatcgagttgcgccgcgaaattgcccgccgcgcgaaggcaaacttgtccgcggaggatgctccttgtttcctcggcgcgggctgctatgaccattttgtgcccgccgccgtgagcgagttgctcgctaggggcgaattcgtcacagcgtacacgccctatcagcccgaaatgagccagggcattttgcaatccatctttgaatatcagacgcagatctgccgcctaaccggcatggatgcctccaatgccagtctgtacgacgcgggcagcgcgctgggtgaggcgctgcgcatcgcctgggagcagaccaagcggcacggcgtatgcctgcacggcgagatccacccgggctattgcaacgtggcgaaggcctatcgcaagcccggcacgcacctggatgaacgcgaaatcggccccgacaccgccgcagtcgtaatccagcagcccgactatctgggccggatcgtggatgcgcggcccatcatcgagcaagcgcacgcggcgggcgcactggccatcatgatcgtgaaccccattgcgcaggcgctgctgaaaaccccagccgagctgggcgcggactatgtggtgggcgacgggcaacctttggggtgcggcatgaattacggcggccccgcgctgggcttcattgccacgggcaaaaagaacctgcgccgcctgccgggccgcatcgtgggcctttcggaggacaccgagggccgtcgcgcgttcgtgcttacgctgcaggcacgcgaacagcacatccggcgcgataaggcttcctccaacatttgctccaaccaggcgctcaacgctctcgcggtgaacatgtatctttcttacgtgggcggcgaaggattggtgaaaatcgcccgccgctgccacgcgctcgcctgctttgcggaggacgaattggcgaaacgcgaaattcgccgcatggatgacgcgccctatttcaacgaattcgccatcgcgctgaaccatccgcaggaagtgagcgacgcgttgtttgccaacggcgtgatcggcggcctgttcatccccggcggcatgctgttggccttcaccgaaaagcgcaccgaagcggaaatcgagcgccttgcgcgcctgattcaggaggccgaccgatgagcaagctgatttttgaaaagagccatcccggcgcgaacgggttcgccctctcccccatgcgcgaagatatgcgcataccggacgcttttttgcgcgcggaacgcgccaatctgccagaggtttccgaggtggaattcacccggcatttcatggagctttccaagcgcgcctttggcgtagacgacggcatgtatccgctggggagctgcaccatgaaatacaaccccaaggtgaacgagtgggccgcgcgccaattcgtggcgctgcatccattgctgccggaaaaatacgcgcagggcgtgctctcgctgctgtatgacgcgggcgaaatgctcaaggaaatcctgggcatggacgcgtttaccctacaacccgccgcaggcgcgcagggcgaaatgaccggcgtagccatgattcgcgcgtaccacgagcaccgcggcgaccacaagcgcaccaagatgctggtgcccgacagcgcgcatggcaccaatcccgccaccgcgcacgtggtgggctacgacgtagtggaggtcgccagcaacgaaaacggtctggtggatctcgatgacctgcgtgccaagatgaacgacgaggttgccgggctaatgctcaccaacccgaacacgctgggcctgtttgaaaaggacattctcgccatggcagagatcgtgcacggcgcaggcggccttctctattacgacggcgcgaacctcaacgccatcatgggaatggcgcggccaggcgatatgggcttcgacgtggtacacgtcaatctgcacaagacctttgccaccccgcacggcggcggcggcccgggcagcggccccgtgggcgccaaagcgcatctggcgccattcttgcccgtgcccgtgctgcaaaaggatggcggcgcctaccgctgggattttgatcgtccgctttccatcggccagatgcatgcgttctatggaaacgttggcgtcgtggtgaaagcctacgcctacatgctggccctgggcgcggagggcatccgcgacgcgtgccgcctggccgttttggccgccaactacctgcgcgtacgcttaggagaggattacgacgtagcttacgacgcgctgtgcaagcacgaattcgtgctctccgccgcccggcagatgcacgaaaatcatgtgggcgcgacggacatttgcaagcgtctaatcgatatgggttaccatccgccgacggtgcacttccccctgatcgtgaaggaagcgctgatgatcgagccgaatgaaaccgagagcctggagcggttggacggctttgtggaggccatgcgcgccatcgcgcgcgagtgccgcgaaaatcccgaaatcgtgcgcactgcccctcatacctgcccgattacccgcgtggatgaagtaaaggccgcgcgcaatcccgtggtgaaatacgaagaagcatgagttctaacctgctgaaaaagctcagcaccatcgccgcgcccgcagccaaaccgcgcccgagcaggcgcggtctgctggtgcggcgatatgccataccagccgaaaccgcgcttctcacgctggatgcggcgcggtttcgcgcgctgggatttgaagtacaaagcgccagtgattgcctgtttctcgatacggaaaccaccggacttgcccggggcgcgggcacggtggccttcctagtggggctcgggtatctggacgggaacgaattcgtggtggaacagtatctgatgcgcgattaccccgatgagccggatctgctcgccgctgtcgtctctactgccaagcggttttctgccgtggtcacgttcaatggggcaaatttcgatttgccgctgttggattcgcgcttcaccatgaaccgcatgcgcggcgaattgccgccgctggtgagcgtggatctccttctgcccgcgcgcaggctgtggaagctgcgcatcaaaagctgccgcctcgccaacttagaggcgcagatcctgggtgttccccgcgaacatgacttgccgggcagcgaggtgcccgggcgctacttttccttcctgaaaacgggcgacgaatccctgctcacggatgtgctcgaccacaaccgggaagacgtcgtttccctgggcaaactgctggccgtgctttcggaagcgtatttccagccggaaatgatttccgaccccattgatctgttcagcgccggtcgcgcgtttgaacggcgcggagaggatcataccgcgcgcagactctatgtgctggcaagcgcaccgcgtcccatcacgagcctttccgcgctcacggcgcaaaaatacgccggggaagccaacgcgcgcctgtatgccatgtatcgccgtgcacaggattgggaaaatgccctggccgtgctttcctgtatgctcgcacgcaggcaaaagctggcgttcgcccatgtggaactggccaaatatctggaacaccgcaagcgcgactatgcagaagcgctgcggcatgtcgacgcggcgctcgccctcgcgccagaggcggaacgcgcggcgctcacgcaccgccgggagcggttaattcgaaaaatgaggtgattcttatgggatttctgacgaattttaatgcccgcaaggcctacatgaagcatgtgcagggcaatcgcgcgtttgaagctggcaagacagaagaagggcgcgaaatgcacaagcaggccatggaaggctatgaaaaagcttataaagagggaatgaacgatcccaactacttgatggcgtacagcgtgcttttgatgcgcgcgggcgattttgaaaaatcccgcgagatcatgctcaagctggataaaatgaagctcgccgctgaccagcgcaagcagctgcatatcaattattccgtgctccaatggaaaatgggcaacctggacaaagccatcgagcaaatgcgcgtggtggccgcgggaggcaaaacggccatggtgtataccacgctcggccaatatctgatcgacaaagcgatccaaactggcgatttcaccgaggcaatcgaattcaacaacgaagcttatgaatacgacgaggaagacgctggcacgctcgataacctgggtcagttgaaatacgccatgggcgagcgcgaggcggccaaagactacttccgccgcgcgctggagcaaaagcccagccagaccgtcacgctctacaatcttgcccgcttgttgcacgaagacggcgaagacgatgaggcgcgtaagctcatcgcgcgcgccgtggacggcaacttctcttccctctgccctgtctcccgcgaggaagtgcaggctttgcaaaaagaaattggctgattctccctgctatagaacgaaaggcgccggcattttctcaagcgaaagcaccggcgctttggtttacaccataaaaggagcaaatccatggtattgatgcaatattcccgcgaacatcccgacgcgcaaatggcagcgcaaatcttagcgctcgaggaaaccgcatggccttcggatggagaaaatgcgcctttcccctctgctcctgaaacgtatgtcacttcttttgtcctgctcgatgagggcagagccatttgccatgtgggaatccgaaacagctccctttcccataaagaacagacctatcttgcctatggtctaagcgaggtcgtaactcacccacagtaccagaatcagggacttggctccaaaatgctcaaggttgctcgccagtttatcctcgaccatcgcccggatatcagcatctttacctgcgctccggaaagggtttccttttatacgcgcggcgggtggcaggccgttccaggcgcatgctttgtgggcggcacaccggaaaaaccgtttcgcagcgatgctctgggactgattacaatgatgatgttttgctccggcaaagccaaacaacacagggcagaattcgaaaacgccgatatcgttttctctctgggcgaaaaccagctttggtaatcctatcccattttctccatgcgggacagcgcttcgcactcgcgctgcaaatgcgcaagcgatttctgcctttccgactcgctaagcccatcggccagaatgccgcgaagaaactcgtagatatcctccatgcggcggcggaggcggtaaaaatccatggcctgtgggttcagcacgaaatccggccgcaaggcagcataagtctgaaaaaattcctcccgcgcgtaatcaaaaaagaagccatcgctaaaggcaaacaaatctgcctccgccggtgcaaacatcagaccttcccaatcgatcaggtgcagcgcttcaccgtcccacatcaggttccagccatgcacgtccgtatggcacagcgtgcatgcaggccgctccaaccgcatgccctccgcccgttggccgagactgtttatggcagtcatgaggatggaagcatggggtacaagaatctgccgtacgtcttctggcaaatcccgcgcgcaaagatacgcctcaatatccgccaaaaagggaaccacgtacgtttccgagattccctccaccgacgcgccaggccgaaaaccgctgccgtgcaaagccgccagcaattgtgccaactgccggatctgctctaacgtcagcggcgcatcccccagcgtctccccttcgatatacggaaacaccaacgccaggaaatccgcattttccactttataatctccgctttgggtaagcaatggggctgccattcgctcgccgagcggcgtattgtcccgcagccacaaaaccacgggcatattttcccgcatccgcgcaatccaaccctgcactgttggcctgtgcttatcgtataccttcacaaaataccggcctgcgtccgcatccgcaacgagcgcatgcgcggaccagccgcctggcacttcccacatagcttttacgcgcattccaaagcaacgatataaagcctcttccacaaaggccctcatggcatcgcgctcctttggtcatttcaattcgcaatttccgtcttcgcccgctttgcccgcttcgcgccatggcgaatttgcttccattttgtgggaacgccggcaaaaaacaccgagagattggagaatagccatgtaagcataaatatggggaacatcaaaattcctttttcaatgccaggacggattttgcgttccattgcgcacacggccagggcaaacagcgccagaaccacataagaaaacgccgccgcaccgagcagcgatgccacaaccatccatagcgcaatctggccgctcagcaagcgaatcaacatcgcaatcgccgtaatcacgccgggcacaacgcccaacagttgcattaccgtgcccaaaaagagcatcatcatgtccaggcaaaaggtgtcgcgacgccgcgcggtaagcgaaatcagctggccttcatagcgcaagaagcactgaaacgaaccgccaaaccagcgccggcgctggcggaaggagtcgacaaacgtcgtaggctgttcgtcatacgtcacggcgtcgttgatccaagccaagcggtaacccgccatggcgcacagcgcggtgagctctaagtcttccgtaagagaatacgtctgccggtgtacagcgcgcgccgcctccgcgctgagcaaaatgcctgtgccattaaacgcggcggacatgcccagcttatagcgaggccggttgtacataccatccatggcccagaaaaaaatcgatgtactcccagaaatccaattggcgtggggatttttgctatcgcggtatccctgcgccgcatgcacgccgctgaggagcgcatcgttggcgcgcttgaggaactgctcatccacgatgttgtccgcatcaaaaatcagatacccatcgtagtgctccggggcagacaacagccgctcaaacgcgaaaaacagcacatcgcctttggaatggatgggcacatccgggcagattacacgcgctcccgcgcgctccgccgcacccgcggtatcgtcggtgcaattgttgggaaacacataaatgtcgtacaggcgatctgggtagcgctgcgccttcaggctggcaacgcattcgccaatcacgccttcttcattgcgggcagcgatcaaaaccgccagctttttgcggggacgtgcgctggggatcacccgccgcttgcgcaagctgcccaaaattccaatgatcacataatacgcgccatacgcaagagttatcgctgagagcacagcaatccatatattcatactctacctcgccgtttcttccgcggctttgctcaccacggtgcgcgcagttccggcggcgcgcgcctccgcttgctcaatgcgttccaaaatttccaccaaccggggacggttgtaccgctgaatgatcgcgaacgggacattgcccagcacatgcaacaccatcgccacaatgcccgcccttcccgctacgagcaccataaaaatcgggctgagcagcatggaaagcacgtgaatcagctctgcgcagcaggtttccacaatgagctgatggatatgctccttgctccgcaagccgctaagctttttgcggtacatgcgcgttacgaacttgctcatatccggcacccggtctttccactttttgatgcccaacttttcgtaaatcgcgccgttgcgctcccatttccagggacggtaaaacgcattggtataatcaaatcgatcccgcggaatggccatgccgataaaaaacatgctggaaccaagcaccgcaaagatcaacaaaatctggaaaagctgctcgacaagccgcggaagcgattgaaaaaagtgcgcgagcacattcttcccccctgtcacccttcccgtgtagtatcggcacgccagagcgaactggccctttgtgcgtctctcgtatcttaccacatttccctctcacaatcaaggggaatcctgagaggcggctaaaaaccagcttaaatctatgtgaaatttcaaatcagggattgcgcaagcgggaagtttgtggtatactaatttgcgttgaccgattcgggcttggggttcgaccgctccgggttcgcacaaaagaataggtatatggaggagtcgcctagcttggtcgagggcgcgcgactggaaatcgcgtaacggtcaaaagccgttcgagggttcgaatccctcctcctccgccataagtccaccgtaattttgatagaattacggtggactttttctatgcccgaaaaccgcttggaatcaggcttttcggctgtttcggcacataagcgaaccccgctgcagaacaattctgcggcgggggtttgtgcgttttacggtatttgtggtgactttggccaaagtaagcgttaaatttatgggtattcgttgaatttttaggggattcgttgaaagatagagatattcgttaaaatgtaccccataaagtggacactctaattgtgcgaaacccaagggctggggaattaaaaagtttgaataccaaactatagacaatttcctcgctgcccacgaaaatgtgcgtcaacttggtcgtgtttttgaaaggggtatcaacaacctatttcagtcttctcatctcataccctacaacacagtaaggaaggatatgcctcccaaagggcgcaata

SEQ ID NO: 3024 - DNA, 6711 bp, Unknown
  16S sequences of unknown bacteria
acgagcaaacacctacgacctgaccgctcatgttgacgagagcgccgccggaagcgccgggatttatggcggctgtggtctgaatgtatttttccgaggtggtgccgtttgacaccctgcggtcgacggccgagactataccctgggtaacgctgccctcaagacctgccgacgcgccgattgcaagcacctcttcgccggtcttgaccgcctcggtggcaaaggtggcgggggtcaggtctccgtggctttccattttgagaatggccaaatcgtttctcgtgtcgcccgacacaaaggacgccttataatttgttccgtcggccatggaaatgaggaatgcggcattcggaacctcggcatagatgtggtcgtttgtgagaatatagccgtcggtgtccatgacaatgcccgaggcctgcgccgcggcgctgcccgaagcgttatagacggttatgctgaccacgctgttctgcacggcggtgatgacctgctcataggtcattgtacggtcgctctgtccttcggttttaatgtcgaaatccgaaggggagccgtccttgctgccatcctcgataaggctcatggagccgttgtctgccgaggggtcggaccttgttatgagcattccagccgaaagtcccataacgcccacggcgacgcagcacacaatgcagataaaggcgataagacccttgctcatgccctttttcgcgggggcgggagcgggctgactgttgttgtaatactgaccgtagggatagcggttatagccgtaggggggagggggagtgttcggacggtaatatccgccgtattgcccgcgctgaccgtaataggggccgccgtaataattctgtctcggtggggtatactgcccgtaggcagcgccgcccgccgtgttttgtccgttgttttgagcgggattttgcccgtttccgggctcggcagccgactgaccgccgtactgccccgcgttttgtccgctcccgccgaaatttccgctgctttgagcgttttcggggtgctcggcggcgttaaaggcgggctggctttcgggagggcgtccgttttgcgaatattttccgaagctgtatgtggtagcgggattttcgccttcttcggccggcttttgctcggcagcggaatgctcggcggcgctccgctcctctttaaaaccgtctgcgcagttttgcgcggcatttgccttttcagacgtgtcctcaaaagcttcgggagttttcttttcaaaatcgtccatgattattcctccgtgtgattgttgttgtcgggcagcggcgcgctttgcatgagcacggtgaattcgcagtattcaccttccttgcttttgacggttatctggccgtccagcatggcgagaatggttttgacaaggtaaagacccagccccgtaccctttttgtcggcgccgcgggatttatccaccttataaaatctgtcgaagacataggggagatccttttcgggaatacccaccccggtgtttgttatggtgagggaggaaagcccctcctgagaattttcggttttgactatgacgcgcccgccggcgggagtgtatttaatggcgttgtccataaggttgaaaacgacctgatacataaggtctctgtcggccacgacggccgtcggctcgagggaatcaagcccctccatggtgatgtccttgtcggaaatttggttctcaagctgtatggcgacggacagcaccgttcggggaatgttgaccgcctgtttctttatctcaatctctcccgcctcgagctttgaaagattgagcattgaggtgacaaggcgggaaagccgctttacctcggccgaaacaatttcgagatattccttttggcggtcgccggttatggtgccgtcgagaattccgtcgataaagccggaaatggtggtcatgggggtctttagctcatgggaaacgttggccacaaagcccctgtgctgctgttcgctgaccgacagcgaatgggtcatgttgttgaaggcgacggcaagctcgccgatttcgtcctcgcggtttacacgaatgtacttggaaaagtcgcccttcgacattcttcgcgcggcgtcggccatgtctctaagcggacgtaccatgttggccgtcaaaagcgaggtgacgagaagtatgatggcaagcacgcaaagagccgacagcacgaatattttaagaatgttggaaaggaaaattccaagccccgcatagggtataaagctgaacacggcgcccgccgtctcccctcccaccgttatgggagccgacacgatgacgctcttttccttaagcgcgccgccgaggtccccgatggccgaataggtgccggtcagggcggtcgccgcaatgtcggaggaaatttcggtcactccgtcgttgacggtggaggcgtcggaaatggccaccgttccgtcgtcgataatgacaagcacatggctttcggtggccgatgtgacaatttcggttatctgcatgatatagcgcagatttccgcccagcactcccgcctgctgcgcgatggcgtcggcctcggccgagagagccgaccgcttggtctgaagccagtagctgccggtgaaggtgtagattatcgcgccgagaaccacaatggcgatacaggtgaccgaggtgtaggcgagaaaaaattttctgaaaaagctctttttcataaagctatctcacttcgaatttataacccacgccccaaaccgttttgagcgaccatttgtcggacacgccctcaagcttttcgcgaaggcgcttgacgtgcacgtcgacggtgcgggaatcgccgtaataatcaaagctccaaacctcgtcaagcagctgatctcttgtgaaaacgcggttggggttggaggccagatgataaataagctcaagctccttgggcggggtgtcgatctgctttccgtccacccaaagctcgtaatttgtcagatttatgacaagcttgtcgtattttaccaccttgtcgccgttttcttcgggctttgcgcccctgcggagaaccgcctttatgcgggcgagaacctcctttgcgtcaaagggcttggtgatatagtcgtcggcccccagctccagcccgaaaaccttgtcaaaggtttcgcccttggccgtcagcatgatgatgggaacctgagagcttttgcgtatttcgcggcagacctgccagccgtcaagcttggggagcatgacgtcgagaagaatgatgtcgggcttttcggcaccgaaggttttaatggcctcgtcgccgtcgttggcgatgaccgtttcataaccgtccttctcgatataaagccgaagcagctcgcatatatttttatcgtcgtcgactattaaaacttttgcagacatattaccctctccttaatcgtttacaattattataaattcattttgttaacaatttataaatctcctgtaacggttttgttgattattccaaatcttcaagatcatagggggtgcgctggtatacgaaatagttgagccagttggaaaagagcagatttgcgtgggcccgccaattcataaggggcaggcggtcggggtcgttgtcggggaaatagtggaggggaagctcgggattaagcccctttttaaggtctctctcgtattctcccgcaagggtgcccctgtcatactccgaatggccggaaatgaaaaatctgcggcagtcgcggcttgcggcaatgtgaacacccgcctccttggaaacgccgattatgtcaaggtcgctcaccgcttcgacctcctgaatgtccacccccgtatagcgtgagtggggagcgaaatagcagtcgtcgaagccccttataagggggtggctcggcagcagaatttcatgggaaaaaacgccgcacagctttttgtctaaaaggtgcttttttatgccgtaatagtgatacatggcggcctgggagccccagcatatgaacatggtggaatagacgtttttcttggcccagtccatgatcatgcaaagctcgtcccaataatccacctcttcaaactccataagctccaccggcgctccggtgattatcatgccgtcatagcgtccgtcctttatttcgtcaaaggttttgtaaaatttaaaaaggtgctcggcgctgacgttttttgccctgtgggtgacggtctgaagcagctcgatgtccacctgaaggggggagttgctgagcagtcggagaatttgggtctcggtggccaccttggtgggcattaaattcagcagaattattttaagaggacggatgtcctggtgggcggcgcggtgctcggtcatgacaaatatgttttcgtcgtgcagggttttggccgccggcagctcgtcctgtattcgaatgggcataaataaaacctctttttcggaaaagtttcttattcattattattgtaacacaaatttcctttaagcacaagataaagggcggtatttttgccccttgcggccaaaagggagagggcaaaaggggaactcttttcggcggagggttacatttttgtatcattcggaggggctatattgacttttttatatattttagatataataaggcagtacgaccattttgattttaacgtcatttacataaaacaaaaaacacaggagagcaacaccgatgagtcaaatcgaaaaaaagagcggtaaaacgccccctaaaggtaagagtaagctcaaaaaagtgctgatgttccttggctttgcacttataaatgtgggcgttatcgcatacatagccgtcaaagaattcgcaggcggcgaaaataaggccgagtcggtccccgtgtcccagattaactttttctttatccttgcgggaatcggctgctttgccctttgcatacttatggagacctttaaatacgaggccatgataagggcctcggccggaaaaagcgacaaaagaaccgccttcgaggtggcggtgctggggaaatattacgacaatatcacccccctcggcgccggaggtcagccctttcagatatttcatctgaaaaagaggggatacaccggcggaaccgcggcctcccttcccattgcgggctttgttgtacttcagatgtcctttgtctttttggcgcttattattttcatcttcaacggcggcgcggccgacgcctatccggtcattaaatattcggcatatgtcggcctgcttttctatgcctttgtgcccaccgttatcgtgcttttttccctcatgccgagaaccttcggcaagataatcaagggctttttgtggctgtgtcacaggctgcacattgtcaaggatttcgaaaaaaccagccaaaaggtttttgtctcccttgaggaataccgttccagccttgtgctcatttccaagacccccatgctcatttccaagacctttttcttctcccttgtttatgaggcgtcgctcatgtccatgccctattttgtgctgcgcgccttcggggttcacgaaagcttttttcagctcttttcgctgtgcgtatttatatacgccgccatttccttcattcccacccccggaaattccggcgccgccgaaagctccttttacgccattttttcctcgcttgcggggggaatgctcttttgggcggtgcttgtgtggagatttctttgctactatgccttcctcgcaatgggaattttcgttattttcaccaattcgatgcggggaaagaaaaaccgcaaaaaccgcaagctttccagcaccgtttcctccattcagtttaccgacaccttctatcccgtggccgacaaggtggccgaaacggtggacagtctcgccgtgcgcatgaacgaaacgggaacctgctgcgtggtctgcccaacggccgactccccctcaaaggacgattatccctatgaggtcattcgggtgccgtcggtgcgcctgccctttttgggaagaaagctcccgctgcccgttttcgaccgcaagctgagaaataagctcaaggagcgcaatttcaccgcctttcatgcccattcgcccttcggggtgggcaagtttgccctaaagctcggaaaacgctaccgaattcccgtcatcgcctccttccacaggcagtattgcgacgagcttatctctctttcaaaaaataaaataatcggaaaaattcttgcaaattccatagttaaattttattgccgcgccgacgaggtgtgggctcagagccgaagcacggccgacgtgctgagaagctacggctttcgaggcgacataaaaatcgtgggcaggggaaccgagtttatcggcgagtatgttcccgaggagcgggtagaggctctgagggaagagctgataatacccgaggacaaacggattctgctttatttcggcgccctgagccgccagaaaaacgtccgccttgtggtggacacctgcctcgagcttaaggagaccgacgaccgctatgttctgctttcggtgggcagggggcccgacggagactatataaaaaccgtggccgaaaagctggggctgcgcgacaacatcatgtttttgggtcacatttccgaccgttccaagcttttggcggtaatttccctggccgatctgctgatttatccgtcccccgacaacagctttccctcggtggtgagggaggcggccgccctttcaacccccgcccttttggccgaggggtgcgcctcggaatatatcagcgacggcgttaac

SEQ ID NO: 3025 - DNA, 2604 bp, Unknown
  16S sequences of unknown bacteria
aagatcgaagaggaaatggaatatcccggacagattaaagtcaacgtgctgcgggaaaccaaggcgatcgaatacgcaaaatgatgtgaaaaggggggacgtcagtcccccctttgtccgtgcggggctgtgctgctttcctttggctgctgcgggccggaagcggaaatcaacgactgggaggaacggtatggaatttcgggtgctggcgatcggagatgtggtgggcgagaatggactggatcttctcgtgcgccggctgcggccgctgaagcgggaaaaacaggtggatttcactgtggtcaacggggaaaatgccgcgggcctggggctgtttcccgctcaggcagaggaaatctttgatgcggggaccgatgtgatcacattgggtaatcatacgtttgacaaacatcagatccgccctatgctggaagaaaaccgctatctgctgcgaccggccaactatacggcccgtgcgccgggccgcggcacggggtattacgatatgggccgctgcagcgtccgcgtcatcagcctgcagggccgggtcaatctgaattacaactgcgacaatccctttacggcggcggaccgtattttgaaagaagcggagcgggctacgtttacgctggtcgattttcatgccgaggccaccagtgagaagctggccatgggctattatctggacggccgcatttcggccctgtggggcacccatacgcatgttcagacggcggatgagcagattctgccccggggtaccgggtatctcaccgatgcgggcatgaccggaccggtgcactctgtgatcggcatgccggcggagcagtccattgaaggttttcttggcggcctgcgaggccgccacactgtggccggcggagcgtgtgcgctgcacggtgtgctgttcacactcgagagcggtacggggctgtgcacggcggtggagcggatccgtgtggcagacgccggataaaagggcggatatcggttctgtgcggtcggggtggaaacggctgaatggagccttgcgcgggtattttgtgcgcagaagaacgggaggtgcagtatggtcaagattttacatgcggcggattttcatctggacagcccctttgccggccttacgtcggaacaggctcgtgcgcgccggcgggaagggcgggagaatatcgcccgcctggccaattatgccaatgcgggccatgtggatctggtacttctggccggcgacttgttcgacagcggcgagatctaccgccaaacggccgaaaccctggctaaggcgctgggtacagtggaaggacgggtgtttatcgctcccggcaatcacgactattgggacgaaaaagggccttacgcgcaggtgaactggccggagaacgtccatatttttaaaagcggcgccctggaggcggtggagctgccggaactgaactgcgtagtgcatggtgcggcgttcacggcgccggagtgcacggacaatctgttcggcggctttcgggctgaggaagatgggcgcatccatattatggtgctccacggcgatctggatggaaatgcccaccgctacaactccttttccaaagcagaagtggccgaaagcgggcttgattatctggctctgggccatgtgcatgccttcagcggaatcaaccggctctggcgcaccacatgggcgtatccaggctgcccggaaggccggggttttgacgagtgcggccgccgcggcatactggtgggcacggtagacaaaggggaggcggacgtccatttcgtcagctttgcccggcgcaaatatgaaatccggaccgtggatgtgacgggacgggaggcgttggaggcgctggagacgcagctgcctccaggcggaacggcggcagatctgtaccgcgtggtgttcactggggaaactgcggcgggggtagatctggaagctgtccgcgcggtggctgcagagcgtttttaccatctggaactgcgggatgagacgcgcttgacgcgggacctgtggcagcgcgccggggaagaatccctgacagggctgttcttacgcggtcttctgcgccgcagggaagcggcggcggatgaagcggaacgcctccggatcgaccgggccgcacggtttggcctggccgcattggaaaaacgggaattatgattatatatatttttatatcaaaaaagcgaagcagccgtaagctgcttcgctttttttcgtgtgtcagtcttcaaataatttggaaacgggaacgtccagcacccgggcgatcttgaaaagcgtttccatggacacaccgcatggattggttgggccttccactttggcgataaaagaccaggatcgtccgattttttcggcaaagtcctcctgggtgattcccttcaattttcggtagtactgaaccttcaacccgaatttgatgtattcctgttcaaattctgttttcataatacacctcttgtcatagggtagcatgattgggttgaaattcttatatcgttgtattattatttatagcactataatgatataatatggcagtaaaagtggtattatgcaacaatcgtcccgtgaatcggagcggtagaggtgtgcagaga

SEQ ID NO: 3026 - DNA, 11264 bp, Unknown
  16S sequences of unknown bacteria
tacggcattgcttttaacaagaagcggtgcaaggccgtgtgcgagaggctgtagcgatgctgtacagccgcggtaacggcatttgtgcaagggaataaacattatgctgatattgtaagcgatccaaaaagaggatttgggcccgcttcggcgcccaatcctctttttgttggtgttttttatgattcaataaattttacaattcaacacgcacgccgtaagcgcgcatccagcgatcgatctggatgaggtaggccagcatttgcggggcggtcatcaattgcccaaaccagggcgtggccgcgggcgaggcagaggcggtcgcgcgctccacggcatcgaaatccaagaacgcgcgcaggggcgaagcagcgtcgctggcgatagagcggaagcgttcgcgcaccaggcgcatgtattcggggttccaggtcttaggataggggcttttgcggcggtagagcaattcgcgcggcaacaggtcgcgcgcagcttcgcgcaatagtcctttttcatagcctttcaaaaatttcatttcccaaggaacgttgtaaacgtattgcaccaggcgcacgtcgcaaaatggcgcgtagagcgcaagcccggcctcgtcgcacagccgataggcgcgttcctgcaaattggccataaaatattggaaacacaacccctgcatggcgcgcagcatgcgcgcgcggccggtttcgccaggcagcgtgggcaggctgcaaagagattcttctagacgtgcctgcgcgtattcgcgtgggcggagcgcttcgcgcacggaactggaaaggatgctttcgcgcaattccagcgagcccgaccagggaaaggtggtaagcgaagtgctttcatcgcgaaaccagggatagccgccgaagacctcgtcggagcattcgcccatgattacgccgttttcctgcgccgcgatggcccgcgcgaatagcaaaagcgagctgtctacatcgcccatgccgggcatgccgcgcgcgaaggcagcgtcttccagcgcgttcacgagctggcgttccgagaggatcacccggcggtggttggtttttagcgcgtgcaccgccatttccacatagggggaatccagctccggctgaaagcggctgccggtgaagtaggcctgcgcatcctcgtattccacgctgtagctgtttgccgcgccgcgcatgcgcatgagcagcgcggtgaggatggaagaatcgatgccgccggaaagcatggacgcgcccgcgcatccggcggcgcggcgcatggcctgctcgagcaaatcgcgcacggtatccacggtttgcgcttcgccatcctcatgcggcagggcttccagcgcgaaatattgccggagcacatgcgcgttggcatccgccaccagcgcatagccgggcggcaattcccggatgttcgcgatatacgtttgcccaggcgagcgcgcgggaccgatggcgaacaattcgttgagcgcggttttgtccatcacaggctctgccgcgccagcgagcaatagtgcgggcagccaatcggaaaaggcgatttgcccttccttggcggtataatacacgggcacttcccctagagggtcgcgcgtgaggatcaatttttcctgttcggtatccaagatggcggtcgcgcacggttcctttaggtgcgcgggataatcatctccccatgtttcataggcgtccagcgcctcctgggcgcaggaaccgctggaaaaggcaaacagtgttccttcgcccgccgtgtcatgcgcgcgcatggcatgcgcgtcccacagagcgcaagccgcgccgccagtcgcgcgccaggcggcgcggggattcccactgtggaaaagtccaaatagcttcacgctttccacctcctgccagtatcgctttacaggctatgagaatggagcgaaattcatgccaccaagcaaggaaatgggattttggggagttggctaaggaaacgggaattcaggcccggccagaggaatcgattctgcttgctgcgtcgaaaagaccgctttacgtggaaattagtatgcgttgctgaggagaaagtcggcggcatggagaatttgcactccctggtaattgccgcccgcgtaatcgtcggcgcgcagcacgtatttgggataattgtcccgaatatccaaaagccgcccgtatgcacgcttttgcgttttagcggagccaaattcctgcgccacttgaatgtacagcttgttttcccgctttgtggcgacgaaatcgatttcgccatgttccagctttcccgtggatacggtatatccccgccggagcaattccagataaaccgcattttccagcatggggaaaacgctgtcgggcgtataacccagcacgctgtaacgcagagcggaatcggcaaggtagaatttttcttgcgcttttagcggcttttttgcctgcaaatcgtatcgcgggcagcggttaaggatataagcgctttccagcttggcgagatagcggtaagccttttcgcagcggacggcatccgtttcgctctttaaccctttgccagagacggaaatcgcttcgcccacatgggcaaaggcaaattgcaaaatccgctccagcgcgtgggctttgcggattttgccgcgcctcattacctcggtaaaaatggtggaatagcaaatgtctctcaccatggtatacgcttcctcgggcgaatagcgccgcaaatgcacggcgggaaatccgccgagccggaggtagttggccagttcggcatgtggatcctgtggaggggcgaacgtctttcggaaggccaggcactccgcgaacgatagcggatagatgggaatgcaaacataccgccctgcgagatgggcggaaatttccggcgccagcatctgggaatgggaacccgtcgcatagatatccacatcgtgccccaccagcaaagcgttcacggctttttcccaggaatgcacattttggatttcatccagaaaaatataggttttcccagcggccaagtgccgctggatttccgcaaacaggcgctttgccgtgtggatctgcgcgtgctccaaggaatcaaagctgtattgcaggattcgctcagaagggacgccttgctcttttagttttttcgccagcattttgagaagcgtggatttcccgcagcgccgcattcccgtgagaattttcacaaatggcgcatcctgatacgcgaggattttttccacatataggggccggtaaatcatggcaagcacctccacagggatattatagcgcatattgggcggaagatcaatggctggccgtatgatataggcgagaggggcgctttcggcggcttgatttttttgccgctttattgtatactttctgtgtgagagaaacagaccccatcagcaaggataggaagggcgggcgattggatgcaactgaccattctgggcaattccgggccgtaccccgcgccaggcggcgcgtgttcgggctatttgctttcgcaaggggatacgcacgttttgttggattgcggtttgggcgtgctggcccgcttgcaagagcacatttcgctgagagcgctttcggcgctggtgctcacgcatttgcacttcgatcatgtgtcggacgcgttcgatctggcagttgccatggaggcgagcggaaatgcctgcccgccggtgtttgcgccggaaacgcccgcgccgcagcgcgcgttgctgccagctggcgcgcggttcgcgcgggaatttgccgtggggccgttctccttttgcctgtatcccgcgcggcatccggtggaagcgtattcgctggtgatccggtgcgaaacggcaaaatttgtctttaccggcgacaccaactggcacgatggattgatcgaaatgtgccgggacgcggatctgctgttggcggatagcgcgtttttccatgcggagtggagcacggagaagccgcatctgtccgcgcggctgtgcggtcagcttgccagagaggcgggcgcgaaggcgctgctgctcacgcattttccgccgggcaaggatgtgcgggcgctggagatggaggcgcaggcggagtttccctctgcgcgcgcggccaaactgggcgaaagttatagcattccatgttgagaaaatttttgcgctgccgtcgcgtttccgcggttgcgctcgcgttgatcgcgggcatgctggcggcgcatttttatgccataccgctgtggtgctggggtgtcgcggcgctcttgggcctgggcggcgcgtgcgcctggcggcggccgggccgcgtggggctgatgctcattggcgtggcgggcttgggcgccgcgcttttgctgctggcggaaacgcgccccgcgttgccagcggaagaggacgtaacgctggaaggaattgtggcggaagcgcctgcttatcaggcggatcgcgggcgcgccgtgctcgtggtgcaagacggcgcgctgggcaaagtgcgcctgtatctaacggcggaggaagaagcggttgccgctgtgcgcgtcggggattttgtgcgcgcaaatgcgcggttgtggctcgatgcgcccgaggatttcgcgctgtatttgtggcggtatgggattgtggccagcgcgtttgccgaggaagcggcgtttgagccgggcggcttttccgccgcgcgggcgctggacagcgtgcgcgcgggcatttccggcaagatcgacgcattgtttccccatacggcggatctcgtaaaagcgctcattttgggcgaccgctccgaattggcggaggaacaaaacgacgcttacgcccgcgcgggcgtggcgcatttgctggcggtttcagggctgcacgtttccatcatcgcgggcctattcgaccaggcgctgcggaaattgcgcgtgccgcgcctggtggtgctgtgcgtggtgttttgcgcgctgctcgcgtattccgtgctggtgggcatgggtgcaagcatcgtgcgcgcggtgttgatgtacgccattgcgggcgtgggacggcagttgggccggccacgggacggggtgcaatgcctgagcgtggcggcggtgattcaattgctgatccaacccctgtggctgttcgatgcgggtttcatcctttcgtacacggcgattgcgggcattcagttggtgggcgagccgcttttccagcgcgtaaagggccgcttgcggcacaaagccgtgcgcagcgtggtgcaaaatttgctggtgagctatggcgcgtgcctcggcacgctgccttgcgtggtggcgatttatggctggacttccgcctatgggcttttgttgaatttggtggcgatcccgctgagcgtgtatgccacgtatggttgcgtggccgtgctgtttgtgggcgcggcctggttggcggcaggcaaactcttggctgttctaccggagtttctgctatttttgctcaattggctcacggagtggacggcgtcgctcccaggcagcgtgctctttttgcgcccctgggccgcgtggtttgtggcgctctttgcgctcgtcgctgtactggcttccggcaggctgaaagttccccgccgcgcggctacggctttgctggccgtgctaccgctgctgctcatcggccacgaagcgggcgtgcgcctcatggcgcaaggcgaagtgcgcgtggtatttctcgatgtggaacaggcggattccgccgccattcacgcgcagggcaaactgtattttgtggatgtgggcgagcgctattccgacgcggcggagtatgccgcccgcaatggcggccgggtggaagcggtgtttctttctcacctgcacgacgaccacgcgggcggcctggaggaagtgctggaaagcgcttcggttggcgcgatatatgtgcctgccgggtgggaggcatacgatgtggaagaggatagcgccagcgcgcttgtggcggcgcgcgaagcgggcattcctgtggtggctctttcggcgggcgacgaggtgcggctgtcggaaggcgtaacggccgcggtgcttgcgcctgacctggcggcagaagaaagcggcgaggacgcgaatgcgatttctatggtgctggaagtgcgctatggcgcggcggccgcgctgttcaccggagatttgcccgcggactgcgaaccggattcgctgccggacatcgatcttttgaaagtggcgcaccacggcagcgcgggcagcacgtcttccgtctttcttgcgcaaaccgcgccttccgtggccgtgatcagcgtgggggaaggcaatccatatgggcatccggcggaagaaacgctcgaaaggctggaaagcgcgggcgtggcggtttttcgtacggattggaacggcgatatcgagtgcgtgctggatgaggatggcagcgtatttgcgtcggtagagaaagaagggcaatcatgaagcgggaagcgttttttcagaatgtgaaaaagggcgcgttcgagcgcgtatatttcttctatgggccggaggaatacgttaaggccagcgcgctcaaggcgctgcgcgaagcgattttgccggaaggcttagaaatggtcaatgaagcggtgcttgccaatccttcgctggaggatttggacgccgccgcgcaaacgatgcccttcatggcggagcgcagattggtggtggtgaacgacctggctgccttgcggcagagcaagggggaaggcgagggcgtggaagccgccacaggcgatggcaaagctctgctggaatggtgcgcgcacgcgccggataccgcctgcgtggtgatttaccatacgggaaaactggatgagcgcagaggcctgaccaaagggctcatcgccctgcctggcagcgtgcggtttgactatctcgtgggggaagagttgcgcaagtggatcgaccaggccgcggagcggcagggcaagcgctttgcgaagacggccctaaacgagtttacggcgggcgcgggagaggatttggcgtccattttgggtgcgttggagcaggtctgcgcctatgtgggcgagagtccggaaatcgacctggaagccgtgcgggccatcgtgcagccgccgctggacgccaaagtgttcgccatgatcgacgacattatggccggcaacatggcgcgcgcgcaaatcgcggcgaaaacgctggtggacgaaggggaatcccgcgtgggcattttggcgctcatcattcgccaattgcgcttgatgacggacatccgcctgttgcaggacgcgcgcaaaaccgcgccggaaatcgcgcaggcgctcaagctttccgattttgtttaccgcaaaacggcgggttcggtgcggtcgctggtggcgccggaaattttggcggcataccagcgctgtgtagacgccgattttcagttcaaaagtggacagattggcgaacaggcggcgctggatcgggcgatatttacgttgcacgctttgtttgcgcgcggccgaaaggaaggaaagagccgtgcgcggtaaaatcgccggaattgccacgcaaaaaacgccgcaattttagcggttttgcctgagaaaatctatatattagacaaaactaacccgtgtttctggcggtatgtaatttttttgcaagtgcttgacgaatccagttagctatgataaactacgtttgttcaagagttaatgaatgctaactggttgcggaggcagaattggcaagcctataagaaggggggaatacgatgatgccgttggcaatggcggatgcgggcacgcattacaccatccagaagatcacgggcaaggatgaagtgcgccagcatctggcggaattgggattcgtcgtaggcgagccagtgcgcgtggtgaacgaactggccgggaatctgattctatccgtgaaggatagcagaattgccctggacagggacatggcgatgcgaatcatggtttgaaaataggggaggagacggcagcatgaaaacgctcaaagaagtgaagattgggcaatctgcgatcatcaaaaagttgcatggcgaaggcgcggtgaagcggcgcatcatggatatgggccttacgaagggcacggaggtttatgtgcgcaaggtcgcgccgctgggcgatccgctggaacttacagtgcgcggctatgaactttcccttcgcaaggaagacgcgcagtggattgaagtggagtaattttttgtgtttgatggttagaagacgctaattgttaggaggcagggatatggcgatcaaaattgctctggcgggcaacccgaacagcgggaaaaccacgatgttcaacgatctcactggatccaaccagtatgtgggcaactggccgggcgtgacggtggaaaagaaggaaggcaagctcaagggcgcggaggatatcatcatccaggacttgcccggcatctatagcctttccccttacacgctggaagaggtcgtggcgcgcagctatctggtgaatgaaaagccggacgcgattttgaacattgtggacgcgacgaacatcgagcgcaacctgtatctcaccacgcagctggccgaactgggcattccgatggtcatcgcgctgaacatgatcgatgtttcgcgcaaaaatggcgatgtgattgatctcaagcgcctgggcgcggcgctgggctgtgaagtggtggaaacctccgcgctcaagggcatgggcagcaaggaagtggcgcagaaagccgctgccctggccaccaagcgcgtacatagcgaaccgccgcacgtgtttgcgggcagcgtggagcacgcgctggcgcacatcgaagatttgatcacccaccgcgacggccaggaagccgagcaccaccaccacgcggatggcagcgtgcacgcgggcagcattgtgccagagcacctggcgcgctggtacgccatcaaactgttcgagcgcgatgaaaaagtccttgccgaactcaacctccccagcggcatcaaggacgccatcgaacaggcgatcgacgcctgcgaaacggaaatggacgacgacgcggagtccatcatcaccaaccagcggtacgcgtacatcaacaagctcgtgtccggctgtgtgaagaagggcagaaagcgcggcgcgctcaccacttctgacaagatcgaccgcatcgtcaccaaccgctggctgggcctgccgattttcgtggtgatcatgtggtttgtgtactacgtctcggtgcagaccatcggcgacatcctcacgaatttcaccaacgacgtttttgtggcagaatggatccaaacgccggtgaaggagtggctcagcagcatcggcaccgcggattggctggtcggcttgatcggagatggcatcatcggcggcgtgggcgcggtcatcggctttgtgccgcagatgctcgtgctgttcattttgctggccattttggaagacgtgggatacatggcgcgcgtcgccttcatcatggaccgcatcttccgcaaattcggcctttcgggcaaatcgttcatccccatgctgatcgcttccggctgcggcgtgcccggcgttatggcctcgcgtaccattgagcaggatcgcgaccgcaagatgaccattatgaccaccactttcatcccctgcggcgcgaagatgcccatcgtggcgttgatcgcgggcgcgctgttccacaattccggctgggtttccacgggcgcgtacttcatcggcgtggccgcggtgatcatgagcggcattttgctcaaaaagacgaagccctttgcgggcgatcccgctccgttcgtgatggaactgcccgcctaccacgcccctgccgcgggcaacgtgctgcgcagcatgtgggagcgcggttggagcttcatcaagcgcgcgggtacggtgattttgctttccagcattttcatctggctcacttccagctatggctgggcgccggtggtggaaggaacccccgtggacggcgcggcggaagaaacggtgctggcggacgcggatgcggagacggacgaaacggcggaaaacgcggcaatcacttcttacgtgtttggtgctgtggaaaattccgatgagagcatcctgggccacatcggcagcacggtagcgcccgtgttccggccgttgggctttggcaactggcagtccacagtggccacggtgatgggcttggtggcgaaggaagaagtggtttccaccttcggcgtgctgtacggcgtgaccgacgaagcgggcgaagacgccgccatgggcattgtggaagacggcagcatgtcggcggacgaaatggccgaagcgctttcgccgatcgcccagagctttgacgaatccagcaatgggcatggccaattggcggcgttctccttcctgctgttcaacctgctgtgcgcgccgtgcttcgcggccatgggcgccatcaagcgcgagatgaacaacgccaagtggacgctcttcgccatcggctatcagtgtgtgcttgcgtatggcgtgtcgctgatcgtgtaccagctgggcctgctgttctcgggcgcgggctttggcgtggcgacggctgtggccattctcctggtggcgctgctggcctatctcgtgctccgcaaaaaccggtacgacgaaaatcacctcacccagaaggtaaaagtgcaggcgtaaaacagggcctgaaagaggaggcatttgtatggcgacatggattgtgggcggcgttgtggcgctcctcgtggcggccatcgtgatcaagatggtgcgcgataaaaaggctggcaagggcagctgcagctgcggcggcgattgcggccagtgccacaaatgccattgacgctgctatagcgtagaaaatgcgcaaaagaggccgttcatcttaggaggcggcctcttttgcgtctgcaaaagcgtgtcaaaattgtgttgcgcgagataaattttcgcgcggcattttttgcgattgacacggttgtaaggactccgttataataaaaaaatgggaaccaattcccagactgtcgaaaaagcaaggagaggggcaaagccctttcgtacttcaatcgtccccggcggcgtgtacggcgggggcgcacgaaggccgccgccagtggcggaagcaggccgtagtaagcccaatgaagcagggagtgccgcaagcgagcctgcgagcgcagtgggacgaccatgctgaattgaggggtgcatggattcgcaatacgccgcgtcggaaaatcccattttccagagcaaaaatcgcttccttgcagtttccgcgcccggaaatccataggatttcagcggaaactggagaggggcgcacgaaggccgccgcctgtggcggaaacaggccgtagtaagcccaatga

SEQ ID NO: 3027 - DNA, 5786 bp, Unknown
  16S sequences of unknown bacteria
gctatttgtgatttactgttgtcggttgcagaataatatttcaaaaaaattaagtaccttgccgccctttgccccagataagggggcaggagatttttattttatgagataattttccataaaatttttatttaatgtttctaccaaagcggtgcaaaaatcagctacttgcccggtactttctttcattccgccgtcaatccattgctttaaaatgccgttacagccttcgccgataaaaaagaacatccactttttttcctcatcagacagggtggggaattttttattgattatatccatattccgcctgtaacaaagttcaaaaacccttttgcggaaagcgccgtcgccgttttcaccaatcaacacggcaaataaatcttttgtgtccgcaatggtgcttaaaatcggcgacaaaacctgcggaaaagcgtcggttttttcactctcaattctcctttcaaaaagatttatatattcgctctcgattttactaagtaaatcatagggattatcatagtatttataaaatgtggctcggtttatattggcccgccgacaaatttgcgtaacggtgattttgtcaagggcggtggttttaagcaacttcataaacctgtcggttattctttcttttgtatttacaattcttttgtccatttttcacctttctgtcataaaataataaacatattctttataaatgtattttaaaatacatttattgattatttagcggttgaatattcctttttatcaattataatatataagtcgaagttaatcaacacttgtttattattttttgaaaggtaaattatgaatattaaaatagttatagactccgcctgcgatatgagccttgcggatgcggaaaaaagcaacattagaattgtgcctttaaaggtatttttcggggataaaatgtatttggacaatgtgacattaagccacagtgagttttatgaaaagttgatagagtccacacggctgccaaccacaagccaaattaccccttacgaatttgggcaggtatttcgggaagaaacccaagccggcaacaaaattatatgtataaccgtttcgggcaaactctccggcacatatcagagtgcctgccttgcggcaaaagattttgaaaatgttgcggttgtggacagcatgaacggcagtatcggcgagagaattttggccgattacgccgtcagccttataaaccggggcaagtcctttgaggaaatagtcgaaaccctcaatgaggaaaagaacaatattcgccttatggcaatgcttgacacattggaatatgtaaaaaagggcggaagaataagcccgtcggtggcttttgccggcagtcttttggcaattaaaccggtgcttgcggttaaagacggagagttgtatctccacggcaaagccagaggttcaaaggcggtaaacaacaaaatcgccgagtatatacacgagtgcggcggcatagattttgacaaacctttctacctggcatattccggtacatcaagagatatgctggataaatatatccgggataacaaagatttgtaccaaggttacgccgacaatattccggtttcatcaataggtgcggcaatcggtacctactgcggaccgggaacaatagtagctacattttttgccaaaacaaaataatttttcattataattttttcattcagtcctatatataaaaatgccgcggcggttttaaactgccgtggcataaaatttatttggttttaataaattgaaaattacagattattttggtgcttgtattccaagtattcgtcaaatgtcataggcttgtcgataatcttgccgtcaggcttaatttctataattcttgtggctattgtctgtataaattggtggtcatggcttgaaaacagcactgtgcctttaaagtcggcaacaccgttgtttacggcggtgatggattccaagtcaaggtggtttgtaggctggtcaagcatgattacatttgcctctttcatcatcatgcggctgagcatacatctcactttttcgccgccggagagaacgcttacctttttgtaaacatcgtcgccgctaaataacattctgcctaaaaagccccttaaaaagctctcggtttggtcttttgaatactgccttaaccactctactatgttatcttcgctgtcggcaaaaaattctgtgttgtccttggggaaataactccttgatgtacttacgccccatttaaagctgccttcgtccggctctatttcttcattcaaaatcttaaacaaggcggttatgcctacctcgttttcacctacaagggcgattttatcaagccttgttacgataaaggacacattgtccagcacctttacgccgtcaatggttttggaaagatttttaacctccaaaacatctttgccaacttctctgtcctgaacaaagtttacatacggatattttcttgaaaaagccggcatatcttcaagctgaatgttatcaaggattttctttcttgatgtggcctgttttgactttgatttattggcggaaaaacgcctgataaattcttcaagctgtttgattttttcttcttttttcttgttttggtttttgataagttggttcataagctggcttgactcgtaccaaaagtcgtagttgccggcatagatttttgccttgccgtagtcaatatccacggtgtaggtgcaaacggcgtttaaaaagtgtctgtcgtgggaaacaaccaaaaccgtgccggggaagtcgatgataaattcttccagccattcgatagcctcaatgtccaaatcgtttgtaggctcgtccaacaaaattatgcttggtttgccgaaaagggcttttgcaagcaaaaccttaactttgtcacggccgtttaagtttgacatggtgctgtaataaagatttttgtcaacgcccaagccggataaaagctgttgtgcgtcgttttctgcctcccaaccgtcaagctcggcaaattccccttccaattcggcggcctttgctccgtcctcctcggtaaagtcgggttttgcatacagggcgtctttttcctgcataatctgccaaaggcgggggttgcccattataacaacatccgtaacaatgcaatcgtcatacttaaagtgatcctgctccaaaactgacattcttgcatttttggaaagagttatttccccttttgtggcctccctttggccggatatgattttaagcagggtggatttgccccggccgtttgcgccgataatgccgtagcagttaccgtcgttaaaaacaaggtttacatctttaaaaagagttcttccgtcgaactcgtgggttaaatttgatattgtaagcatattacctctttaaaattttaattatattattcacaccgttgattatactttatttttgtcaatataacaagggttattattttaaataattattatttttcttttacgcttttgatttccgcctcttgaaagcggtattcctggtcggcggccgggtatttttccctgtcaacaggggaggcaaacatctcataagggcgtatgtacaatccggcgtccccgtacagggcacggtacaccacatatttttcaccggtttcgctgtgggtggcaatgccttgaactaagtataaatcccctttaaaatggcggtatattttgttaattttaatttctctcatattatatctccttttcggataatagtagcatatttagcgcaaattgacaacagtgtatctattgtatttgttgcataaataccgctgaaaaatttgttgtatttgttggaaattgcgaatttacaattttgaaaaattaaattaaaatacaaatatatttttttgagaggtgtatttatatggcggaaattttaaaacccgttaaagagggcaaagttcgtgaaatttatgacaacgacgacagtgttattatggttgccacagaccgcataagctgttttgatgttattttaaaaaacactgttaagtacaaaggtgatgtgcttacacagatgtcgaaattttggtttgactacacaaaagacattttgccaaaccacatgattacaacggacacggcaaaaatgccggaatttttcagaatcgattattttgcaaacagaaccatgctgtgcaaaaaacttaaaatgatacctgtggaatgtgttgtcagaggctatctttcaggctccggctggcaaagctacaaagaaaacggcacagtttgcggcatagagctgccactggggttacaggaaagcgaaaaactgcctcggcctatatttacacctaccacaaaagaggaaataggcaaccacgatatgcctgttacattccggcagtgtgttgaacatttggaaaagtatttccccggcaaaggtgaggaatatgcagaaaaaatcagagattacagtattgccctttacaaaaaatgcgccgattacgcctacacaaagggaataattatcgccgacacaaagtttgaattcggcattgacgaagagggaaatatagttttgggggacgaaatgctcaccccggattcctcccgtttttggccgttacagggctatgaaaaagggaaagctcagccctcatacgataaacagtacgcaagagattggcttaaagcaaatgaacatgactggcttttgccaggagaagttgtggacaaaacgaccgaaaaataccttgcggcttacaagttaattaccggggaagatttggtaaaataactttaatgcccggactttgggaaaaatgatatttttgttttattttttgttacaaaaatgggattaaactgtttatattaaatttcaatgacaggtaacagctacccaaaacagcagtatcgccgcccttttacccacggggcatgacatgtaaaggggaactggcggcgttagccgactgaggggttgtcaaacaacctgtttacatcaaatttcggctataaataacagctccaaaaatcacctacacagcctcccttgtacccaaagggcataacatgtaaagggaggtggttttcgcaagaaaaatcggagggattgaccttggtacgataaattgatttgcaagcaaacttacaagcgaatatcgtatataaacaaaatgtttttacaatctctcagtcagctatgctgacagctctctttaccaaagagatccttgctttatggattgtttatgccaaattacggttacaaataaatatatttataaaataaatccgtaggggcgttcattgaacgcctatgcaaaccgcaggtttgcacattgacaaccctcccggtgttcgctaatcgctcgcaccaccctcccttaacaaggagggcaaaattgcattttgtttgtgatagtattttatagcggaaaataaaattaaacaatttgtttgatcaatctctcagtcggctgacgccgacagctctctttaccaaagagagccttgctactcgttcggttggaaatgccgatttgcagccgaacaaaagagccaaagagagcctattttatgatttttacatcgaattacgactataaataaatatatttcaaaatccgcaattttgcctcccttgtacccacggggcatgacatgtaaagggaggtgatttttcgttagaaaaatcggagggattgaccttggtaaaacaatttgatttacagccgaatatcgtatgtaaaaaaatgtttttcaatctctcagtcagctacgctgacagctctctttaccaaagag

SEQ ID NO: 3028 - DNA, 4437 bp, Unknown
  16S sequences of unknown bacteria
tatattgccgagggcgacaacgactctaaaatatgcacgctttacccgccctcggtctatgacatcgtagcatttttatgtcaacctgtcaaggacgctacgcgccgccataggcgatggctctgcttctgcctctggctcggacgatcttaaaatatgcactgttttaacatggaaccgggcatttacagaaaattctgaacatagcccgaccgagtttacgcgtatgccgtcctttatgaacttttcgcccggtctgaaactttcatgtcagttcttgtaactgagaatgtcggaaaatatattgtcgagctgagtctgaacagtcggaatgtttttctcgcaatacgacatgaacttgtccgcggattttcttctcaccatgtctctcatcatgaacgcgaagcagttgccggcgccgtaattccagttgaaatcatagaccccgctgttctggattatctgatacatttcgtatgattcctcatcgcgcaggaattttccggacatggagatttcatagaccgccgggttcagcgtgcggtaggactccatcgagagcgcctcaagcatgacgcctgtgaactcgggatcatcaagcgttgatgggagcgccatcatctgcgtcgttgccatcgagtagtaatccgcctgtgcctcgtcgtatttcggcagcgggacaattccgaaatttacctcacagtcgcgcatctccgggagtataagggtcagattctccatgaacagtgattgaccgtcgaggaaaatcttcgcgtcggtcagactcttggcgctggatatataaacgcaattaccattgttgataaaagcgtccatgaaatcaactacggatttcattttttcggacatgacatttgccattgaaatcttgtcgccttccactgatgcgattgtcagtccgttcgcgtagacccagttcgagtcctcagcctcgttcgggacaagcgctaatccatacatatcgttttcgtcatatttgccgtcgccgttcaggtcgttcgaaacagcctttgccattgagatcagcttgtcccacgtccatctgccatccttcacaagtccataaaggtcagtgtcaagcttgttatcctctaagattttacggttgaagtagatgcagtcgttgaacttgtagacgagatcgctcgcgtgaaggaggagaactccgtcaacctccagagtgtcgcgcagatgctgcgcccaccatggtttgtcaaaattcaccaccggcagatcgttgaaattgtagagagcctttgaggagacgagcgggttcacaccgccgaacatatgcgtcagcgcgaggtcgaactcgttgtcgcccgccattacggattgcaggaatgcatttccgacctcatcccatgttccgcctgtgctgtagtaatcgatatcgacgttgtatttttcctcgacagttctgtttcgcttgtagacagcgtcgttgacaagatcgccgttttctgtctccgcgtcatacggccagaatgcgccgagctgatccgagctgtagacgatagtgaacttgcgcccctcgaaatcatgctcaccgagatccgtgtagatcgactctgttgtttcctcggacacggaggtggtatccgcgtcggtcacggtgatgtccggtgtttcccctccgcaggagacagcggcgagaagtgaaatgagaagggtgtacgcgatgagattccgtttcataaaaagttgtcctttcttattccgcgtcacagaacgcggtttttttcgtgagtccttgcagttccttcaggagttccgcgagtgtttcctggcagagcttcctgtcgcaatgataagccgcttcgcttccgatattcttgtatttgcgcagtccgagcggatgatacggttcaagctcgaccgacttcaccgaagaatgagaatccgctgttcccgcgatcagttcgatgtgtctgctgttgtcattcacgccggggattatcggacagcggagccttacatccgcgccgacttcgtcgagaacggaaagtcccgaaatgagcttcccgaagtccgcgccgacatattcgcggctgttttcaccgaccttcagatcgtagaggaagaggtcgcagaactccgccgccctcaggagattttccggagaggcgcagcccgacgtctcaaccgcggtgttgtatccggcgatcttcagagcttgcagaagttcaatgagactatccgcctgcgcgaagggttcgccgcccgaaatcgtcactccgccattgtctccgtagaaaatatcgtcctttccgacctcgcggaggagctcgccgactgaatattcccgcccgatcacctcgagcgcgccgaccgggcagacttcggcacatttcccgcagacaacgcattttgtccggtcgagaacatgaacgccgtcaaatgagtgcgcgccattcggacagattccgcatttctggcatccgacgcatctcgccgcgtcgaaactcagctccggataaaagccctttccctcggggttgtggcaccacgcgcaggagagcggacaacccttcataaagatcaccgtccgtatccccggtccgtcgtgagtcgagaagtgctgtatgttgaacacgagcatttttagtcacccatgctgcgcgagatcacgtcgtcctgcaaagatttcggaatccgcgtgaagtagtcgctgtagccgccgattctgacgatcaggtcgccgtggttctcggggtgaagctgcgcgtcaagaagctcctcagtgttcacaatgttgaactgagtctgaatgtcctcggtcttcaggaaaccacggataagagcctttatcgcgcctgtcggagtgttcttgttcagcttgatgttcagcgccgtgccgcctaagaatctcgacggctgccacgccgaggacgcgcagaggctcatcgtgggtcccatgcggtcatagccctgaaccgggtcagagccggaggaaagcggagttcccgcaagccttccgtcgggagacgccattgtctgcgctccgtttgacgcgtggtcgcggtaggagaacgcgccgggaatcactttcgcgcctcggaaggttgtgtaccgtccgaaaatctcaagcaccatgtccgagacgcgtttcgctatcaggtcggtcttttcggtgtggtttccgaagtgttcgacgcggttgattatcctgtcgcgcagctccgtgtgcccctcgtaattgtcgctcaaagccttttggaactcgggtatcccgagctttccttcgttatatacaagctcgcggattatgttcaggctctcgattacatttgtcatgccgagcatattcggctcgatgaagttgtacttcgcgccgcccgaatcgctcgacatccctctctgtgtgcagtcgccgataagcgcggagatacgcgcgggatcagtaccgtttctggcgcgctcaagctgccagatattctctgtgaagatcgccctgtcgcagtaagccgtgaaatcccgccggtagctctcaaaaagctcctcgaagccgatatccgccggacatttcatgaaagtctcggtgaagatcttcagcatatttatgtacgggctcgtgattgagacgcctgaacagccgatcggtgtgatctccacacaggtagagtgagtgaaattgttcgcgtcccgccggtcgtagccgtatcggagcatagattctgtgaccttatcggagttccagatctgcggatttccgtgcccttcgcggattatctcagccgcgtatgcgagtatttccacgctcgtctcctccgtgacgcagaagccaacgttcgggtcaggcgtgtgggtgtgccttatcgcggtcaggaaatgccaggtcagctcgttttcgaccgggtttccgtccggatcccgccctccgatcatgaagccggcagccgcccaggcgctcatgttgttcatgtactggagacagaagctgtcgataagctcctgcgccgatgtctcgtcgagaattcccgccccaatgtcgcggcggtagtagggaagcaggtactgatccggacgcccggcggaatagatgccgtagaggcagtaaaggaagagatgcacgctttgcagagcctcgcggaaggtgcgcgcgggctttgccgggacgtgatcaagcgtttttgcgagcgcgaaaagctcatcccgttgcgcgccgtcagccagggacgccatccggcgagcttcgtcagcatagtttttctggagcgtcagtactccttcaagctcgattacgcagctctgatgaaactcgtagcgctcgacattccgaccgtccgtgaggtcaagcgcgtcccggaatgctttctgctcttctataagcccctcgactccgagcgaaagcagcttttcgtagtcaagcgccatatgatccgcgcgtcctcgcgtatatggtatcgcgccgga

SEQ ID NO: 3029 - DNA, 1666 bp, Unknown
  16S sequences of unknown bacteria
cttttccataaacggaataaggtcggcaaagcagggcatttttttgagctttccgcttttgtcggtcagacttctgttatctcttgttatgccgaacgatttatagcagttaagtatcgcgcgacccaaaagatatttttcgtccggcgtaatggcgggatataataaatcgaaaaagatatgtatgctttggattttatcgagtaacacagagccgttatccctattaccctgcatttccgaatcaatatccagcgtatttcttcgtatctccataaggttaatacagtcggcagaccccgcacctattgacacaaacctgccgcctattgcttcgcaggcgtttcggtattcaaagcccttttcgggagctataatatatacccttacgccctgcatacgcagtctcattgcaagcagcagtaaaaagaaagtcttgcccgcacccgacattccgaataccgccatatttccgttgctgtaccttgcggtatcgtaatggtctattattacgggcgagctgttatgcagattgagcccgtaaaatattcctttttcgtcgcacatttcaaaggacgagaacggaaacagtgccgccacggacgaggttagaatattccgcttggatttattaaaaatatccgtgtcggtctgtaataacggcaaagaggacaaaaaagctttatcctgcatataataggtttttcttaccgaaaaaccgttagccccgcaaaggtttaaaatatccttttcgcgctttttaaggcttgcgggtgaatcggcagtaaccgttattacggtgcttaaatagtaaaagtcttcaccctcacggtttatctgcgacttcatatacagccccgattccaccgcgtcgtcaagctgttcaaagtcctgtcttgtatcgcccacgtctttaaggcgcgaacggttaaacattgccgtgttgcctatcttgggcaatattttatcgcggctttcctttttcagaacaaatgagatatttatcccgtctcccgcctcaacaaacggcgcaccccaggcaatcccgacggttgtgggataaccgccgcccgaaatatacagatacgagcggtattcaccctcaatgcagatatatccgctgccggtacagtcggcgctgtcgggcgttaaagcctcggataaatccatatttgaattttcagctgccgcagaaaacgggcggaaataattccttaaaaggtttattaaaaattcgtcttcattgctatgccttacggtttcaagcccgcaagcttcaagatattgtcttgcggtcaatgcggtttcgcctatctcggcggcaacctctgctatttcagaggattgacctgtatacggtaagacaatataaaagcggcgggataagccttcggtttcggcaataaagtttaccagctgcgcgtcctcaaatatcatttggcggcagttagtgtttttctccgcattgtaatagctttcaagcctttcgcaaaacgcggatatatccgcgggtcgggtttctacaattatttgaagctcatccggcgctgttttaagaaacgccgcaaagccggatataatattcttctgctcaagctcggattttaagtggaaattcagcggcagcacctctaatacggtcacgaatttaccgtttttaagcgca

SEQ ID NO: 3030 - DNA, 32759 bp, Unknown
  16S sequences of unknown bacteria
acccactgcttattgctccgcgcaattgaagcaggggacttgcttgactcggttaaaaaaacataaagagtcccggtcagcgataccagaactctttctttgcgctttatctttcacaaataatcagtttttttacacttccgccgtaaactccgtcacacctgccggaaccgttaccttcttcacttctgttcctgtgtaaacggtaagttcgatttcctcaagtgctttctccattgtcacggttaccttcgcaccgtcttttactgcggtgatacggtttacgatgcttccatccactgccgggatcacgcacttagctgccgcgccgtcctttggctgatacagacgcagggaaacgccctttgcataatcgtaatccggacgcatttcctccgcgccgatcgcaagcagcgtattctcacgcacatacagcggcatagagaaataatcgtacgtatccttctgccagcggcctccgtcacgcacttcgccgcttaagagatgcgtccattttcctgtcggaaggtaatactcgcttacaccgtcctcgcggaagatcggagataccagaagggattcgccaagcatatactgtgtgtcgaggtaagcaactgccggatcttctgtatactcaaataccatcggacgcatcaccggagttccctcctcatgtgcctcgatcgatttcgcatacagatacggcatcaaccggcatttcagcttcgtaaacgccgctacgacatcgcatgcctcctcatcaaacagccacggcacacgatagcttcctgatccatgcagacggctgtgtgtggacatcagtccgaacgccgcccatctcttgtacagatccggcgttgccgtgctctcaaatccggaaatatcatggctccagaaggagaaaccactcatcgcaaaggagaggccgccgcgcagtgtctctgccatggacggataattcgcgaagcagtcgccgccccagtgtaccgggaactgctgtccgcctgccgttgcacttcttgcaaacagcactgcctcctgctcgccctttacttctttgagcaggttgaatactgccttgttgtacagataggtgtagtaattgtgcattgcctgcggatcactgccatcgtagtacgttacattgaccgggatacgctcgccgaaatccgtcttgaagcagtccacgccgcactccagaatcgtacgcagcttgccggtgtaccatttcacagcatccggattcgtgaaatctaccagtcccatgccggcctgccagttgtcggtctgccatacgccctttccgtctgcacgcttcagaagatagccgttctccatgccctcacggaaaaatgcagtaccctgcgcgatgtacggattgatccatgcgcagatcttcaatcccttctcatgataacgctgcaatgtgccgcggatatccgggaagcagtcctgatcccactcgaaatcacaccagtggaacgctttcatccagaagcagtcaaaatgaaatacgctaagcggaataccgcggtcgatcatgccattgataaaggagctcgtcgtctcctcgttataattggtcgtaaaggaggtcgacagccacagtccaaaggaccatgccggcggcagtgccggacggccggtcagtgccgtgtagccatttaaaatctgcttcggtgtcgggccgtagaagaagtaataggagatcgactcgcccggaacggaaaatcccacgtactctaccttctcacttgcaacctcaaaggatacattatccgagctgtccacaaatacaccgtagccacggttcgtcatatagaacggaatgctcttataagcgatctgagaagcggtgccgccatcctcattccacgtatccacactctggccattctttacaaatgctgtaaaacgctcaccaaagccgtaaacacactcgccgactccgatggaaagctccgtcatcatatacggcctgtgatcctccgtgagataattgtcggccgggaacatcgtagacggctgtctgtcccatctcatgtagccgagattgcggaaaccgcaggtcgtcagcacttttccatctgcttcaaatgaatagctgaagtttcttcggtccacacgtaccttcagtacgccggtatccagaactgcttcctcctctgtgatcgttacttccggctcgatcgtcgtctcattcttctcatactgcggcagatgattgtcgtatccctcataatgccatgcttttacggagatggtaccggatgcgcacgccttaaattctaccgtgatggtcggcatattcagggtatcgcctctgccgttaatctttccaaccggtgcaaccacacgcataccgcccgggatccggtcaacggtatagccctctgctgcaaacagtccgtttgcgcgctcactgcgcagccagtaaccttctgtaaatttcatgttctgtgtcctcctttttgtttgttttttcctttttcagcactaccatttctatgtcttttttatcacagtaatctcgctatgtctatccatttttcgtgtatttatagtcattttttatctttttctttttcattccattttttccggtactgcgccggtgtcgtaccgtattcctttttaaacgcgttgataaaagacttcacattgggaaagccacacagaaacgcaatttctgtcaccgcgccatcgccgccctccagttcttcttttgcccggcatacacggatgcgttccagatactcatgaaagttctgaccggcagagtttttaaaaaatctggaaaaataagccggtgtcatccccatataatttcccatcgactgaatcgacaggtttttctcataattttgctccatgtaagagatcgcctgcttgatgcgtttcagccgctgatgctcctgcatgcgaagccgtgtgtcatcttccctgctttttgcacactcccgcagcaaaatgcagcaaatctgccgcagccttatcgcaagctccagttcataatagttttctttcttcttcaagatccgtgcgcactcctgaatcagcattgcaatgcgtttttcctgcggacttcccttctcgatcacaaagcggatacggtcaaactcatcgcagtattcctccagcagccgctcatcaagcagcagcgtcacacagcgcaggatccgttctccgctcccgtctgtctcgtgcagctcgccgctgttcacaaaaaaaatctcgcccggacccgcactctgctcttttccatttacccggccacggatccgtccttccatcaccagatcaaattccaggttccggtgccagtgcagcggataatacagcttatcccttccggttccgccatagtagatccgtgccggtattccggcctctgtctcgaccatttcctgataatattccatacacacacctccctttttcttccgacgaagcttcttcgtctcatacctccacccttttccgctgatgccttttctcattcacagctcaatgcatatacatttctctttcctgtgtgatgtttcgaccacccctttccaatttcttccacagtccatggaaagcggacgttcgcctctgccccgacccaaaaaagagcaggacacctcactctgccctgctcccatctttttcatcttattcttttttatattgataatcttccctctcaaatccggaaaagcatttactttgtaaagcggacattcacaatcagcccttaaccgctcctgcaaccataccattgatgatctgcttgctgaatgcaaagtacagaacaacgatcggcgccattgtgatcagcattgctgccatctgtttcgggtaatccgatgcgaactggcccttgaactgagtcagtgcaagtggaacggtctgcagtccgacgtccttgatcagaaccaaagcgaaagagaactcattccagcagctgaatacctgaatgatcgctaccgttaccaggatcggacggcagatcgggaaaatgatattccacagtgtgtggctgaagctgcttccatcaatggctgctgcctcctccaggtcgaccggaactgtctttacgaagccctccaccaggaagatgcccatcggaagcccgaaggatacgtacggcagaagcagggtaaaccagtggtttgaaattccacagcgtttaaatacaacgtagatcggaaccagaagggaatgaatcgggatcagcatacccatcaggaacataatatacagtacacggttcagtttgaagtgaacgcgcgccagaatatagccaacgatgaagctgaacgcgatgatcaggataatggaaagcaccgtggtacgaaggctgttccacatcgactgtgccagatggtaatccgggttggaaaggattctggtgtagttaatcagcgtcgggctcttcggaagtccgatgatgtctgcgttaaacgcccgtttctctttcagggatgaataaatcatccatacgatcgggaaaatgcaggacagtgaaaagatccagagaatcagattcataaacactgcaagaaagcctttttttactttatgtgttccaggagtacttgtcttagccatcttcctacgcctccttctctcttgtcacatatttgatcagagcctgtgaaccaccgataacaagcagtgacagaacaaagattccaactgagatacagcttccgtaacccatgttgctctggctgaaggaaatctggtatccgtacatcgccataaccatagaagccgttccaggccctcccttggtcataacgaagatattatcaaatgctttcatattgccggcgatacaaagagtaatacataccagcattgtattcttaataagaggaagcgtgatgtaaacggctttctggaatccgtttgcgccgtcaatctccgcgctctcaaaaatgtccgtactaatagatgcgattgctgacaggatgattaccatataataaccgatgaactgccagatcagaggaatcgtaacaagcagcatgacaagatcggtattattcagccatacctggcagagatccttacgtccgatggcggtcaggaaccagttcaggataccatacttgttgtggtagatcatattccagatcaaaccgatacaaactgctgcgatggtgctcgggaaaaatccgaaggtacggtggatcgttttgcattttaccagcttggaatttaccatcataacaagaacaaatgcgatgccgatctgaccgatgatacatgcgattacaagataaatattatgcccgaatgcctcccagaacgttgcgtcatggaacagctttatgtaattatcaagacctgtaaatgtcttttgcgggccacccttccattcaaagaaactgtataccagcgccgtaatcagcggtacgaaaaccgtgaaaataaacatgacaaccggaaccagcaggtacaatactacggtttttgtcttgggcttaattgcatttaacatagaacattcctctctttcctgctgtgtgcagagggaaaccctttaagaaagaccgtcccgcccgctcccgcgggcagaacggtcttctcattccctgtaaggcttctgccttggttcttgattttagtagttctcttcgtatgccttctgagcgttagctgctacgtcttccggagagatctcaccattcatcatggtctgaaggtctgtgttcagaacatcccatacagcgtttgtgatgtaggagtcatagatctcgcacggctctgtatcaacataagagtagttgtagaaatcctgtgtgatctgatcgaagctggagaggtcaacatcgccaaccttggtcagtccgccaagtgcatagttctctgctacgtagcttgcgaatgccggtcctgtaacttcctgagccaggtcgattgctgctgcgagcttgtccggatcctcagcaaccttggagctgattgctactgcatatccaagaccgatgttctgagatgtcggagcttctgtagcgtctgccggctgcggaagaactgcaaatcccatgttgttccatttctcttcgtcggaatctttcagtgtagcccagatgtaggactcatcccagttgccgccgatgaatgctgctgcatcgccggagatatagtactcacgagcatcctcgtttgttactgcattgaagtcctcgttgaagatggaggtctctgtgaacaggtgctgcatctcggtaagagcctttacgaatgcttcatctgtgaaagcagcgccgcccttgttgatcaggcttaagaaccagtccggacctgtgtaacggttgcccagagttgacaggaagtctgagttagcctgccacttgccgccgtttccgaatgctacagtcgtgatgccctgctcgttgaagtactcagaagccttctctacgtcttcccatgtgctcgggaatgtatcatatcctgcatccttccacattgccttgtcgtaaattactacagtacaggtaccacctgtcagtaccggatatccataaatggaatcgccgtctttaaacggtgtgaagtagttctgtacgtaatcattgtagtacggagaagctttgatcgcgtcggtcagatcatataccagaccctgcttagcccagtcctttgtattcataccctgaagcaggaatacatccggaaggtcaccagctgctgccagtgtagcgatctgtgtcttgtactctgcattagccagaacgttctgattcagagtgatgtccggatgagcctcatcccatgctgccagaaccgtacggaatccgtcggaaccgccgtttccttctgactcctcagatgtggagtaatgcatgatctcaagttctcctttataagcaagatcatttgctgccacgtccgttgctgcggctgctgtcatcccgagggaagcaaccatagctgttgcaagtactgcgcttaaagcctgtctctttttcattttgtttcctcctttaaaattataaaaattatttttcctctctatctgcttcgcgtcgcccgcgagaacattcttttttcattcataccggctgctttttattcagatcttccggactgtctgtccttcgatcagatagccgtctaccgtatgaattgcaggaatcgttgtcatcggatgctcgatctcctcgatcagtctgactgctgcctgtctgcccatctctcccacgttctggtaaaaggtggtgagcttcggcgattcatactgcgccgccttaactccgtcgtacccggcaactgaaatgtcatccggaatcgataaacctcttgctttgatcgcattgattcctccgaagcatgcgatatcatcagaatacataatgcaggtcggcggattcttcagatccagcagccgttccgtctgttcaaacgccttgtcaagatttcggtagagtcccggaagtacgtatccttccggtacggtaagcccttgctcttccatgcaggtgtaataggaagcaagtctctgccttgtgacccggttgttgtcgccgtgaatgtaggcgatcttcgtatgccccagaccgaatatgtactgcatcagctttgcaatgccgtccgcgttattggaaagcactgccgttcggttgtccgcgatataatcgatcgaaacgaccttcaggctgctctgcagaagttccacgattttcggattcgtgtaatccagacagcacacaatcgcgactccgtcaaatccccggtatctggcccgctctacatacgacatatccgagcttgtattattcagaaatgtcacatcgtatccctttgcctctgccgctttcttgaaaccctgcaggactccggaaaagaagtcatgtgtcagtccgcttcccgctgcctcctcgaacagtacgccgaggttgtagctccggttcgtcttcagatatctggcggactgattcgggtgatatcccatctgctcagccattgccttgatctgctgtcttgtgttttcaccgatgtcccggtgattgcttaatgctttgctgacagttgctacagatactccgcaggctgccgcaacatccttcatggaaaccatgcctttctccttcgcttgttgaacttgcctttacttaatcgttttctgattcatattaaacagcattctacctgttttgtcaatcgttttttcactatttttaacgttttggttattctattcaaattcagcgttgttcttttatgcacttttactttatcaagtttctgtttgcgaaatcaaagcactgaattgcgtgataattcggctttttcatcctttttttgccattataagctaaaacgttttctttttcgtttcagcaggcttcatttttctctcctctttacgattttttacctgtatgccgcgctttttccccgtattttgttctaattcgtcagtttatgcacggtttgacgctatagcaattctgcaaaataatgcatcccctccgatctgtcaaagcgtgaaatactgcgtcagaaatctttgccgtgtgtcagacaacaaaaaaaccggcaggcgccgggttcaacaaagccgcctgtcggttttcctatattttctatattttattttctatattttctgtattttattttctatattttctgtatttatgcttcctcccagagccgctccgggtaaagtccctgcgccttcagattccggatcgcagctaccacattcggcttgtcttctttgtaggtcacgccgtaccatttatccattgatttgcgcacctgtacggtcgctttcccctcgcgcagcagctcatccaccacaaacggaaggaaatattcacatttcagcggatttgtctccagattttttgcaaggaatgcggcaaaccgctcattcaattcctttaaaatgctcgcggaaaagccccacatattcatcgaaacggtgcttccggccgggatggtcacccaggtctttccgtcatcttcggtatatgccgtctcttcgccgcgtttttcgatgtgcgtccgttctgtgatatcaacaagatagccgtccttatccgtctcacagatgccgcgcgctacatggccgttgtcggtcagcgtattttccagctgatagccaaccatcatatagcggtatttgtcgtcgtcttcatgttccgtcagatactcgtatgccatctggaacgcacggctgccgtaataatcgtctgcattgacaacaacaaacggtccgtcgatcacgcctgcgcagcttgcgatcgcatgaccggtgccccacggtttcacacgaccctccggcacagaaaatccctccggcagattcgtcagttcctggaacacatacgctacttcaacctgctttgcaaggcggtcaccgatcgccgcgcggaaatccgcctcgttttctctcttaatcacaaatactactttttcaaatcctgcacggaccgcgtcataaacagaaaaatccatgatgatgtggccatattcatcgacaggatcgatctgtttcagtccgccataccggctgcccatgccggctgccattactaccagtaccggtttcttcattttctttttcctcctgattgtttcggaatctttttgtatcctgcggcatgctttgcaaaagtgccccgcttttctttttatccgcaagttctccacacctttgccagacatattccgcatgaatatctttcataaataacagaggcattctgcgtgcctgtccgctcccgcagaatgcctctgtaccgctctgcctttatttcgcgcagctcagatatttctctatttcactgactgccttctcctcatcggcgccttctgccgtcacgatgatcttttcaccggctgccagaccaagtgtcatcattcccataatgcttttcgcattgactgttctctgaccgctgatcacgtgaatctcgctgtcaaactgactcgctacctgtaccagcattgccacaggccgtgcctccagaccatttgaaagctgaatcacaatctcctttttactcataatttgtattcctccttgttctcccttagcttatctgccagctggctgatttttcgaagcctgtgatttacaccagattttcccacaggcggcgtcagcatctctcccagttcttttaaagatgcatccggatgcgccaggcgcagaccagcaatctctgcaagcccctcaggcagactgtccagacttccgactgtttccagatagtggatatcttccatctgccgtaccgctgcatttaccgttttgttaatgtttgcggcttcacagtttacttttctgttgacatcatttcgcatctcccgcacgatccggatgttctccagattcatcagggaaatgtgtgcctccatgatgttcagcatatcaacgatctgagcgccttctttgatgtatacaatgtagtggttctttcgctctacgatctttgcgtccggcccgaagctgcggatcagctgctgaagctgcgcggcccgctccattgagacgcagacaatctcgaaatgataggatttctccggattgctgatcgaacctgcggccagaaacgcccccctgataaaagctctgcggcagcaggacttttgtaccagcagctgattcgccggggacacctgctctgcgatctccccgtttgcggccaacagcttgagtgcctgaagaatgcgaaccacgctgctgtggtctcggaccagaattgtataaatccgacaactctttccgtacttcttgttcagatgcacggacacgtcacttcttatactaaatgtttttcgtaataatgtaaagcattttcttgaaaccgctgcattttctgtgtgaattcgcagtcggaaccgctccgctgccgagatacagacgtcaccgcacattccgatgatggccgcaagctccgccagctggcagtgtcttgccggtgtatcaagcaaagaaagctcttcttttacctctgatgaaaatgacatctgcgtcccctccttctgcggtcagttccggatatcccggtgctcgatcttcagcccgtattcctcatggcggcttaagtagcggtaaagctgttctgccagcgtcacagaacggtgctgtccgccggtacagccaatgccgatcacgagctgattcttcccctccgccacgtaatgtggcagcagaaactcgatcatgtcctccagcttttcaaggaatacacgcgaggcctcaaagcccatcacatagtcctgcacttcccgggtcagtcccgtcttatgttttaaatcatccacataaaacggattcggcaggaaacgcacatcaaagacgagatcgcagtccgccgggatcccatacttaaagccaaatgacaaaaccgtgacaaaaatattccgaaactccttgctgttcacgaaaatcttttccatttcgcttcgcagctcccgcgtcagcagatttgaggtatcgatgatataatctgcccgctccttcaaaaaaccgatcgccgcccgctccatgcggattccctcatccaccctgccgtttctggccagcggatggctgcgtctcgtctccttgtaacggcgcagcagcgcaggctcactcgcatccagatataaaatctcatacgagatcccacggatcatcagctgctccagcacctcctgcatgccccggattgcctcaccgtttcggatatccacaccaagcgctactttatcatacttgctgtccgacgcacacgccagctctgcaaatttttccaccagcgggatcgggagattgtcggcacagaaatatccgacatcctccagtatcttcagcgctgtactttttcctgctcctgacattcctgtcacgatcacaaatctcatggtatcttccgtccttcttcgttgtcctgcctgttttttctggcaggactctgtatttctgccaattttctcttatgtgttccggcaaaacagatcctccaggtccgcttcgctacttgctcataactgagcagctgctttgcagcttatcagaaggagtgaaactccccgagaaacttcacttccggttcgagctttacgcccgcatcttcctgtactttcttctgcacggcgcagatcagattccggacatcctccgccgtcgcccctcctttgttgaccacaaagccgcagtgcttttcagatatctgagcaccgccgaccgtaaatccgcgaagccccgcatccataatcagcttgcctgcaaaatagccctccgggcgcttaaatgtgctgcccgcactcggcagatccagcggctgctttgtgacacgctgcattttcagttcctccatccggccgcggatcgcctctgcatcgcctttttgaaacttcagcactgcctccaaaatgatccagccattttttgctgccaggcttgtgcggtatcccatctccagtttttctgccggaaccgtccggatctccccctcacgggtcagcaccgtgacctcggtcagcacatccttcatctctccgccgtatgcacctgcattcatcacagccgcaccgcctaaggtacccggaatgccagatgcaaactcaaatccggtcaggctttctgaaagtgccgtctttgcgatcacagacagcatcgcacctgcctgcgcccggatttcttcgccatttaccgagacctgattcagattccggccgatctggatgatcacgccgcgatatcctgtatctgagacgagcagattgctgccgtttccgatgaccgcatacggtgtctgtgtttccttacagatccggatgctgtccgccaccgcctgtatgcttcccggcgtcacaaacagatctgccggaccgccgatccggaacgtcgtgtgtaaactcatcggttcctgccgccggacattttctccgcccgcacaaccgcacaataactcataaatattctgcatgttttcccctttccttttttattttttcaggattccgctcaccctgatactctccaccgcttttttcagctcctccggcggaaggacaagtgccatacgcacgtagccttccccaagacttccgaagctgctgcccggtacgcagatcacaccggagcgctccatcagctccacgcagaactcttccgaattcgtatatccctccggcagcggtgcccagacaaacattgtcccctcgctgtccgggacattccagccgatctcacgcagaccgccgcacagcacatgatttcgctcctcataaagctggcactgcttttccacgccgtcaaacggtccgtttaatgcagccgcagcgccatactgcaccggaagaaaggtaccgtaatcaaactgcgtgcgcagcgcccggaatttctgaacgatctcccggttgccgactgcaaaggacatacgtgcgccggtgtaattgaaggatttagaaagggagtagaactcgatgccgacctcctttgctccctcatactgcaggaacgagccgcccttacgtccgccgtacacgatatctgaatacgcattgtcatgcaggatgatgatattgtatttcttcgcaaatgcgatcagttcccggtaaaaagactccggcgcggtgcggcagatcgggttggccgggtagctgaccaccatgtattttgcctgcttcgccacatcctccgggatctttgaaagtatcggaagaaagttattttcctcaagaagcggatactgccatacttttgcatcgcacagctgcggtccgatgcggaagatctgataccccggattcggcaccagcaccagctcacccgggttgcacagcgcccatgccagatgcgccatgccctcctgcgaaccgtacagtgacatgatctcgtccgccgccagttccacatcaaaccgtctcttataaaaattctgcatcgcctcgatcagctccggcagctcggtcagcgcatacttataatttttcggatcctttgcagcctcactcaccgcctccatgatgtgcggcgccggcttgaaatccggtgtgccgacggaaaggttgtacgtcttctttccatgtgcctccatctcgttcttttttgtattcagaactgcaaagatgccctctttgatctggttcgctttctccgaaaattcgaatgtcattttttcatatcctcctgcagtgcatcatctgtaaattatctttatcagtctccgtcttagcgtcctcttccagaaacccgtcctccaactcatcatcatcttcaaaactatatgactcagaagcctctgccttctcatcctcatcttccgccggaatccgccccatatgcggcccctgcgtgaaccacttcggatgacggttctccagcagaatcgtcacaagatacaaaagaacacatacaagtgacagtacaagtccgagtacaaatccaggcggcgtaaatttcatcgcgatcgtatggtttccggcgcttacatgtactccggtcagcgctttgccaacgctgtaaaaatccgtttcctgtccgtcgactgtgatcgtccagccggtatcgtacggaacggtcagaagcagtgtgccgtcttcctttgcatcgatgcttccgcttactttattgccatcaacctgcacatcagtcagctggctctccgagagcttgtcgatcaccttctggtaaacgtcgttcgcacaggtgtagacctccgcgcgcactgtgctgcctttctgcgaatccttcaggtcaaccgtaaagtcggccatattgtcagtcgacgaaccgttgatcacatacaggtgatccgtgaaatctttaaagtccttatcatattccggcgtcgacagactgatctttgccactctcgtatcaaggcagaggtagacctgcttgttttccggaatcttgatgccgtagttctgaccgttctccatgtcaatgtagcgatccagcacatagatcggatcaagcccggtcgccagctccacaaagctgttctgtacctgcagcggttcacccgcctcgatgtcccagtctttgatgtcatcctttaccataaatccaagggaaagtgcattttcattataataaagtgcaagctctccgtcctctgtcagcttcgtaaactgatacatcgtatcggatttctttgatggcgacgccagatatttgataccgagaatatcattcatcagcttggtgacgccaaggtatccgttcttgttcgtgcgcgcctcaatgccaaggctgtcacagaatttgatgatggattcctgcatcgtcgagttgaacatgacaagtgcatttccaccgcagtacatcgtgacattccgcatccgctgtctgtcgacctcgctgcggaaaaacgtatcgtcattctgctccgccatcattttctggtaagacacctgatcagcaatataaatgcttctcgtcacatttccgtcgcattgaataccgtaaatcgcattcgcggctgcttctataagcagcacgccagaaagcaccgccgcccagatcctgcagccttttttcagataccgtccaagcagcacgattccaaaatacagcactaaaagtccgagggatacgtaatacacccacggctcaatgctgctttcttctcccggaaagaaaatacagtaaaccacaaatccggccggcacaagaaacgcaaacaggatctgcggcagccagtagctgcggatatgtccgactgcgtcatacgccataatcaaaagcactgcgatgtacaggaacgcaaagcggttcggcagtccgttctggatgtggaagccgtgccagatatagttcaggatattaaaggaaaaactaaacagcagaagcgcacacagtccatagtgtgccagccgctcccgcagccgaagctttccgtcaaacaggtacagaagcgccagcagaatcgttgccacgccgcagtacacattcagccctacctgtgtatcggagatattcaccggctccagaaatgccatgtggtttttcagcatttcaaagaggcttgtataaaatttgatcaccgtcggaaatttgtttccctgcatcgactccgacgaggacagtcccatgaacgccggaagcagtacaagtgacgccattccgcctgccagaagtgcgtaccatgcaaaggtgagcgcacttctccagatgccgtgccatgtgatcttctccgctgaaatccagcgcaccagataatacagacacgaaaaaatgcacagcataaatccgatgtaatagttgcaccacaatccgtaaaacagcgcaattccgaaaattcttccgctctttccgtccacaatgcgctcgatgccgtaaagaatcagcggaagcatcgccacgctgtccagccacatcaggttgaaatagtagccgatcacgaaattgctcagggcaaacatgatgccgaatacaaccggcagatacttccggttctcatcacgtttgtgcagataccaggaaaagcagccgccgcacagtgcgatctttaacaggatcatcagatccatgaaatcgcagacattttctgtcggaatcagcaccatcagaaaattcagcgggctcgccagataatatgcgtaagtcgaccagaagttgtatccaagtccgcccgagaatgaatacaacaatgacttcccttccaccagcctgttgtgcatgtctgtataaaacggcagatactgatgaagggaatcgatgatcagcactgtcttgtcacccgtcggccagacgctgatcgctgcaaatccgatcgcagtaatcagaaacgtcaggaaaaatcctgccagaaaaaacgcccctccgcctgccttttttgtttgaatccattttttcatatgcctgtttactcctcatgtgtcaatgactgccatgcacggttgcccgattcggttaaacgccttccgtgccggacagtacaatctccttgccaagaaagaacgagtagatgacctgcgtttttaccgtgcgtcccgtcagctgtttcagtgcctgtgcgtaatacgaaagctgcccgcggtaacgctctgccagtttttcacggtctgcgatgtggtcggtcttatagtcgaccaaaacgaccgctccgtcctcatcttcaaaccaggcgtcgatgattccctgcaccagcacagtctcatcgccgctccactccttctggatcgtctccgccggaaccccgagcacaaacggctgctcccggtgcagttttcctgcccgcgcggcctgctccattcctttcccggttttcgttttcaggaagcgccggatatccgaaagccggactgcagacgcttcatcccgggacattttaccacaattcacgagttcttccaactgcatttgcagttcctctttcttagaaaaatctaaattttccataaatgtgtggtaaagtgtacctctggccgccccttttacctggacatccgtccggtaaaagccaggaatgatctcctcttcttccggagcgtagagctgctttgcatcggtctcctccggctcctgtgaacgttttttcagttcggagacggacagttttcctgcaatcttctgtcctctctcatactgataagcaaaatcctccgaaaacacgtgtgcaagatatttcctcgcctcctcgtccgcacagacggacagatccggatttaacagggcagcaagcgatgcctgctccttatccgcctgccggaactcctctgcctcaaacagctcctttgccatcgcataaaactcataatgtgtcgaaaaagcatccgttttatccacaggcttccatttttccatgcgctttttccacacgctctggtcaaattcctcatatgggatgtgcaaagacagagccagcattctcgcatccgggtgccgcatcagtgccggcatcacccagtccagataagaggacgcaccggtcagggaagaatacggaagtgtttctccaggcgtcgccgccgtctgcgaccactttgcagcctgctcctccatattacccacacagccggtcagaatcagtttttccttcgcacgcgtcatcgccacgtacagtacgcgcatctcctcaccgaggttttccatcgatgtcgttttttgaatgatctttttcagaaggctcgcctgccgcgtgcgcagccttgtatccacacagtcgcatccaatgccaagcgacggatgcatgacggcctttgcacggctgtctgtctcattgaactgttttgccatgccgcagacgaacacgaccgggaattccagtcccttgctcttgtggatactcatgatccgcacggtgttgtccgactcagacccgatgtttgcctcaccgtagtccacctcatactttttcagattttcgatataacggacaaagtggtacaggccgcggtagctcgtcgcctcatacgcgatcgccttctccacgagcatatcgaggttggcctttctctggctgcccgccggaagtgcctgcgcatacgcgccgtagcctgtctcatccagaatctcccacaaaagcagatgcaccggcgtgtactctgcccgtgcgcggaagcgttccagcatgtcaaagaaatgcgccagcttttctttgattgccttatccgctccgctttccagatacgatctgcagcactcataaaaggatccctcttccgcttcactgcggatccacgcaagctcctcctcatccagaccgccgatcgcactgtgcagcaccgctgcgagcggaatatcctgccgcgggttgtcgagcacctgcaggtaagaaagcaccgtgcgcacctccgccgcggaaaagtagccgctctgcgaaccggtaaagttcgggattcccatttccgtcagtactgatccgaaggtatccgcccacccgctgaccgtgcgcagcaaaatcacaatatctttatactgcaccggacggtagccgccgcgctccatcccttctgtccagccctccggcgtcagatccttgtcccagatctgctcctttccgaccatcgcctcaatccgtgcgccaaccatgcgggcttccgtttcacggcggcgggcagtgtcggattcggtaagccagagttccgtggtgtatgcactctccctggatgatgtttcctttatctcctctgctttcagcaatgccccattagcttcttcctttttcatgctttgtgacgcatcgctttccggcttcccgccgtcctgcacccatgcgtccttctctgcgcacagatccacacgctccgggaatttcgcccccgcatacagcgctgcatcctcatcatacacgattccgcccggattttctgtcataatctggcgaaagatataatttacgctgtttaatacttcgtacctgctccggaaatttttgtgaaggtcaatccgctgcgccgtttccagctgcggatacgcatgatacttctccaggaaaagttccggcctcgcaagtcggaaacggtaaatgctctgcttcacatcgcccaccataaacaggttgtgcgctccacatccgccgcctgatacacttccaagaatcagttcctgcacgaggttgctgtcctggtattcgtcgatcatgatctcctcaaactgccccgcatattctctggccgctgcggacggatgattttccccatcctttcgctccacgagaatctgcagcgccagatgctcaaggtctgaaaagtcgagcatgttcttctctgccttgcgctgcgcaagccttttcgaaaatgcttccgtgagatacgtcagccaacgtacgctcaggccgcttcgctcaaattcgtcccggatcacctcaggggtgtcatagaaatagcgcgtgcgcacaccggccagtgccgtctttgctgcttcccgcagatccttgaccagctgttttttctcctccagcacatcgggatcctttttggtcgaaaggcgcttgtagggatgcatgccgcgaaacgcaaccgcaagtccgtggtaatcctgtgcacgcgccacccgcttgatctgctcgaggtcatcaagcaacgcgaggccgtacgccgccgggccaaatggctccatcgcggtgtcatatgcacgctgcaccagatttcctgcttcctcaaggacgtgcttcgtatcgtcaactgctgcctgcagccagagcgggtcggaacctgactgctctgattcatcctctgccaactccctgcttctgcttttttgttcctctgcaatggcttccgttccatttgcggtaccgtcgcatttttccccacagacatcttccgtctgattttcgcgatctgcatgctctttcgcgtcatctgttttctcagaaacaatttcatttttagtaagtgccgccccgccgctcacatacatctcccggcactcctgcagccattcaagcggccacggctgccccatcgaaaaatgatacagcgccagcacggcttccataaccggccggtcgtcctttcccgtggaaaactgctccagaaactcatgaaattcctgattttccgcctctgtctcatatgcttcatcgaggacttctttcagcacgtcctggcgcagcagctgcatttccgcctcatccgccacccggaagcctggatccagaccgatcaggtgaaaatggctgcgcagtacctgcagacagaagctgtggatcgtcgtgatcttcgcgttgtggatcagcaccagctgacgctgcaggtgttcattgtccgcctcctgctccgcccgcacctcaagcgcatcccggatcctctggcgcatctctgccgccgccgcattcgtaaacgtcacgacgaggagccggtcaatatccaccggatgcaccggagaagtcaccatctccagaatacgggccaccagcacagccgtctttccggagccggcggccgccgacacgagcacatcgactccatgcgtatcgattaccttctgctgttcttccgtccattttacactcatttcattctccctctcccgctttgtccgtttcttccatgtgcatacttctcagtgtttcctccagctctctccaggactcctctgacagttccggggccttccgctgtgcttcttctgatcgatcagacgcttcctgtttcagttcccgctccatccgcatccacacttcgtccttcccgagcggctccagacgatgcgggcagctgcccgggatcttccggtcaaagccgcacacgtccgcgtaatcgcagtaatcgcacggtgtccggccgtctgcttcatacgggtcaggtgctacctcgccgccaagcatccgttccccaagctgtgtcagcttccgcctcgcaaacctggaaagggtctgaaactgctccggcgtaaccgtttttgaagccgctttcaggcttccgtccttctttcgcccggccgggatcacaagcgaatccccggaaaatccatgatccagaagctccaacacctcgtcgtcctcattgataatgccgtccgggcgcagttttttgagcagcctttcccggatggctgtctcatccgccccggcctctttttccagcaccggatcctgcatccggtaataaaagatgcctgccggtacggccgtgcgctccggatgcagccgctgctccatctcaagcgccgcatttaaataaacgaccagctgcagctgcagcccataatagaaggaaaccggatcaaactccgccattcccgatttataatccacaaccttgacatacaccgcatcctctgtctgggcggtatcaatgcggtcaatccgtccctgaagatgcatccggccgtgctcgccaagtgacacttttaccgtctccagattccctgcatctgcaaatgacacctcaaacccggatggccggaagcttccggctgcaagctgctcatgaagcacccatgctgaccggcagaggatccgcttcagacgattgatcgtatacgcgcttcttgcatcgctgtgcagcgcatccgcaccgtatttttcacttacctcatccacgcactgctccatcaggatcgtttcctcctgctcagtcagctccgtccagtcgcgatcgctcactgcaatccgcctggaaaacagctccagcgaacggtgaaacaaaatgccaagatccgccggtttcacaccgtagagctcgcgctcgcgcagccgcaggccgtacatggcaaaatgcgcaaatgcacacgctgcgaactgttccagacgggtcacactgttcgtcatcacctcaccgtacagctttttcgacgcagaaaacgacagctgacgggaatttcctcttgaaaacgcggcgcgaaccagcgtcctgacgcgctcccggtattcatcatccagcgcataggtgcggtacagctccttccactcaggttctgtctttcccatgcgtgcctcctgcagcccgtacagaaaatactgcattccgtttttccgggttgttgtctgccacagctcgctgcccggctccttttcctcacacaccgtgatctttggaaacaatctgcggatatttgatacaagatacgacggacgcatcaccacgccgtcactgctgccaagacaccacgacagatacagatgctgcgatggcttcgtcaggttctggtacagataaaagcgctggatatagctgttttcccgcgccgtcggcgcgagctccatgccgttctcctttaaaagctcccgctccatatcggatacgatcccgccgtcatttccccttgccggtacccagccgtcgttcaaaccgagaaaaaagagaaccttcacatgtgccagcctcgttcggcggatatctcccacctgcacctgatcgataccaggcgggatcaccccgacctttgcctccgaaaggccagcttccagaatctccgtaaattcctgcagctccatcgtctcttcgccgagcagctctgccatctcatcgagcaggcggatcaggattccgtacacctggctgtactccctcgcctgtcccatctcaccgtctgcttccagctgcgccgcacgctcctgcagctgcctgctgatctcgcagtcccgcagcagctcatacagtgccgtcgcataaaagagcagcgtatttccttttttcctcattttttctgcaaacggttcaaatcgctccaccagtcgttcccggtaatcatttactttttcaagtacttcctctcttcgctgcgccggacggtactcccatgtctttttccattttcggtgtccgcggatgccggccgccagcacataattttccaactcatcggtctcatccgccgaaaaaccggccattccggtgcgcaggcagcgaaagactgcttccgccgcataatcgcgctgcacgatttcaagcgcaccgcgtacaaattccagacagggattcaaaaggatctggcgcgtctcatcgacaaacgccggaatctcatactgcggaaaaatatgcttcacataattattataggaagaaagatctcccgtaatgaccgcgatatcccggtagcgcaggtccttctcccgcaccagatacgagatcgtccgcgccgcaaaatgcacttccgccgccggatttttggaaatgtgcatggaaatctcgtccggaatccctccgtagctctgtctgcggctgcggaagagattctgctccagatgaaacagggtgccgctctttttaaaacgcggaagggacgtttttccgaggatgacgggtggaaggaacatgaggtcatcctgcccatttgcactgtcaccttcacttaccgcacattccggagcatttattttctttgcatactcagataaattttcagaatgaccacttacacctttcctccacatccgccgtgccgcactcctcgccgcctcactgaccgcctgcaccagtcttcggctcggtgcaaacagatcgtgctcctgcagcttcccgaatgcactctccctcgcatcgagcgtcaccgtcagatatactttcgggcagtagaccagcaattcttccagtacccggagctgtgacggcgtaaaaccggcgaacccgtcaaacgccagcacactgtttttcaaaagggcagactcgcccgccacctggcagagcacatcgtagatttcctccggcttcaggaatcgatccctgcgataagcaagaaaagcccggtaaagcacctgcagatcctcaagcttcgcatttagcagcgggcggttctccgttttttgctccatctcctgcagttcgaaatcggacacctcgtactgcatcagctccgagagtactgatttcacctccgagacgtagcccgggcggttcatcctgcttccgagcaccttcagcctatcctgctcctgaatcgccaccttgcgcagcatcagattttttccggtctcggtcagcacacttcgctgatccgcaccgacctcctcaaagatgcggtgcgccagacgctgaaagctcagcacgtcgatgttcatgattccgcctctcggatgtgccatcaccagatccttctgtgtctgcatcgtaaactgctccggcacgatcacgataaaattgccatccggccgctgcatcgactcctctatgattttctgatacaaatacgtggattttccgctcccggaatttccgaaaataaactgcagggacatgttcttctccttttatccaattctatcgcagctgttcacagacaatctccaaaatactgcgtatttcatcgatatggcgtatccgttactttttttcccactgcgtttttgtcaggcggttaaagtgctctgtgcgtgtttcccccatcagcgggcagtacacctctttttccgtatgatgaaatgtaaatccgcacttttcctgcgtccgcttcgatttttcattcccgtcgtaatacccgcaccacaatgcactgcagccaagggtttcaaacgcatacgcctccaggcagcgcaccgcctccggtatatatccccttccccagaagggcctgccgatccagaagccaatctccagttctttctcttttgccgccgttttttccgcttcgccagatgccggagctttctcttccggcacttctgccacgtccgtctttgcacccgcctcacacctcggctccatcagcccgatactcccgatcgcctttccatcctcttttaagcagatcgcatacgtccccggctctgagagcacattctttatgatctcccggctgttttccacgctggtgtgcaccggccatccggctgccggtcctacctgcggatcctttgcatagcggtacagatcctctgcatccgcttccgtccatggacggagcagcagacggtccgttgtaaatgtgcgatgttcatttctgtttttttccataaaaaatcctccctggttcatgttttttcgtgaggctgtctttcgttttccggtaaaagattctcttaccataccacgaaatccttgccacttcaacacatgaaccagggagttttccctaattggcataatcagttaaaaaacggtattttccatggatttcactctttttcttttctggcaccaaaaacttcctgactcagggttttactgctgtcctgctgcaaactgcagtatcatttttcctgatagaactcaatctcctcgccaaccggtccaatgcagaacgccacacggatcggggacggcggagttgtcgcaagcgtgacatcctttggctcgactgtaatggcatagcctgcctcgcgcactgctctcacacactgatccacatctgatgtggcaaacgcaaagtgacggatgctgccctgcggcagatcctcctgcgcattcgtaaacacctcaatcagcccggctccgctgtcaaacacaaagcctgccagctccggctcgccccagctgcgcactaccggcagcccgagcacctccgtgtaaaactcttttactttttcgacctgatcctttctgcatttgatgcagacgtgatgaattccatttactaacataattttttctcctctcatacttcagaccttccaataccctgccatatcgtttacagataccgccctgtcacactctccccgcacacgcggatctcctccggcgtcccggctgcgacgattcttccgccgtcgcttccgccgcccggtcccatgtcgatcatgtaatctgcgtttcgcatgacatcgaggtcgtgctcgatcacgattacagtcgcaccgttttcaatcagcgtctcaaacacgcgaagcagtgtccgcacatcaagcggatgcagaccgatcgtcggctcatcaaaaacaaataccgtatccgactgtgcttttcccatctcgctcgcaagctttaagcgctgtgcctccccgccggaaaggctcggtgtctcctcgccaagtgtcagataaccaagtccaagatcctgcagtacctgaagcctctggtgcaccgtctttaaatcacggcacatctcaagcgccgtgcgcacatccatctccatcagctcaggaagcgtgcacgatgccccgactttgttttcatagcgaatgcgctgcgccatcacatcgtaccttgagccgcggcactttgggcacggaatgtccacatccggtagaaactgcacatccagactgatctcgcccgtgccgtcgcagaccggacagcgaagccgtcctgtattataggaaaaatcgcccgccttatatccaaatgtctttgcatctttcgtccgtgcatagattttcctcagttcatcgtgcacatttgcatatgtggcaaccgtggaacggacattgatgccgatcggtgtcgcatcgatcagtttgacctggcgaatgcctgctaattcaatcgatttcacgtgacgcggcagttcccgtccatgcgctgcggcatcaagtccggggatcaaactttccagtaccagcgtcgtctttcccgaaccggaaacacccgtcacgacagtcagccgcccttttggaatctccacatgcagcggcaaaaccgtatggatcgcaccggattccatccgaatcgtacctttatcgaagagttctttctttgccgcccgttcccgcagcgtcccactcttttcctctgtaaactggacattcgcaatccgttccgctgcccttcggggagcgcagccgcttcgcccacctgaattccgagaatgctgatctgcttttaaaaacggaccaatctgtgaattctcattttcacacagttcctgcacggttccctgcgcaatgatgtgtccgccgtttgccccggcctccggccccatctccacgatccagtccgactccgataagatctgtgtatcatgatcgacgagaatcacggaatttccgtccgcgatcagatctttcatcacgccggtcagtccggtgatattggccggatgcagtccgatcgacggctcatcgagcacgtacagcacgccggtcgtgcggttccgcaccgcacgtgccagctgcattctctgccgttctccggtcgaaagcgtggatgcggcacgatccagtgtcagatagccaagccccagctccagaagacgcttcgctgccgtctgaaatgactcacaaatgctgagcgccatcggccgcatctccgtcggcagggaatccggcacgcgttccacccaccgtgtaagctgtgacagcgtcatctcgcatgcctcatccagtgaaatccccataagcttcggaagccgtgcggcttttgaaagcctggaaccgccgcagtccgggcatgtctcctgcttcagaaatttctccacgcgcttcattcccttttcatccttcaccttggaaagcgcattttccacggtataaaccgcattaaaataggtaaaatccatttctccggccgcgccgctcgtcttattctgatagatcatatgctttttgattgccggaccgtgaaacacgatctcccgctctttttccgtcagatcccgaaacggcacatcggtccgcacgccaagatcccttgcgatatccttcatcaacgaccacatcagtgtctgccacggccgcaccgcaccctcgtcgatagagagcgattcgtccggcacgagcgaatccagatccaccgtccgcaccgttcccgtgccatcgcacgtgcggcaggcaccctggctgttgaacgccagctcctctgcggacggtgcgaaaaaatgcgcgccgcataccgggcagaccagttcttttcctgctgccaccgcaaacgacggctccacataatgaccattcgggcagcagtggtgcgccagcctcgaatacattaaccgcaggctgttcagaagttcggtgccggtaccaaatgtactgcgtattcccggaacccccggccgctgatgcagggcaagcgccgccggaacataaagcacctcatccacctgcgcttttgatgcctgcgtcatccgtcttcttgtataagtggaaagcgcatccagataccgtctggagccctccgcatacagcacgcccagcgccagagaagattttccggatccggatacgcctgcaatcccgacgatcttattcagcggaatatcaacatctatatttttcaggttatgtacccgcgcgccgcggattttcattttatctatcatgactgtgcctctttcttctcttctttgagactgtcgtttttgtctgttcatttttctgtcatgctgttctgtcctcagaaatccccgcccatttctgttctgaaattttttcttacacttttcgagaatattactttttcccttttctctctataacaggtttgtgtaaatttttcaatatccttgctttacatcttcatttccctgctgccttccgtttcttccgcaccgcttttacgacgcttcgcttcttgctcatcttccgtttccgcggtcttgtctttttctgcacttcccgaatctgcgccagaagcgcttcataatccctctcaaacagaagatctgtgatctgacgcttcagcgtctcctgcggaacgcgctccaggatcttctcccggacaaatgccttgcttttttgtgcgtatttcggcatctcattccattcctgcagcgtcgccagctccggccgccacaaaagatccagctgacgctcgatctttacgtttggattgacccccgggatctggtcgatctcgacgatgatcctttttttctcttctggtggcagcttttcttccttaatatctgccgccatatttatttcggaaatttcttctcctgtcctgttcggaagcatttttgcatcaggcgcaggccctgcttttcctctggtttttctttttcctgtatccgcttccggtatctcattttctgtctcgttttcctcatagacacagataatcccccagtgcgccgggatgtgctgatcggcctgcctgcggtgactctttccgaccaccagataattcacatcgcacagcagatcgtaatctgctgtctgacgtttcagccgtgtatacgtatcactgtcactcttgatttcaaacccgatcagctgcccgtcgatcacgccgagcgcatccgtgcgcgaaattccggtcaccttctcctcaaaaatacggatttttccataaaattcttccagaaagtcaaagagcggctcccggatgtccttgtccagcatatatttctccatctgtaacggttcaggggcagataagcttctacccctctgaaccgttgccactattttcatttcatcttctccagtatactcgcaggacgcagattttccaagcgcttcttttccttctgcattctgcatttctccttctctgtcgttttgctataagcaaaaaaacagatgattcctgcgatatttttcacagaaatcatctgtttttttcacccggtttaacctatctttttattttctcattcagatcggaaaccgttcttttcacgtacaggtaaatcattgcccagattgctgcaaatcccaccgcaaagatcaatgtaaaaaccgggatcgcattaagcggcagccatccgtttaaaaggtagattcccaggtaatccacgtaaagcactgccatctgaatcagtgccgccatcgcttttggcagctgctccaactgatagatgaccgaaatccccccggcaataaatgccattacaagagaagacgccacacttaagatagcctctcccatttccagcttctgcatcgtgtccgcatgccacagacacgcccacacgatacacaaaattgccggaccgccccatgcagccaccatcccacgtttgacaaaagatatccaaaagttcttcataatgagtacctccttttcagctccgcaaaacaccttctcgaaatataatcggaaaatccactctcaaattctgcattcaccgcaccgctgagtgtcacattaaaacggacgatctttttcatatttgcaagattcgatttgttgattcgcctgaaatattccggcagcacttcctccagttcgtagagacgtttccgaacacggtactttcctccctggtacgcagcaaacgttttatctccttccacgtagaaggcttctactgccccaatctccagcatccggattccatcctcatcataaccggcgatcgaccgcccctgtccaccttcgagcaccagtttttcgatttcatccacaagcgccgtccgcttatgcacacgggcaaataccgcctcctccttttcctgatccaggatcatctgaaatttcattcgcctcttccccccttgtgctttccattatacacatattttgaggactgtgttggaaatgacggtattcggtctgttttaagcggtgaacggaagatccggcactgctttattttttcacccgcctgtcatacgtatagattccgttgatctcctcctcgatatcgctcacctgcgtataaatcgcaccggaaagaccttctttttccaatgcccttatctcctcctgcagcttccggaattgctcctgaaattctgcctgcgatgacagttttccatatccatagctttgctctttccagatgtgccctggaatctttaaggtcagtccgccgtactctgagatcacaaaggcgcgcccacccggattctttttccatttctttggcacctgcagcttaaaaaagtaattgtgctcgctgcggtaatcaccgccgccaaaatcaaaccagccacttgccgcatccaccggacggctgccatccagcttctttacaagtgccgtcatttcttttgtatcaaactgtccccagccctcattgaagatcacccagcctgccaggcttaccacattaaaaagctgccgcacagtctgtatacaatctcgtttccacgcttcgcagcccgtccggtcttttcgtccgcatgcagcttcactgtagcctttttttgtctgaaatgaatgcagcagggtcggcagataacaaatacggttcatatcgtacgtttcgcccccgtttaccatatcctgccagaccagcattccaagacggtcgcagtgataataccagcgcatcggctccagcttgcagtgcttgcgcaacaggcggaagccgcactccttcattcgttcgatatcacttacgagtgcctcatcggtcggtgctgtatacagtccttccggccagtagccctggtcaagcaccccgtttaaaaaataaggctgatgattcagacagaagcgtgggattccactttcatccggttctaccgaaaacgtccgcattgcgaaatagcttttcacacggtcttctcccgcccggatttccagatcgtataaaaagggatgctccggactccagagctttgcattctgaattgtaattgctacatcgtagtccgtccagccaacgccctggcgcgacgggatgcaggatatctgcagtttctcctctgcgttttcttcgtatgatatcgtaataaaaatctgctccggcatatacgtacaagttatactttcactacccatatcagcattctttttgttaagatcactattttttgttgttctgtttttttctgtctcatttacatttcttttctgtgtcccatctttatcactttctacattctcccggttttcattctctgtctgaaatttttctatactattttctgtattcaacagttcggcgctttgcccttgtgcgctcacccgcacccggatccttaccacaccctcatccggctgtgacattatcttaatccactccacgcttctttgcggcacccattccatccataccgtctgccagattccgctctgcgccgtataaaacatcccgcccggctgcagcctctgcttgccacgcgcctctgccccggtatcactttcatccgtgcagatgacctgcagttcatttgctccaggctgcacaaattctgttacttccatcgtaaacgccagataaccgccccggtgactgcccacaagatgaccgttccagtaaacacggcattcctgatcaactgcgccaaattgaagcaaaaggcggtccttctttgcgcgatgcgtctgatattcatcctctgaaatctgtacgtttcttcgataccacagttcctcgtccggctgcagctgacggctgactccggaaagaacactttccggtgagaatggaacgagaatctttccctgggaacttgttgttccgcggcagccgctttgtctgtcccagcatttttctttgcaattccaagaaagcgttttctccggctgatccgattttttgtcatcatattctttcccacagatatgattttccctctccctgcccgatacaatccgatactcccaccatccgtttaaaaccgtataatcctcacgcctcatttgtg

SEQ ID NO: 3031 - DNA, 8073 bp, Unknown
  16S sequences of unknown bacteria
gtccaactgtgggagccaaagagagcagatgataaaagtcatctgcttttttgtttgctttaacaaatttatagtttatatacagcttgactgttaatcaagatagcatattgacgatattttcatttttgcagcaggaaatagaataaaacaatttgcttattcaatctctcagtcagctacgctgacagctctctttaccaaagagagccttgctgttcgttgggtttaaaatgttgatttacaaccaaacaagtgtaccaaagagagccgattttattgaaaattataggcttacagattttcaatcaaccctcccggtgttcgctaaacgctcacaccaccctcccttgctcaaggagggcaagtttgcggtttgtttgatttgctgttttacagcggaaaataagataaagcagaaaatgcagaaaataacttacttaatcaatctctcagtcagctactgctgacagctctctttaccaaagagagccgattttacagtttgtttggtatgatattttctaacggacagaggatttgaaatttactttttgacagccgagattatgctgataagaagtataactattcaaaaaatatcaaaaattatatagcaagatataaatattaggtatggtgcaggctgagtggctccgttttcccggtactgaaatcagtaacagtaggttccaaagtgagcaaattgtacagtttaccgttacatatttcataccctctgccactttgaaatataaccggtgtttcaataattttgttttcagcaatatctattaaataatagctgttatcatcatgaaaataaacatatttttcgtcataatttgaaaaatacacattgttattaaattcagctattgtttcagtattctcaccgttaaagtcacatctttttatttgcagatcggcagaaaaatcattttttgtacctgttacgtagtaaatgtaattatccgttaaaataaaatataaacttccgtatataatgtcgttttgcggtgcgtaaatatcgctgtcgattaagtgaagtttaccatcgcccaattccgtattatacagatattcgtattcttttccgtcagcggtacaatataatctttttatactatccgaaactgacatatcaggttcgaaagacaaaagtttaactgtgtttttatctaaatcttcaaggtaaatctcgtttttataaatataaaaatctgtccaatttataccgttatcaaggtcggtgagctgagccaaatatgtgagattttcaccgtttttatcaatgctgtacaggcgatttacagaggaaaagaaaattttatcatctgtaactgcgattttgtacatatttatattttcatctgtgaaaatttcttcataattatttgaccctacagctccacggtagatagagtgataatttgcaagatatgcatattctccgtccgcttgaataagatagttggttatattgttgtagttggaacttacggatttttgcggttccgaactgctgctttgtatttggctgtttggttctgccgggctgacacacccggacaaaataattgtaaataacataattgcggataaaaattttttgtaaaacataacgctacctcctatgatataaaaattatatcaaatttaggttttaaatacaatagagtaaggtgagattggattatattttattctataatatggatttttcattgcgcacctaagttactgcctttattaaatcacatctatttacaacacagagatttttgaaaacaattatatgaattttatcttgacaaaatacaattttaaaggtataatgataaagctttaaacgcaatggagagatgtctgagcggttgaaggtgctcgcctggaacgcgggtgtacggttaacgctgtaccgggggttcgaatccccctctctccgccaaaacgccctatttagggctttttttattttatatgaattaaaatgaaaaaaggaaaccacaaaaaccaccggctacgccaaggggttataaagcgttaagataaaacttaataaaactaatgcgttgcaatgacgaaataaggctttgactgtaaaaggtcagaactttttatcttaaattcatacattcgcaatcgtgttacagaaatcgttaataaacaaataatatgtaactaagaaaaagcacagcttatggagaagcatttcataagctgtgcgctaattttatttgctaagttgcaatgcataatctttgggacagtgctgtcaaataaaatcttttatattttttcatacccataattttaagaatattactaatatcatcaccgtcaataggcttctcgttattattgttttagtcataacttattttattataataaggatattggcaaatttattcgacggcaaatcacataatattctgtataaaaatcccacgcaatgcagatttgcgtgggatagtatttttaattttgttatttgtttaaagcgtatctatcaacaagttcttgtaatatttcggcttttttcgggttaagtgagaacttttcttcttccttgtcgcaaacggcttttacattctctttgtattttgcccaagcggcagtttcaagttctttgttttccggttctttggccgaggccgcaaatgcggattgaacttccgcccatgcttcgtcacttacagggtatgtattgtagctgtttggagcaagaccttttacactttcaccgaaaattgccgcataagcagccattgcaatggtgtaagagccgtaaggcgatgcatgttcgccgtcatgccagtacatatcaatttcagggtgattgtaaaatacatcttcaaaaacattgccggcaacagtgagctttacaccgaatttttcgcttaaagtgttgtaaatgtcatacatacctttttgatgagcagggtctctcttttctgcccatggcattgtttgaataggcgtaaccccgaattttcttgcaagggcaattatcttttccgcatctgcaagtgtttcttcttttgacggacagggtgagtgtgcagcctgctgcattacaatgtagtcaaatccgccgtgcataagggcaaatctcaattcaacaagctgtgagtaatgccagccgtaagtaacgcccgggtgtgcctgcatggcaacttcaacatctttgcctttttctttacagatattcgcaaaaatctgcggcatatcattgtagaatgtgtggctgttgcctaaaaataaaactttcataaaagcctcctatgtaaattattcatgtctgaatattatttcatttttgttcatactttcaactattgccaggctgtgcaggttatagcccatatcacggagtctttgtccgccgggttggaaacctttttctatggctatacctattccctcaacagtagcgccggattgttttacaacatcaagcaagcctatcatagcattgcccaaggccataaagtcatctactatcaaaatatgatcatcgggagataaaaacttctttgctacggtaattgtgtagtctttaccgtaggtatatgagtgaacaacgcttgtgtaaaggtcgttatctatgttccggctctttgctttctttgcaaaaacaaccggggcgttgtcaaaatgtaaagccgccatagtggctattgctattccggaggcctcaatggtcaaaattttgttaataggcttgtccgcaaacaggcgtttaaactctttgcccatttcattaagggttacaacatctatttggtgatttaaaaagttgtcaacctttaaaatatttcccggtttaacaatgccgtctttgataattttttcctctaaatacttcataaaatctccctcttattattttaaacttatttttaacattatacaatatttatttcaagttgaaaatactaattgaataaaattttcatataaagaataaatttaattgaggtgatttggtgaaaaaacaaaagaaggcatttatttcatatgtaattgtattttttgcttgtctttggtcatgcgcaaatattgccgacaaccgaggaaaaaatgagtatgaaaaagccatagagaaatataaatatcaaatatcatatgcggatacatattctccggaattttcagataaaaatcggataaaagaagctgccgcaggcgtcggcgacgaagaacaggaccggccgagacttatttacttaacattcgatgacggaccaagtccgagaactccggaaattttgcggattttggataagcacaatatcaaagcaacattttttatagttgaaaacgaagaaaattacaccgactatttaaagcaggaggtagaggcaggtcatagtgttggggttcattcggcaagccataaatatggcgaaatatacagcagtgttgacgcatatcttaaagactttacaaagtgctacgaatatatttataaaaataccggctatgaacctacattattgcgctttcccggtggcagtgtaaataaatacaataagaatatatgcagagatttagtagatgaaatgacaaggcgtgggtttgcctattttgattggaatgtggacagcggtgacggcacgggaagtttaacttcacggcaaatttacaacaatgtgataaacggctgtaagggtaaaaagagagctgttgttcttatgcacgacgcagttaataaaaaatccaccgcagaagcgttggacgatataattacagaacttaaaaatcagggatttgaatttgcacctcttgacaatcaagtaaaacctatggtgtttaggataaaatgattgatgtatcgccttgaatatgttattataattgtaataaatatttggagggcgctatgattagaacagcggttttgggctacggtgttgtaggcaagggcacagtagatattataaatgcaaagagagaacaacttaaaagcaaaacaggtcaagacattgatgtaaaatacattcttgtccgccatgattatgacagcgattacaaagaaaaattcgtatatgactttgaaacaattttaaatgacagtgatgtaaatattgtaatcgaggccattggcggcaaacacccggcctatgaatatattaagtctgcattgtcggcaggtaaaagcgttgtaacaagcaataaagagcttgtggcggcttacggcgcagaacttatggccgttgcaaaagaaaaaaatgtaaactttatgtttgaggctgccgtaggcggcgcagtgccgattattcacggtgtgagaaactgcttcgaggcaagtgaaatcaacggaatttacggtattttaaacggaaccacaaactatatccttacaaaaatgatacaagaaaatctttcctttgatgttgctttaaagcaggcacaggaactcggctatgccgaggccgacccatccggggatgttgacggcatagacacctgccgcaaaatctgcattttgacggatatagttacaaaacagagaattttaccggaaaatgttcacaccgagggcataagaggtataaggaaagaagatgttgcaatccttgcccctttgggctacggaataaaacttttaggctgttataaaaagcttacagagggtaaaatttcggttataactgcgccttttgcggttagcaacgattgcattttgtcgtcagccaatgatgtatttaatcgggttttgcttgacacagacaatgccggacagtcggcattttacggcaggggagcaggcagtttgcccaccggcaatgcagtagtaaacgatgttgcggaatgtgttaaggctggcggtacaatttatgacggctggcaggaaaaagatatagaaattgtaaactataatgagatggtatatgatttttatgttaacattgacggaaaagaagatatttcatctcactttgccgatgccgaacaagtgtatagcggcacggaaaaggcatatattgtaaaatccgttaccgaaaaagaattaagcgataaacttaaaggagtaaaagttaattcatatttgagaattttggaatataaaaattaaaggaactataaatggaacaaatcgaaaaatcaaaggacaggaaaaaatcttttgcaatattcataatacttgttgccatcggctttttaggggcgaatttgctgtataagccggaacttatgtgggggcatgatgtgattttccacatagagcgattgcaaaatctttctaacgcacttaaaaacagccaattaagactttatgtgacgccggatcagtacaacaatttcggttatggtataagcatgttttattgcgatgccatgctgtatccgtttgctgttttggtatgcttaggtgtcccgctttttaaatcatacaagctgttacttcggtttatcttttttgcggttgcttttacatcttattgtatggggtacgagataagcaaggacagagttatttccgtgcttttcagcttgtcggttgtttgcagccaatattttatgacagatgtatatattcgagatgctgtcggcgaatgttttggttttgtttttataccccttgtaattgcaggaacatataacttgttttacggcgataaaaataagttgtggatgcttatagtcggtttttccgggttagcaatgtcccatgtgctgagctttgtactcgcatgctttgtttttgcggcatatcttttaatgtttttcattcgtgccgttgcacataaaaagcggactaaaaatactgttaataaagtatttacaaaaactgttgttgcagcaataatatcatttttgttaagccggtggtttttactgccgatggcagagcagttagcaacaaccaaatttttgcggggtgtaatggccaaatatgatgaccttatgttatcaaccgtaaaagttcgccatttattctcgccgtcggttgatatttctgatttttcaccggctctcggtgttattgttttgatatatatgattttgcggataatttatatttgcaaatttaaatcggattttattaacaacccaaatcaaaaattgttttttagggacagtttattagtttcacttatttgcatatttatgtcaacaagtttatttccatggaatttgtttgcaccgcatataaatatcattcaattcccatggagattacatatattttcaactatattgttgtgctttacgggtagtgttgcctttgtaaaaataggtagagccctgcttaaaaataagtatgtaatttcattgacagctgtgtcggttttcattatcggaatgtttttgttgcaatgtaattatgtttataattacaatatgactaacgagggtagattggtatatgaagattttgagcctggtacagatcaaaactatttgcaggcaaatacaaagcaggaatactttttaaacagagaaaagtattcaggcaaaatttacaccgttgtaaatgatttacagggaagttgccaactatccgattatggtgttcataccgtgtcattttacgataacaacagtcgggaaaacatacttgaaatgcctataaactattattacggatacaaggtaacagatgaagccggcaatgttttggataatttcccaagtgttgacaggggttggctgtcggtggatataaccgggtatgacagccaaaatttaaccgttgtatatgaaggcacaatgttgcaaaaggtatcattgttaacaagtgtgattacagcgctggcgttggcaatattttggatagggaaattcgttgtaaataaaacccaccaagtaccgttatacaacaaacacaattaaatctatataataaataaccatcgaatttttaaaattcgatggttattttatgttaatatataaattattttatatgttaaatttataaaaattcagtgttgtcttttatatttactgtaaattattctacataaaaagaatatcaaaattcccacaagggcaccggtgctgtcgattaaaacatctcttgtcatacaccggcggcctggcacaaagtactgg

SEQ ID NO: 3032 - DNA, 3928 bp, Unknown
  16S sequences of unknown bacteria
tataagagacagatcctgcaaagcgtaccgctctttccgtccacgcggcatcttctcccaaaatggcgcggggtattcgccagatcttatggcctcttatcagatactaaccactttgcattctcaacaccggcctctgcagatgcgctttcgtcccactttcttatatcaattttaaggacaccccgccctgcccgggcctgcaaaccaatgtacacgatcttactcattttaccatttgctttttgaatccgcaaggcactttccggttttccgttacaaatccactcattttattcgatatttttcctattttttcattcaatttgaatctatcttccaattttgttacatctgcattgtaatattgaatacgaaatctcaaaatgaaacttttaggaatatctcttcgccctttctgcagaaaaaccctgcgggcgccggaaaatccggcgcccgcagggcatctatttttgattgaccgaggctttatttcaaatgcatccgcagcagtttgagcacctgaatcacggccatggaaccaaaagccagccccacaaccgtaccgaccagtctccaggacaactgcgctacctggaacagaggctccaaggcaggcaccagcagtactgctcccagcaataccacgccaatcccaaaagctcccagcaggaagcggttgttaaacatccgccgcgtcagcaatacgggcgtgtcggatttgcagtcaaatccatggaacaaccggctcaggcacagagttgcaaaagccatggtactgcctgtagccgcaccgccgctgcgcagtcccgcatgaaatgcaaggatcgtcgccactgcgatcaccaatccctcaagggccacactggtcaggaaagaacgggtaaggatgccctcgtttcggggacggggcttttgatgcatcacagcatccgtgtgcggctccaagcccagcgcgatggccggcagggaatccgtcagcaggttgatgaacagcagatgcacggctgcaaaaggaaccggcaatcccatgagggaggcatagagcaccgtcaggattcccgccgtgttgccggaaagcaggaactgaatggcccgcttgatattggcatagacattccggccgtttttcaccgcctggacaatggtggcaaagttatcatcggtcaggaccatgcctgccgcgtccttggccacctcggttccggtaatgcccattgctacgccgatatccgcctgcttcagggcaggcgcatcattgacgccgtcaccagtcatggccaccaggttgccccgatcctgccaggcccgcacaatgcggatcttgtgctccggagaaacccgggcgtaaacggaaaccttgggaacaaactgccgcagttcctcatcgctcatcccatcaatgacggcgccttccaccgcttcggtcccgggagtcagaattccaatttcccgggcaatggcagaagcggtgattttatgatcgccggtaatcatgatggggcgaatgccggcagcaatacactcggccacagccgccttggattcttcccgggggggatccatcatggcaatgaggcccaggaatgtcagaccgttttcatcttccaaactcacagccgtgctttccacggtccgacagccaaacgccagcacccgcaatccctcattggaaaactgctcattggcccgttccacatccgcccgctcctgcggcgagatgatgcaccgatccagcatcacgtctacggcgcccttggttaccatcatcagcccgccggagagctgatgaaccgtggacatcagcttgcggtcggaatcaaaggggatttccgtcagccgcggccagcgctggcgggtatctccttcatcaaatccatacgcctcgcccaaacggaccaacgcggtttcggtgggatcgcccacctcgccttcttcgctgacaaccgcatcgctgcacagcagagccgtgcgcagcagcggctcctgcaccggatcatgaaagtcggcttcttcggcggaaatgatctttccaccggtatagagttttttcaccgtcattttgttctgcgtcagagtgccggtcttatccgaacagatcaccgacacactgcccaggccttctactgcctggagcttacggataatggcgttttcccgggccatcttctgtgtgccgaaggaaagtacaatggtcacgatggaggaaagcgcctccggaatggcggctaccgccagcgccacagcaaagaggaaggcgttcatcacgttttcatgccgcaaaaacacactcacggcaaacagcactgcacagatgatcaaaataccaatggacagtttccggccgaattggtccagactcacctgcaaaggagtcttcttctcttccgtgctcttgagcaatgcggcaattttgcccatctccgtgttcatcccggtaccggtgaccaggaacttcgcccggccataggtaacaaagctgccggaaaataccatattcttccgatcgcccaacggagcatcacccgggatctctcccagctccttctccaccggcagactctcgccggtcagcgcgctctccgcgcatttgaggctggcacactccaagaggcggccgtcggcgcagacagagtctcccgcctccagcaccaccacatcaccaggaaccacatcccggccgggcacctgaagtacgcggccatcccgcaacaccttggccgtgggcgcagacatctgcttgagactgtccagcgaagcagtggctttgacggtttgaacggttcccagaatcgcgttcatggtaataaccgccagaatgacaattgtgctctccacatctcccagcacagcggacaccgcggccgccagaatcaaaatgattaccaggaaatccgcaaactgctccaggaaaatccgaaaaacgctcttttgcttgcccgcctgcaattcattggggccatactttcgcaggcgctccgccgcctcttccgcagtcagtccgccatcgccgcaggaaagatcctgcagcagctccatacgactcttttgccagatctttttctcgttcatacctaatctcctttcggcagagcgcaaaaaaacgagacttttgcgccaatgccctgcattgatacaaaagtctcgctgtttcaacccgtagcggagcggaacgctcgtgtattgacgcctgcggatacacatttctgtgccagctactcccttttctagtgggcagtatactcgtattttttccacttgtcaagaggctattccctgccctgccacagtttctcttgttctgccagcactccccgtggtacaataagcagcaaaaggagggattgccgtgcagatcgcactcattcaaatgccggtcactgccgataagcaggaaaatctccgcaccgcccgccggtgcctggaagaggcagccgcgcacaacgtcgatctggccgtactgccggagatgttctgctgtccctatgaaaatgcctgcttccgcacctacggggaaccggagggcggccctgcccaggaaactctgcgcaaggctgccgcagatctggggctctatgtggtgggcggctctcttccggaactggaggatgaccgggtatacaacaccagctatgtcttcggtcccgacggcacacagctggccaaacaccgcaaagtccacctctttgacatcgatgtcgccggcggacaatccttccgggaatcggacaccctttccccgggaaatgccatcaccacgtttgaaaccgccttcggcaccatggggctttgcatctgcttcgacctgcgctttgaggagttggcccggtgcatgtgtttgcgcggagccaaggtgctcttcgtccccgccgccttcaacatgacccgatggtaagcagattgcttttgccagcgaccgcttcgggaa

SEQ ID NO: 3033 - DNA, 17897 bp, Unknown
  16S sequences of unknown bacteria
taaaatagattctatttatttatatacatatataatatagcactataaggatatagcgattttccaatcgcttaaaggagtatactatggcagataacaatcgcggacgtccccgtgatgatgatagagatatttattcttccagcagggaacaaagaaatcctcagagaacacctcgctacagaacaaacgagacaaatgaattacgcagcagaactcaaagacaacaaaatcgtcctgaacgaacaaatagttctgctcagcaaaatcaacggagaaacagcggaagaacaaacagaccccctgcttccgacgaagatattgaccgctataattatgtcaatcgtgatatttacagttcctcgaaaaaatccaaaaaaaatggcggcggtgatgatttacctcccagaaagaaaaaaaagaaagcaaaaaaaattatcattgcaatcatatgtgttgtagttgcaattatcatcggagttgttgcctttgttgcaattatgctttcacgaattaattataaacctgttgatactaccagctatgtggaacaaccatccgatgcaccgacttgggacgtgatttccgataatgccattaccaatattttattattgggtgttgaccgaagcgaagatggtacggcccaacgttcagatactatgatgctgatttccatcaacagtaaaacgaaaaatttaaatatggtttctttcctgcgtgatttatacgttgaaattccaaccgcaggaaaaaataaaatcaatgctgcatacaccataggcagtcaaagtgatgtaggcggagccggtttaaccatgcaaaccattgaaaataacttccgtatcaatattgaccattatgtagaaattgattttgaaaatttcattaacttaattgatgccatgggtggcattgatattgaaatgacacaggacgaagtagattacatgagcagctggtattacggagaatacggccaacctatcagcctgcaagtcggaatgaaccatttggacggaaaaggcgccttgacatttgcacgtatccgtaagttggacagcgactttggcagaacaggacgtcaacgtcaagtaatgattgccatatttgataagttcaaaacattaaaccctgcgcagatgacttctgtattctataattatgcacagtatattacaacagacttatccagcagtgacattctttctcttgcaacacaagccggtaccattcttggatatgaagtacaaacatcgcacgttcccgaagaaggactttatacagaaatagattataacttggttcctgatctaccgggtacatgcgcaagtttaagagaattcttatacggctctgacagttcaagcagttcagcgaagaatacaaactaaaaatttataatggaagacagatgagaatattatggaaaagaaaaaaacattttatattacaactccaatttattatccatcaggaaaagcccatatcggacacagttactgcacggtaggcagtgatgcaattgcacgttataaaagaatgcaaggttatgacgtcatgtttttaaccggcacagatgaacatggacaaaaaattgaattaaacgctgcaaaagaaggcgttactccaaaagaatatgtagataacattgtacatggatttcaggagctttggaaattattaaatatttccaatgataaatttattcgtaccacagatgaaatccatgtaaaaggcgtacaaaaaatttttagagagctttacgacaaaggtgaaatttataaaggagcctataaaggctggtactgcactccatgtgaatctttctggacagaaactcagctaaaagacggcaaatgtcctgactgcggcagagaagtaaaatgggaggaagaagaggcttatttcttccgtctgtccaattatggagataaactgttaaaactatatgaggaacatcctgagtttattcaacccgaaagccgtaagaatgagatgattaattttatcaaaaacggtttggatgacctttgtgtttcccgcaccagcttttcatggggcattcctgtggatttcgaccccaaacacgttgtatatgtatggcttgatgctttaaccaactatattacagccatgggttatgactctgatgacgattctgattatcaaaaatattggccggcagacgtacattttgtgggaaaagaaattgttcgttttcacaccattatttggcctgctatgcttatggcccttaatttgcctctgccaaagcaagtatacggccacggttggctattgttcggcgatggcaccaaaatgtcaaaatcaaagggtaatgtggtagatcctgtcgttctgtgtgaccgttacggagtcgatgcaatccgttatttcctattaagagaaattccgtttggcgcagacggtacttttacaaacgaagctttaatcaatcgaattaactctgacctggcaaacgaccttggaaatctgctttcacgtacaacagctatggctcaaaagtattttggaggtaccattcctgctgaacgtgaagaagatgaactggatcaagaattaattcaaatggcaacagagttatgtgcaaaatgcgatgcacatgtatccggctaccaattttcaaatgcgcttgctgaaatttggaagttaattgcacgtaccaacaaatacattgatgaaactatgccatgggtacttggtaaagatgaaagtaaacgcgccagacttgcaacagtgatttataacctttgcgaagtattgcgcatcatttctattttattgacgccatttatgccatccactaccccaaaaattcaggaacaaattggtgcaaaaaatcaggaactttcttatgatacagcagataaatggggtatcttacctgctgacgctgttattacaaaaggagaaaccttgttcccacgtattgatgtagacgctgagattgaagagttaaacaaattaattccaaatcctgctacattgaaacaaaaggaagaagcaaaaaaagaggaaaaaccgaaaggaatcgcaacatttgatgaaatcacatttgaagatttttcaaaaattgaattgcgtgtcggtaaaattttagactgcgaaccggtgaaaaagtctaaaaaattattaaaattaacggtaaacgacggagaaaaagagcgtaccgttgtttccggcatttctcaatggtatcaaccggatgatttaatcggacaccacattatattggtggcaaatctaaaacctgcaaaattgtgcggtgtggaaagccaaggtatgattctggcagctgattgcgatgaaaacactgtaaaagttatttttgtagacgatatgcccgcaggcagcggcattcactaagttatgtttgatacagactgcggaatctcgattctgcaagtctgtattttatttggaggtggtacaatgcaaaattttatttttgattctcatgcacattatgatgatgaggcctttgaagaggaccgtcatcaagtgatacaatctttacggcaaaaaggagtttgcaacgtcatcaatgttggtgcaaatcttgagcgttccaaagattccattgcacttgctgcacagtatccgtttatttatgcagcagcaggaatccatccgggagatgtcaaagatgctcctgccgactatcaggagcaactggagcaactaatcaaacagccaaaagtggttgctgtaggggaaatcggactggattatcattatgaggacaatgcgcctcgcgatgtacaaattgctttttttaaaacccaattgcagcttgcaaatcaatatcaacttccggtgattatccatgaccgtgaagcgcatgcagacactatggatttattaaaaaaatataaacccaaaggcgtggtacattgtttttccggaagcgttgaaatggcaaaagaagtaataaaattgggaatgtatgttggtctgggtggagcagttacctttaaaaatgccaaaacacccgttgccgttgcagcttctattccgttagaatccatggttttggaaacagatgccccttatatgactccggttccgttccgtggaaaacgctgtgattcttctatgattatttacaccgctgaaaaaattgcaaatgcgcgcagcgagcagggaaatataatcaccgctgaggagctgctacgaattacccgtcaaaatgcatccaacctattcggcgtgcctctggaggattaatatgaccattacttatgtgtacggaaaaaatttgtatgtcaacttaaccaaccgctgccccaacgcatgtgatttttgtttgcgtaccacaggcgaccatgtgggagattccggcagtttatggctggaacgtgaaccgacaaaagaagaaattttaacggaactggaaaaacgagatttatctcattatgagcagttggtatactgtggctttggagaacctacttatcgattggaagatatcaaatggatttctgcaaaagtgcgtgaaatgagtcatattcccattcgtatcaataccaacggattatctgatttaatgtttggaagagacaccgctcctgattttcaaggagtggttgatatcatttctattagcctaaatgcttctacccctgaaacatatgacgaaatatgtcactctgaatttggactgaaagcgctacccgctattttggaatttacaaagcatgtaaaacaatatgtgccaaaagtggtaatgaccgttgtagataccatgccccccgaagaattggaggcttgccgtcaactatgcgcgtcagtaggtgctgagtaccatgtgcgtgtatacagcgaaaattggaccgatgaaaactaacatagcaaggttgatatccaataagcacagcaaatcaattttcattcccgaaccgctacaaataattgagaatgatagatgatatttattgcaaaacggctatatattgataaacaaaaaagcgtaaggaaaatccttacgctttttgtttaccatgtttgaggaaatgaaaacttactgaaatacaccggtttctatgtatggaatgctctgttcacctcccttttttcttatattgcaaggtttacaatataacattgggattggcaccacctcctttactgtcataataacgttttcatactttcacttataaatcgatgcttggtaaacgcagttgaatcgctaccactgtgatatcatcgtcgtggccgtctgttcgatgcacctgtgccttttctacaatggtttctgccaatgtttgtggagaattttcgttccagccttcaatgcattccataatccatgcatctcctgccgccagtacgccgtcagataccatcaccaaccagttattttcctccaatttgctttttgcatacgcaaacttggcttcatctaatatgccaatcggaacagatactgcatccaaacgttccacatttctgccttttttaataaaactcataggtgcgcctgctttcattacagaaagcgaaccgttaaataaatccaaaaccgcaacgtccaatgttgccaaagattcttcaccggatttgacctgcatggctgagttcacaatttttaatgcacaatcaaacccaagccctgccttgaccaaattccccataatatttgatgccatagcgccatctacagctgcacgtccgcctgtacccataccgtcactgataatggcaacaaatctgccttttccatctgtaaaacagtcataactatctccgcaaagctgtgcattatcgcaggcatgctgcgctacaccaaactgaatgcggtagacaggtttttctgacatttgaatacggcagcggtcttttataatagaaatcattggcggttcaaatctcctgccgcaaactttggatatttcttttgccaatttggttcttcctattttcttttgatccaaggtaggagtttcaatttctacagacattcggttataacggtcaatacggcagctgacatcaatgggaataatggccgattcatgtaatacttgattgatacgctgtgttgcatcataatcaaaccgttcatataattctaattcctgtgcaaaatcgcgcatcatttcactggtcgtttcaaattgattcatcaccatagctcgtatttgagacacacgtttctctgccgattctcgaatctgcatttctttatatttatggttaatattttgtgccaattcatttactctgccgcaacggctgacaaaaaatcccggaaaatcttctattccaatactgctcttttcccctagcttacttgcagcgctttgcagtgcttgcacggtttccggctgatttttttcccagcaatacatacgcaatccgcagttttcgcagcattcctctaccgcattggtatatacttggtcagaatcttgtgcattgaccacggccaatcgttttgagacctcatctacagactgcgtcacatcatccaatgcttttgcagcaaatcccaaccgcatggtaacagctcgccttaatccatccgtatgaagtaaatctaccggctggcggaacaaagcaatgaactttccacctatttttgtgggccaaatgatataaatcaatgttgcagccagtacctcgtataatccgttaatcatatacatctgatttcctatttgcagcgaaccgattgcgtttgccaaaataaaaaccagaatcagcgctacttttcccagcggagcaaataatcccgccatcaatcctgcaaatgcatatgcccctgatatatagctgagacccgatgttgtaagccctaacatgacgcctgttgcggtacctgcaatggcgccgcctgcaacgcctccatattgggcagcaaataaaattaaaataactgctgcaatgctgcctaaagaaatatcataaatcgcaatattatccagtgccagtattgcgactcctaacgataacacaacacaagccaattcgcctgtgttcagggtaccaactccgcgtttgcttgtaatcaaagaagatgttcgttggaaaaaatatgcgcctgctgctgaaagcatagcctctgcactatacatggtaatactgttaacagtaaccccattgataaatgccatagcaatacccgtcaccaacattggaacaaaacaaactaccggcgcaaacagtggatgggaacggattttaaccagttcatttagaatacagcgaataatagcaattgcaataatcgccgctatgtatcgaattggatgcattgcattggacggccatatgtaaccaaccaaactgccggcaatcacagcccacatactgcgtattggcactgctgccactgccgctgcaccaaacggtgcataccgtacaaataccatacctcttgaacctaatagtcctgccaaaaaatacaatgcataaagtgcaacgcgcttggttctggaagaagtaagaattcctttaaaattaatcttccgcttctgcgcatgctccatggtttttcctctcattgacacaacctccgtcatttcacgtcaaacatgtttacacttccggcaagcaaatggctgcttgtccttttatgattttgattatacaaggagtaaggcgcattctctgtcacaatgcgctgttctttcttgacgagaaatggaattcttttggtatttagagaaaaaaacggccgattcccctgtcttttcaactgctctttcattgattgttagataaatttgtgataaaattataaaatatgattgaagtttgactcatactttaagatttggatattttattctgaaaggtgcgtattatgatgatggattatcaattttccgaccgtgtgttagctttaaaaccctctattatccgagagatattaaaaaattcatctgacccaagcgtcattccgttttctgcaggcaatcctgcaccggaagcatttcccgcaaaagaaattgctgaaatctctcaaacgattttgagcgaaactccgattgcggcactgcaatacagcattacagaaggctatacaccgttacgtgaaaccatttcctcatatatgaaatctcatcatcaaattggcagagaattcgatgacatcatcgttacatccggtgcacagcaagttatgaatcttgccagcaaagtgctgtgtaatgaagaagacgtcattatttgtgaagcaccaagctttatcggctctttaaatacattccgttccatcaaaacacgtttgcgcggtatttcgatggaagaagacggcatgaacatgttggagttggagcaagctttaaaagaagaaccaaacgcacgtatgatttataccattccaaactttcaaaatccgtcaggaattacaatgagctttgaaaaacgaaaaaaaatgtatcaattggccaaacaatacggcgtcatcattttagaggataatccgtatggagatttgcgcgtcagcggtactcatgttcctgccataaaatcctttgatgaagatggcatcgtcatttatgcaggctctttctcaaaggtcatttctccaggtatgcgtgtaggttttaccattgctccaaagccgattgcacaaaaaatggtagtatgtaaacaagcggatgatgtacacaccaatattcttgcacaaatgatttgcaatacgctgatgacggattacgactatgacggtcacctggaaaaattacgtaccatttatcgcaaacgcacagaactcatgattcatctcatcgaagagcacttagttcctcacggtattacatatcataaagcggaaggtggtttgttcatctggtgtacgcttccggaaaatatcaatatgcttgatttctgcaaaaagagtgctgagaaaaaagtatgtgtcgttcctggaaatgcattcttagtggatgaaagtgcaccttgccagtcattccgtattaatttttccacaccaaccgaagaacaaatacaaaaaggaattgcgatactgggtgaaacagtaaaacaaatgtcaaactaaattacagctaatagatataaggagaatacatacatgtctgtcacgaacgaagcagagaaaaaaaaggtaatattcagtgcaatacagccaagcggaaccattacattgggaaattatttaggagcactgcgcaactggattggcttacaggacgaatatgattgtatttttgcattggcagatttacataccattaccgtccgtcaagaccctgcaaaattccgccataatgcattggaggcatatgccctgttgctggcttgcggaattgatgtggaaaaaagcttattctttatccaaagccatgttcatacacatgcagaacttgcatggattttaaactgctatacacaatttggtgagctctccagaatgacgcagtttaaagataaatcagcaaaacatgcagataatatcaacgtgggtttatttgcttatccaagtttaatggctgccgatattctgttatatcaagcagatatggtaccggtaggagccgaccaaaagcagcatttggaattatcccgtgatatagcagaaaggttcaacggcatttacagtcctacctttgtaatacctgaaccttatattccaaaaacgggcgcacgtattatgtcactgcaagacccaaccaaaaaaatgtctaaatccgacgagaatgcaaacagctgcgtggctgtgctggataaaccggaagacattctgcgtaaattcaaacgtgccattaccgacagtgacggctgtgtaaaatacgcggaagggaaagacggcatcaataatttaatgggaatttattcttgtgtgaccggaaaaacaaatgagcaaattgaagctgaatttgcgggaaaaggttacggcgactttaaaactgcggttgcggaagccgtcattgaacatttaaaaccaatacaagaaaagtttgcacaatatataggagacaaagcctatttggaaaaatgttatacagaaagtgcccaaaaagcattggcagtctccaatcgtacgttacgtaaggtgatgaaaaaaattggatttattccaaaagcattttaaatgaacaggtaacaggcaggtaagcaaaccatattatgcttatctgctttatttttgattgagagggatacatgaaacaggttaatttacttacagattctccacgccgattgttttttcattatttaggcccaacaatcggttcatctatggtcacatccatttacattctggcagataccattatggtcggccaaggcgttggcgacgcaggtcttgccgcacttaccatctttatgccgattgtagcttccttttttgcccttggcttattactgggcataggcggcggcgttttgatgtccgttgcaaaaggaagcggtaatgaatcactggctcataaatatttttcaacagctatgatatcagcggcagttgtcagcgtttgctttgcagtattcggagcgattttctttgacccaatgatgtatgctttgggcgcagatacaaccaatattgaactggtacgcggctatggactttgctataccgtttcggcgccattgtttatcttttcatccagtctgcaatcgtttattcgtaacgataaatctccaagacacgctatgattgcagttttgacaggctcaggtcttaacattctgttagactatttgtttatttttgtattcaaaatgggaatgttcggagcctcttttgctacctctatcggcaccagcattacggtatgtattttaatcatacattttttcactaagaaaaataccatgcgtttttcctttcgctttttctctattaaggcattgtgggaaattgccaaatgcggcttttccagtttcctaatcgagtgtgccaacgcagtattggtatttgtatttaaccataccttactaaaatatataggcagtgttggcgtaacagtttatagcatcatgtccaatgttgcggttgtttgcatgtctctgttcaacggtgttacattagcagctcaaccaattattgcaacaaatcatggtgcggacaaccataaacgggtgctacaggttcggcacattggcactattacttccagtgtgattgctgttattattttttgtgtcggattcttcttccctgaccttctgatttacagctatgtaaagggtcctactcctgaaatattagagctggcacggtatgccctgcgcatttatttctttgcctatctatttatgaactttaacatctttttcagtggatatttccaatccacattgcggcctgttgctgcaatcaccatccaaatactccgcagtttgctgctaagttctgtattggtctctgttcttccaatgatattcggagcagatgctatctggtatgcagtacctatcacagaatgtattaccttttttgtagcgatggccttcttatttttcggcagattccaaaaaacaaaagaagcgaaataaaaaagcgcaaataccgaaatggtatttgcgctttttatattatggaatatgaatgagatacgaactatagcattcttcatcttcccaatacagactctttccaagatgaatgctattttaattctatcaacacaagtaataagatacaagtgattttataaataaactcttcccttctattcctagagaaccatgacatatcaccaaattcagtaaaaaatatgcatgaaacccatatatagatttcatgcatatgaacaaactacatactacactttaaaaaggttccggacaaatataattgagctgtccgacttgttccccatgacgcagatagattctgggtacacgctttccaaccaaacagaccatttcataatgaatggtactgttgaaagaagccaattcatctactgtaatggtattctctccgtcttttccaaaaatagtaactgtcattcctacttcagcttccggaatatctgtcacatccaacattaattggtccatacatacgcggccaaccactctggcacgttttccgcacaccagcatatcagcatggtcgtgcagcagtctgggataaccgtctgcatatccaatcggtacagttgccaatcgggttttacgctgtgtaacaaagcagcgtccatagcttacactcgtgttttcttctactgttttaatcatagaaatgactgttttcagttccattgcaggtatcaaattcagtggccgtctcatgcaattggaaggcaacaagccatacagtataataccggggcgaaccatatccagctgcatgtcaggatagtctaaaatagcaccgctgttggaacaatgacgcagcttaaaatcaataccgcgtcgttttaacataccgattgcacccataaaatcttcaaattgattctctgtaaaaaagtctcccggttccccttcatctgaaacagaaaaatgagtaaaaataccctcaggatacagacctttcatatgacatacatcttctatctcatcaatcacagccgcatctcgttccggaacctgatataaaaagccaatacgactcatacctgtatctactttaatatgtattttcacctgcacaccggctgcgaccgcatgctctgccaactcttttccatattcataagaaaatacggtttgtgaaatattcatttcatgaagtctggcagcttcctgaggcggtgtataacccaatatcaacatatttccttcaatgccgcttctgcgaagctgtattgcttcctctaaattggaaaccgcaaaccattccgcgcctatacgctccagttcttttgccacaaaagaagcgccgtgtccatatccgtcagcctttaccacacagcaaatttttgtgtcagggtttaaggattgtttgatttccgtatagttatggcggattgcatctaaattgatttccgcccaagttcgtttaaaaaagttatccatgttgccactccggtattacgtaaaaaatcgtgattcgtctctaatcgtccgattcttctattatatgtctgcaaaggaaaatagtcaaccgcacaaaaatctttcgtcaaaattcatgtaacttttcaaatacaaacgcatatactagacaaatgacgttttcatgcggaaaacaaccagaacggaaagaaaggtgattttgaaatggaaggcaacatgcatattcgttgtcctaaagacgtagatatgaatctattcacaagactgtttagcagtttggttacaggcgatgaccttgacgatttgatttttaacggtgaagagtggcataaaagtgaacgataattttaggacatttgatatgcaacatgattcacccacaactgtgggtattttcattttacgtagaaaaatattgcacaatcaaaaagctgcctatgaacaggcagcttttttgctgataaaaacacgttaaaactccgatgattcgctaaaacacggtatctattgtattctttgaggatttcaaacatgaaatttacgacttccaaacgagaaaacacatagagatttaagaatttatgtgagtgtctttccactatgaagaatgccattaaagccttattttatcggctttaatggcatttaagaagattgaaaaatataaaaaggaatgttcaatccgttttttaataacaattatttaaaatacttgacaccggactcaaacaatttttgatctttttcacccggaacatttttatataaatgattgcccaaacgttcggagtgtgccatttttccaagtacacggccatcaggacttgtaatgccttccacagcacaaacagaaccgtttggattccatttgacatcgccgcttggttttccgcacggagtagtatattgaaatgccacttgtccgttttcaatcagctgctgcataacggcatcgcttgcaacaaaacgtccctcaccgtgagaaacaggcactgtaaagacatctcctgcatttacacctgacaaccacggagattttacagaagttactcttgtgtataccatacgggaaatatgacgtccaatggtattgaacgttaaagttggagcctgtgggcttggctctgtaattttaccgtatggaaccagacctaatttaatcaatgcttggaacccattacagatacccaacatcaaaccgtcgcgatgttccaaaagattgctgacagcgtccttaatttttgggttgcggaaggtagtagcaataaacttgccggaaccgtccggttcgtcgccgcctgaaaaaccgccgggcagcataacaatttgtgcttcattgatactgcgcaccatttcttcaatagtctcttcaatatcattcggcgtcaaattctttacaaccaaaatatctgcaattgctcctgcacgctcaaaagcacgggcagtatctacttcacagttggtgccggggaatgcaggaataaacactcttggctttgcacttttgattgcaggtgctttttgattgcgctgtatatacaaaccaatctcatgggtcaattcttttttctcagcctgagttgggaaaattttctccagtgttcctgtccatgcagacagtagctcttccaaaggcattgctgtgtgagcaatttcaatttcagaacggtccgttgtctctcccagaataatggcttctaatttaccgtctatggaggtaacatcgtttaattctaaaatcaacgcgccgcttgcaggtgcaaacaacaacttctcatcttgaatgtggtcggcaaatacaaaaccgatttcgttaccaaagcacattttggcaattgctgctgccacgccgccttcttttacaacgcttgctgcgcgtacctgtccgttttctatcatttgaaatacagcttcataatatgctttcaatttaggccagtttggtagcaaagtatctgcttcttccggcaatggaagcaatactactgtagagcctgccttctggaatgcagcggaaatggttttgcttgcctttgtcatcgcaactgcaaagctcactaaagtcggtggaacatccatgctttcaaaggagccggacatactgtcttttcctccgatcgcaggtatctccaatcccaattgagctgttaatgcacctaataatgctgcggtcggcttaccccaacgtttcggttctttttgcagacgttcaaaatattcttggaatgttaaacgcgctttcaaaggatttgcacctactgctgccagtttagatagactttctaccacagcataagccgcaccatggaatggactgaactttgcaatacccggaatataaccgtagctcattgctgttgcatcatctgtttcacctgactccaacggaattttagcaaccatagcttcttcaggtgttaactgatatttacctgcaaacggcatatgaaccgtgccggcaccgatacttgcgtcaaaacgttctaccaaacctttttgagaagcaacttccaaacgtgccaagttttctttgaacgcatcagcaacagactttccttccaaacattccggaatcaaggctctgtaatattcttttgggtttggtgcagtaatcacagcctgtgccgtttgtgttacaccattggtattgaggaacttacggcttaaatctacaatggtattgccgcgccagaacatcttaagtcttggttctgctgtaacggttgcaactacctgtgcgtttagattttcttcttttgcagcctgcataaatgcgtctacatcttttgaatcaagtaccactgccatacgttcctgcgattcggagatagccagttccgtaccatccaaaccttcatatttcttcggaacgctatccaaattaatgcgcaaaccgtctgccaattcaccaattgcaacgcaaacgccgcctgctccaaaatcattgcagcgtttgattaactttgaaacagcaccgttacggaacaaacgctgaattttacgctctgttgggggattacccttttgcacttcagcgccgcaaacttcaatggaatcggttgtatgggctttggaagagccggttgcaccgccgcagccgtcacgaccggttgctccacccaataatacaatcacatctccgtcttccggagtaccgcgcattacattttcttttggagaagcaccgatgactgcgccgatttccatacgctttgccatatagccctcgtcatacaattctgtaacttgtccggttgccaaaccaatttggttaccgtaagagctgtaacctgccgctgccgttgttgtaatcatacggcttggcagctttccgattaaagtatcttcaaacggtgttcttgggtcaccggaaccagtcacacgcattgcctgataaacataagctctacctgaaagaggatcacgaattgcgccgccaagacaagttgcagcgccaccaaacggttcaatttctgttggatggttatgggtttcatttttaaattgtaccagccattgttctgttttcccgtcaatttcaacaggcacttcaatggaacatgcattgatttcctcactgacatcaaggtcatccaatttaccttgtttgcgcatcaattttgcgcctataaccgccatgtccatcaaagaaacaggacggtctgtttcgccgtatacggtattacgggtatcataatatgcttttaaagcctgctcaatggcatggctgatttgacctttttgaatttcaatggattctaaggaagtaaaaaaggtagtatgacggcaatggtcggaccaataagtatcaattactcttaattctgttacgtatggatctcttttttcttcatctctgaaataatcacgacagaattttaagtccgccatcgtcatggcaaatcccataccgtggtaatacttctccagcgtagtatcatcccaagaaatcataccttttacctgctcaacatcttcaggtacttctacttccatatccaaagaagcaggtttttccaaagaagccagacgagattctacaggattaatcaaataatttttgattttatccatatctgcttccgatacagcccctttgattgcaatgacacgtgcggtagccacctttggacgctctccgtgggtcagtaattgtacgcattgcgctgcggaatctgcacgctggtcatactgaccgggtaaatattccattgcaaacacatggtagtcatcagaaaattgcaaatcttcgccatataaatggtctacattcggttcagaaaaaatcatgcggttcgcatcttcttgttctttttgagacaaaccttctacatcataacgatgtaataggcgtaactcctctattcctctaattcccagattttctgttaaatctgtttgaatatgttttgcctccacatcgaatcccggttttttttcaacaaatattctggtaactgacatagttcctcccattctgtcttgcctttggtgattagcaagtcatgtcctttttaagtccatattctttcctgtattgtacataaccaacgaatgcaagccgttggtgttactttatcatattttccttatatgataacattataacataaaagaaattgtgtagcaatttctaacaaatagaacgttaaaacattctaacagtaattaaaacgatagaatttggccgttgatacgttgtcataaatataaaagtgacagtatcattttcagtagtcatcataaaaatataattgcaaaaatatgaaaaataaattcattatttataactatattttaatatactacataaaaaaagaaggttttacccttccactgaaacagtttgtgtagaatgttcagcaatcatggcttttatttcattcatacgtttcattgcgtctgtataacccatatcgtaaatt

SEQ ID NO: 3034 - DNA, 6793 bp, Unknown
  16S sequences of unknown bacteria
gcgcagagaaagggatttgaacccttgttacccgtggggtaaacacgatttcgagtcgtgcgcgttcgaccgctccgccatctctgcgttacttttgatattttaccactttattcttgctttgtcaatctttcgggcagatattttatcaagaatacggccaaaacgccgatgacgatccccgcgcagacgctgaaaatacagacggcgggaagttgtataaacagcgacggcgcatccatcagccagacgccgaccgccgtacgcgcaacgttgctcaggaccgcgcctgcgacgctgattgcgacaaggctgactttcggaaagacaaatcgatacaagagcaccatgaccgcgtacgccgccaaactgcccgcgagattgaacgcgagcgcgaacaaggaaccgaacagcgcgcccagaagatttttcgccagcacaaacaaaaaagcatcccttgcgccgaacaggacgataaccaaaaggacgatgctgttcgccagtccgatcttcacatagggcgccatcggcagcaacggggggatcaggctttccaccagaaacaatacgagcgccgcggcgagcagaaccgcaagcgcggcgagccgccttgccgtgcgcctcacagatccgtctcccaatcgtcggagacgatcctgagcgtcatgcggtgcggcaggcagactccgttgccgaaacaaactttgtccgcacagtcggacgcgacgacagacgctttgccgtccttgacctctatgacattataatcggaaagcccgtccgcgtctccgcccgcaatcactttgccttttcctccgtcgatataaaacacatacagcgcgtccttttccaatcccgccataaagatgacttcgccgcgataggaaatttccagccgcgtcccctcctctttcctgcccgaaaaggaaaaaaaagtaaacagcagaacaagcgcgagcagaaccgcgtacacggcgagatcgccgaacgcaaaaaatgaattgtgcctgccgcggcagattttaagaggttcactcatgtccgctcacacttcgaaatgtattccttttctttttcgcagggtattacccgatcggtcgcttcggaaacggcgccgcgcgtaaagacgtcggtataggattcggaaacttcgctcatattcagaacggaaagatccccgatggtataaaactgaaaatccgaacagatgacgacggcggaaacgcctaaagattcggataaccgcccgtaaaagttgagcgaatcggtcagatccatgcaaaatcccgccgtggacagcgcgtccgccagcgcgccgcaatcggggactgtattcgggacgacgaccgtaatgctgatgatcccgcgatccgcgggccgccccgtttcgggatcgagaatatggcagtatatcttgccgccgtaggagtaaaagcggtacatatccgaactggtcgtgatcgccgcggaagacacttcgggcagcatcatgcactgcatatagggcgtaacgcgggcgcgggggttgtccacgctcactttccacggtctcgtgctctgcgcgctctcgtgataattcccgagcaaaatcgtgttggacatgacggaaaccgagccttccacctttttccctcggaaacgctcttccagaagcgcgcgcagacagtcgctcatgtatcctttggcaatgccgcccagatcgagtttgagcgcagcgttctttttctgcacccgctgcccgtccaacaattccagatcggaaaaatcgctgcctgcaagcgcgatttcgatctgcatgagagaaggctcggagcgcgaaacattgtatttcccttcgcagtcgggcgaaaagccccagatctcggaaagattatagagcgcgggagaaaatttccccgccgtgagcgagtgcagttcgccgcaaagttcgagcatccgataggtatgctcccccacggcgacaggctcgtacgcccctgccgcgttgatttcggagagatcgctgtcgggaaattcgacgctgatctcgcgctcgatcgagcggatcagttcgcccgcaacggcgtttagcgcgcggtattcggcatcggaaatcttcttcccatcgatatacagttgcgcggcgtttatctcatactccacaaaataccccttttgcccgctgtcggcgctttgacaggcggtaaaggagaaaaaaacgagcatgagcgccgccgcgagcgcaaaaaggcgaatttttcttgttttcaaaagtttcctcttaaaaagcgcaaggctttcgccttgcgccgcaatttatgattcagcgggattccccgtggaagatcacgccgagcgttccggggccgcagtgagaggcgatgacgggaccgacgatctgataatcgatttgaatattttctccgaattccgctttgagcgcgtccacgaacgcgtcgcccgtgtccttgcagtccgcctgcaaaacttcgacgcggtaattctgcacgtcgcactttttatggcgcatgatgcggataaattcgctgaatacgcgcttggcacctttgactttgcccacgctcttcaaactgccgtcgggcatgatggagatgatgggtttaatatttaagagagagccgaacgccgcggtgagcgcggaaatacgtccgccgcgtttcagatagaccagatcgtcgacgatgaaatagacgacggtatgcgccgaaatatccgcaaggtaggcttccaactcgtccatcgtggcgccttccttatatttctttgcggcataatagacctgaaatcccgcgccgagactgatgctcttggtatcgaacgtgcgcacggtgcgctcgggatagcgttctttcaaggttgcgatcgcgcggtccatactctcgaaagtagcggaaagtttgtgtgaaaaagtgatgtaaaaaatatcgtcccctgcttttaagatcggctcgaaatagtctatataatcctgctcgttgatggcggacgtcgtgggaacggcgccctcgcgcattcttttataaaaatgatcgaaatccgtcgcttcgcccatgtcgtaaaaatattcttgcccgtcgagcacgtacggcatgcggatgacgttgagcccgagttcttttatcgtagtatgccacaattcgcagttggaatcgcaaaataattgatacattgattttactccgttctttggtttgtttccttcattatacaacacaatcgcccgatgtgcaaatgatttttcttaaaaattaaaatcggggtacaattttcagaattttttgaccgctacgccgcttttgccctctttttccaatccgtggcagttgacgatgacgcccgtcacgaaacagatcatcagaatgtatacccaaagcaaaaacacgatgagcaatgtgatggcgccgtacagtttttccatggaacttaaactcagatacagggaaaacccgaaggaggcgacgccgcccatcagtacggtgagaaggctgccccacaccacgtttttcagattgacgcggtacgggcacacgtgcagattgaggatgagaacgagcaggaacgccagccccgccaaaatgatatagacggcgatctgcgcgaacacggtatgaaagaggcggcggataaacccgccgagaaagaggaacacgcccacttcggcaaacagtaaaagcatgataacgaacagaagaatgagcgcgctgatgcgaaggagaataccgctcttgcggcggcgataatcgtaaatgatctccccgctgcggcgcatatggtaaaaaagcgtggtggaagaatagagcgtcgtcagagcgagaatgacggacgcgcccgcggtggcgctctgcgctgcttcgagaaaataggaaagcacgtcgcggatccccgcgaagatagacagcgaaaaaatctggtcgtaatccagattcagattgccgaacagcagcgtgagccagaagataaagggaacgatggacagaataagaaaaaacgccagcgtgcccgcgatcgtagtatatttttttgaggaaagatacgccagcgtattctttgccttattgtagacttttcgcacgaaacccatactcttattgtatgcagttttttgcgggaaaataaatattcgggcaaattaaaaaaggcgactgtacgtcgccttcgtattcgaggatctgatattgcgcgtcatcccgccgacgctccccttccagatataaaagcaacaggaagatagacgcaatcgcaacgaacaggagaaagacgacgatcattttcaagtagaattttttcatatgtagccctaccttttactccataatatgcgatccgcgccccgcgcgtgaagaccccgaaggattcttccttcggggtctttctcaaaatttatttatgctttttgggaatgatcagtccgacgtcgccgctttcgcgcagatacaccacgcgcacttcgttggtttcggcgtcctgaaagatatggaacgagtgccccaaaagatcgagttgggtgatcgcctcgtcgacgttcatgggcgtaagttcgaacgtcttggtctttaccagtttgctttcgggcacggccgcatcctggaaaaagatctgcttgtcgaaaaaggcgtcctttttgagtttggaagaaatcttgctcttctgtttatagatctgcctttctattttggggagaacggcgtcgatatcgtcgtagaaattatcgcccgaaacttccgcgcgcacgaggctccctttatattgaatggaaacttccatcttgctcagtttgccctcttctttgagcgctactttacaaaccgcgtccgactcgaaatatttatcgagtttggaaatctttttttccaccagatctttgagtttgtcgccgacggtaaaactttttgccgtaatttcgatgcgcatagtgattcctccttacgcttgtttatttcacgggctgaaacacgaacgcgccgtcctttacgtctacgttcactttctgccccgtggataccttgttcaataagatctcttcgctcagcgcgtcctcgatgcgccgctgtataacgcgttttaacggacgagcgccgtacacttcgtcgtagccctcgtctaaaagtttctgtttggcggcgtcgctgacgttcagttcgatgtcgcggtttttgaggcgctttgacagcgtttccaaaaacaggtcgcacacctttgcgccgtcttcgcgcgtcagtttatggaaaataatgatctcgtccacgcggtttaaaaattcgggtttgaactgcgctttcagttcctcggtgatattgtccttcatcttgtcgtactcggcgtcttccgcgggggtattgaacccgaggcgggaaatgctcttcaccttgcccgcgcccacgttcgaggtcatgatcacgaccgtatttttaaaactgatcacgcgccccttgctatcggtcagacggccgtcgtcgaggatctgcaacaggatattgaatacgtcgggatgcgccttctcgatctcgtcgaagagcaccacgctgtacggtttgcggcgtatcttttcggtgagttggccgcccgattcgtcaaatcccacgtatccggggggcgcgccgatgatcttgctcacggcgtgcttttccatgaattcgctcatatccaggcggatcatcagtttatcgtcgccgaacatcgcctgcgcgagcgcctttgaaagttcggtcttgcccacgcccgtgggccccacgaaaatgaacgagccgatcggtttgttggggtctttcagccccgcgcgcgcgcggcggatggctttcgccacggcggaaaccgcctcgtcctgcccgatgacgcgcttatgcaattcttcttcaaggtgcagaagtttttcgctttcctcctgcgtgagtttcaaaacggggatccccgtccaactgctcacgatctttgcgacctcgtccgagccgatagacgccatattttcgttggggcggctcttccagtcggcctgtatcttgtcgatctcggcgcggatcgctttgatctgatccatgatctcctgcgccttgccgtattcgtcgcgccgcaccgccttgttcttttcggcgttcagacgctcgatctccgcctctttttccttgactcccttcggtccgttgtaactgtccagccgcgcgcgggacgccgcctcgtcgatgaggtcgatggccttgtcgggaaggaaacggtctgtgatatagcggtcggaaaggctcgccgcagccacgatcgcctcgtcggtgatggtcactttatggtgcgcctcgtacttatctcgcagcccgcgcagaatttcgatggtttcgggcacgctgggctgctccacgttgacgggcgtaaagcggcgttccagggcgggatccttttcgatatattttctgtattcgtcgatggtggtcgcgccgatggtctgcaactccccgcgtgccagcatgggctttaaaatgttcgccgcgtccatgctgttgtccgcgctcgcgcccgcgcccacgatgttgtgaatttcgtcgatgaataaaatgacgttgccgctcttttgcacctgttcgatggtttctttgagccgctcttcgaaatcgccgcggtatttcgcgcctgccagcatgccgggaaggtcgagcgcgtacacgatcttgtcgcgcaaaagatcgggcacgtcgccgtgaacgatcgcctgcgcaagcccctccacgactgcgctcttgcccacgccgggttcgccgatcagcacgggattgtttttggtgcggcgggataagacctgaatgatctt

SEQ ID NO: 3035 - DNA, 32733 bp, Unknown
  16S sequences of unknown bacteria
gccccagcgcccggaagtggttctctcatggacagcgataccgagatcggcggcaaggctcgtgacgtctccggacaggaaagacgcgaggtcgagtatatgaaccccgaggtcgccggaaacgccgtatctcgcgtcgcgtccgatgaagcgccagtcgagcccgcggtccttgatgaacgcgctggatttgaagtactgagcgtagaaggttatgacgttgccgatagccccctcgtcaacgaggtgcttcgcgtatctgacggcggggaggaagcggtaggagaagcagaccatcgacttgatgttcttcgccttcgccttttcgagaagccttacagtctcgtcgtagctgattccgagcggcttttcacagcagaatggctttccggcgtcaacggcggcttctgccatcggtacgtggagatagttcggcgtgcagatatccaccgcgtcaacctccgggcagtttatgaggtcgtggtagtctttgaatctgcgctcttcggggacgttgtatctctcgccggcgcttttcaggcgtccttcgtctatgtcgcagagcgcccatatgacggcgccttttgagctgttgagctccggcagatgctttccggagatacctccgcagccgatgagacctattctgatattgttcatttcgtgataacttcctttcgataagctttgccgcgcagagaaaaattttccgcgcgaatttcatcataactattgtaatacttttcgttttgagttacaatgtatatggcggcaaaattcagtgtacgtttcaacattttttaccgaaaatcattttctgattggagtgataccatgcgaggcgatttatcacgcatctcgcactttgacataaacgccgaggacataagcgccgggcggctcatctggaagcgcggctcggtcgaccgcttcaccgggaagggacggtcgagaaatcttctgtatctgatgctgtccggttcgagaaattactacataaacggaaaattcgagttctcattgcacgacggcgacctgatattcatcccgtccggagcctgctacagctcgaaggtagaggaatgcgacacggcggaggggatctatgtcgacttcaacctgaccctcggcggaaagccattttatctcgacgagtctttcaggcgcttcaccgcggatcgtgtacagaaggaaagattcatgcgtctcgccgagtcaagcggcgtccgtctgctcgctaaggcggagcttctgtatatcctttccgacatttcggcgaaggaggagaatctgcggttcgagggcggtgagttcagccggataaggaaggcggcgcttggaatagagcgtcatccggagcgtcaggttgacgtcggggctctcgcgcgggagtgctgtctttccgagacggggttccgcgagcttttcaggcgatacactggcgggctcgcgccggttgagtaccggaacaggctgcggcttgagagggcggacgagcttctgttatccggaacgctgagcgtcgcggagatagcgtcgcttctcggtttctatgacacggcgcacttctaccgcacatacaagcgcgtgcgcgggaggacgccgaagcagataggcgacccggaggacggcaggagtggtgagacggtgcttttcgtgaacgagaacggtctgcatgtgagcggggatgcggaggacgatgaatcccgggaatgaacagtcagtatgatattttctctatgccgcagtccggtttgtccgaaagttcccatgtcgcgatcttcaacagcttcatggaaaattcttcatcgatatcgttcgtggagcatatgaactcgtgcgagatggttccgagcagcattttttcgcggttccagaagcacatatccttaaataaagcggcgtgcttgtttatcttccatagcggcttgtagcttttccacttggcggtatccttcagaaatatatcgctgtagcaatcgagaaggattttctttgtctcactgtccgcgggatagataaactgggacatactgccgttcagccgcgggtatccgtaccacttgtcggctttgatttgcttcacaagatgtggttccagcatcaactctgtcacggatttgtactcttcatatccgctcaggtttatctttgaaaaagagaccgcgtcggaatatccaaagcatatatcaagaaagacctcaaaatttctgtctcttatccctccggataggtctctgtcggctctcaggctcagcaccggcatatcagcttacgtccttccgaaaataatatcagcgaacagcatcttgacatatgagaaatattccctgaccatactcgagtagtgctgcgcgaagttggcggatggcgcggcgcatagctccatcggaagtccgtagagccttgagagcgtctcgatcctcgggagatggaacgcggtcgacacgccgattatgcgggcgtctgacagtccgagtttgtcgagaagttctttcgtataacggatgttttcacttgttgtgtgtgaatccggctcgactatcaatcgatccggcgatatcccgttttcctcgagccacgcgcgcatcgcttccgcctccgggacagtctcgttgtcgccctgtcctccactcacaacgcagagggcgtccggcatcgcgcctagcagctttttcgcctcctcgagccgcagcctcagtgacttgctcgggttatagccgtaggtgcggcagccgaagaccactatcacggtctccctgtcgtcgggcgttgatgagacctcgaccgcgtagtcgtccgcgttcttcgaggcgtcgagcccgatatagacccagaacgcgacgagcgacgcgagaaatatcccgaccagcaccgtgagagtgaccgtgagaggtctgaacgcccgtctgagctttatttcaagcttcttcctgaaaacaaccggcagaacgcaggcggcgattaccacgagcgaaaaaagcgtcagagacggcatcgagaacccggcggtgcaaatatatatagcgaaatagagagcggtcagcgacgcggcaatacacgcagagccaatgagcgggtcgaggcggtttctttctctttcgggcttattagtttcgtttttcctgtttttcatcatattccttcagaagcctgtcgaggtaaggttcgactccgagagcggcggtcacacgctcgtattcggcgagcgcggcttcacacacctgtgtgccggtctttcctctgacggctcttatcatgagattctttggtgtctcgtccgggtcgatcagttcgagtgtcgtcactgtgtatccgcgtgactcgagacgtttcgccctcagcgagtcggtcgccgcgtcgcagaatttctggcgcgggagtgggcagtcgagaatgaacgcgagctcgtctctcattggagccggagctttcggaggcttcgcgagctgctttgacatttcgtggtgacagcagggcgtcgagaggatgacgccggtcttccagcgtatcgcgttgtacagaacgatatccgtcgcgatgtcgcaggcgtgaagcgagatcaccatgtcgggacgaaggggaggctcgaactcgtttatgttgccggagacaaatctgagcccggtgaagccctgacgctttgccaccgaattgcagtaatctatgacgtccttcttcaggtcgacgccgcacatatcaacctctctggcgcgtatcgccgtgaaataataatacacagcgaaagtgaggtagctcttgccgcagcagaggtcgtagatgacgatcggtctgtcggtcgggaggctgtcttcaatatcgcggatgatctcgagaaaccggtttatctggcggaacttcgcctgtttcttgtcgtgtatgcggccgtttttgtcggcgagccctaggtcggtcagaaagccggcgtgttcggacgggtcgattatatagttcttcgccttgtcgtgaccggacagctccgcggtctcggcgtcctgcgccagcttgccggctatatgaaccccgccggactttgagcggcgtatttcgatatctccggcggtcgtgaatatgttcacctgcctgaactcgttattcgccatcttcgcgagagtttccgcggaatcgtaggggaggttgtctctgagagccttgttgtcgctcgcgtatctctcggcgcgcagggcgggggcgccgtcggggcgtttgtatggtgtgacgaccgtcttcacggtcgcgcggtcctccggctttgagaagaccgctttcttcagtatctttcttgtgaggatctcttcaaagagctccatgacctgttccaatgtcggtttcacctttcgtaaataatagtttatctgatctttcagatggttgtccatcccgagagaatatctttgtcgatagcctcgaaatcgcttgtgtgcggatattccgccatgtccgggtgatgtctgaacgcgtcggcggcgttctccgcgttcagtgatattgcggcgagcatacagccgctcccgcgtattccggcgatgttttcgtccgaaaaatcccctgtgtatacgaagcattttgacgggtaatctttaacgccggacagtttctcctttgtgaagttggctttcgtgtcaatgaatttcgcgtccgggtcaatcgagagaatcaggtcgattgcggcttttccggagccgttcgtcgcgtagacggttcttccgcgcataccggagcctgccaccatacgggcaacgtcctcagcgtgcgtgattccttccttcaggtcgatattgatgcacattccggtgaaataggtgaggttcagaacctcaaggagcgtcggcacgcggttttccggaccgccgttctttatcagtctgagctttgctatatctgagtaatccgtctctgatatgacatactccaccggctcgccgttctcgtcgaagccctttacggacgggtcgtgattcactataatgacgccgtcccttgttgtgcgctcgtcggtttcgatcatgtccgcgccctttttcgcggcgagcatatacgcggcgagggtgtttgagtggattccttcggtaacaaatccctgatgggcggaggatatccatgttttcgacagctttttcatttgcgttcctcttttgttgaagtcggttacaggatcaagtctattatatcataccgtgcggcgcacataaaatgctttttgtaaatttttctcggaaagcggtgacatgtttacaatttgtgggtttactttttacgcgggatgctatataattttctgtaacagtctttattgccgcccgccggttcgctgacggctgtttcattcatgatatcatgatatcacttttgaaaggttgggtttcggaatgacccttaaaggatttctgagggcggcgctgagggcttttctcgcgttcgccatatatttcggctggcagataatcgtcgtcaactgggcgtatatcgcggcgacatttgtcgtcatgccgggcatagacccgtcggtgctgaccggtgcggactatgactcgatgctgatcgagttccagaacaaggcggctgagatcgtcatgaactactcgatgcacctgacgcttgtatcgggcgttctcgccgcgctgaccttcatcataatcgcgaaggcgagacgcagaaagttccttgacgacctcggcgtgaaaaagctcccggcgaacctgatacctgtgctgatacttctcggcgcgtcgctcaatattttcgtgtctctcgcgctgaacctcataccgttcccgcaggagtggattgattcgtataccgagagcgcttcacagctgtcaaacggcggactcattgtttcgacgatagtcacagtaatcaccgcgccgatagtcgaggagatgaccttccgcgggtatatgtacaagggactgaagaccggaatgcctatgttcgcggcgatgctcatttcatcctgggtgttcggacttgtgcacggtgaggttatatgggtgatctacgcgtcgctgctcggtctggtgttcacttggacgaccgagaaatgcgggtcgctgctcgcctcgatgattgtgcatatgacgttcaacctgttcggagtgctcacccagtatgtaggagagatgagcgagtgggcgttctggcttctgctcgtgtcgagcgccatcgcggctctggcggcggtggtattcataaaccgctcgtccgacagaaagatagagttttcgatgaagccggcggaaaataccgacggacaggaataaaacaagctcggctgaaaagccggaaaggaattcatttatggacaagcacactctgtacctcgatttcccagcggagcgctgggagagcgcgtcgccggtcggaaacggatataccggcgcgatgatcttcggcggcgtcatgaccgatcgcatccagctgaccgaagagaaaatctggtcgtcaaagaagcacgcgggcgctccgaaggattttaaggacaagataaagcgccttcaggagctccttctcgaaaacaaaccgggtgaggctgatgagttcgcggcggacgcactgaaggactctttcgagaaaatctgctcgcaggaaacagcgggggatctttatatcgattttgacggctctgacagtgacgtgactgactaccgccgcgagcttgaccttctgcacggcgtttcgcgcgtgtcattcacgaaggacggggaaaagattgtccgcgagaccttcgcgtcgtatcctgaccgcgtgatagtctcgaaacacaccggatgtcattccgctgctgtcagatactcgaggcgcgacattcatccgacacacagatatgacggcgatcgctgtatgatagacaccgaggcgggagagcttgtcggtgttgaaagcctgacgataaacggaaatgttatgaccgtgaaagcgcacccggcgaccggaggtcatccgttcacggtgaagataagcgtgacgaccgacggaaagctcacgagcgacgggaagtcgttcagaatagagaacgcgtccgcgaccgaataccgcatagccatccagaccggcggcgaacccgtcatcccggacgatgactacgagacgctgaaaaagcgctcaggggacgatttcgcgtcgcagatggggaagagcgacataaccttcgacgacacgtttgccgatatgcccgcgaacaagagactcgagcgcctgagaaatgatccggacgcgcgcgacgccgggcttaccgcgctctatttcaggttcggaaagtatcttctcgtcgcgtcgagccgaccgggatctcttccggcgcatcttcagggcgtctggaacaactacacggccgctccctggaacgcggactatcacacgaacatcaatctccagatgaactactggcacgcggagaccgcgaacctctccgactgcgcgcttccgctcttcaattacatgaacgagtatctgcttgccagcggaaggaagacggcggaggattactacggctgccgcggcacggttctgcatcatgtgtcggatatatacggtttcacggcgcccgcggacggtatctggggactgtggccgctcggcggagcatggctctgctactcgatgtgggagcactggctcttcacccgcgacgagaaattccttaagaacaccgcttatgattacatacacgagtcggcgaggttcttccttgactatatgttcgagagggacggcgtaatgctgtcgggaccgtcgacctcgccggagaaccattatctgtctccggacgggaaggtgtgcagtctctgcctgtcgccgtcgatggatatcgaggttatcggcgggcttctgagattctatgccgagacggaggacattctcggtctcgacgctaagaccgcgaaagaggcaaaggacgccatatcgaagctcccgccgctgaaggtcggaaagcacggacagctcatggaatggctcgaggactacgacgagccggagcccgggcacagacacatctcgcatctcttcgcgctctatccggacaacgcgataaacccgtcgacaccggagctctacgcggcggcgaagaagacaattgagcgccgtctcgccaacggcggcggacacaccggctggtcctgcgcgtggctgaccgctctctacgcgagactgcacgacgccgtgggagtcgacagtacgctcgaaaagctgttcactaagtcgacgctcgcgaatatgttcgacacgcacccgccgttccagatcgacggcaacttcggcgcgtccgcggcgatagtcgaggctcttgtgcagtcaagaccggaaggcgacacggtaatcatagagcttctgcccgcctgcccgtatccggacggagcgttcagaggactcagggtccgcggcggtgctgaggtttcggctgagtggaaggacggaagagtagtgtcttgcaaggtcagcgctgacagaaagtttgccgggaagataaccgcgaacgggaaagagtgtgaaataaaactcagttcaggtgaaacggcagaaattatctgaaacataatcaaagcaggggatgccgcttaaagcgcatcccctttagctgtttatgaagttttttcagtcctcatcctcaatcgaagtctttgccgataccgtcaccggctgctcgtagcagtcgaagataccgtccacgtcgatcttcggcttcggcgtgaagagactgactatcgggacgagtatcagtccgaggaccatcgcgatcgctccggcgtttatcggcgacgctatgaacttaaggaacatattcgagacggtgagcccgactccgactatgaagctcgtccagaccgccgcgcgcgtcacacgcttcatgtacagcccgtagaggaacggagcgaggaacgcgcccgcgagagcgccccaggaaattcccatcagctgcgcgataaaagcgttcgccgagtagtactgcattatcgcgatgacagccgagacgacgatgaagaacgcgacgagtatacgtatcacgagaatttgcttcttctcgtccatcttcttcacgatattgcccttgatgaggtcgagcgtgagagtggagctcgaggtcaggacaagactcgagagggtagacattgaagccgacagcacgagcactatgacaatgccgataagcacgtccggaagggtattgagcatcgaagggattatcgagtcatacatcggagcgccgttcgcgccgtactcgatatccgccgagaagagcctgccgaagccgccgaggaaatagcttccgcccgcgactatgaacgcgaagaacgtcgagattatcgcgccctttttgatatcgttctcggactttatcgcgtagaacttctgaaccatctgcggaagcccccacgttccgagcgaggtcaggatgacgacgccgagcagccccagcgcgtccggtccgaagaacgaggcgtacgccccctgcatggtcgccgcgatgccggtcccctcagacggaacctgagagagggaagcgagcgcctgagtgaacccgcccttgccgctgagaacggcgccgatgacggcgcagatgccgacgagcatgatgataccctgaatgaagtcattgacagccgacgccgtgtagccgccgagaatgacatacacagcggtcagaacagccatcgcgagcacacaccacgtatagctgatatttccgaaagccatgccgaacagccttgagagaccattgtataccgacgcggtgtagggaatgaggaacacgaacgtaatgatcgacgctgcgatcttgagcggtttcgagccgaagcgcttctcgaagaactccggcatggtgcgcgcctcaagcctgtgagtcattatacgtgtgcggcgtccgaggacgacccacgcgagcagacttccgataagagcgtttccgattccgatccacgttgaggcgacgccgtatttccagccgaactgcccggcgtagccgacgaatatgaccgccgagaaataggacgttccgtaagcgaaagccgtgagccacggtccgaccgagcgcccgccgagcacgaacccgctgacgctgaccgccttcttccggcaccagacgccgacgccgaccgtcatcgcgatgaagacgatgatcatcagaattttgacaaacatgatattacttcctttcaggtgtgaaagggcaataaaaaaccgcccttccgtaatagaattacagaggacgaataaaaatcgtgttaccacctcagttcgcctgcctctcacggggcagacctcggaaagtaccggaaagagcttttcgcgcgaaagatatcctgatactcggcgccttttaacggcggcgtcccggcgcggcttaatgggagagaggcggatgagcgtctgtccgttcgcggcgcggctctcgggatgtaatcctgtttctcgataatccgcgcctctcaccgaccggcagctctctgtggtatcgacgaaaccgatccggatatctccggttcccggtcacagcctttagtttgttatattataccatcccggaaagaatttgtcaaggtcttttccgaaatttcccgcgttttttttaaaaaaaagagagaccgccgctttcgcggcagcctctcactgaaattcggcgtcagaactgctcctcgcagacatcctcgaggcagtacttcgatcttacgaagttctctctgcggatccatttaccgttggtgaagtccgggatcgcgaccggcatcgagccgcaggcgatcgagttctctgagagcggagttatagccatccaggcggcggtgtcatacacgtcgatcggggtctgggtctgattgagaaccgcctcgacaaagccgcgcatgacgaggtagtccatgccgccgtgcccgccgacagcctcgtagccgcgccagaggggatggagatattcgccgtagtagttgtcgagatttgtataacggtgctcccatgacggaccgtcaacagttccgtcaatgagtacgccgtgggtgtcctcgaaccagatgcccttcgtgccctgaaccatgtttccgcgggagtaggggcgcgggagggtcgtgtcgtgcgtgaggacgatggtctcgccgtgcgcgcacttgatgcaggtggtgacgacgtcgccctcagcgaagtgatagttcgcgttctcgaaatccgcgccgcggttcttgtttatccatgtgttcagaccgaccgacttagacgccattgcggtgagcatgaccatgcggttgccgcggttgatgtcgaggtatttcgcgatcggaccgagctcgtgtgtcgggtagagctctccgcagcggttcttgtagttgcgcaggcggtagtggcggttctcgtttccgagagaaacctcgtcgcggagatcgtgacggtagccgccctcacagtggacaagctcaccgaagacgcccttcttgatcatgttgaggattgtcatctcttctttgccgtagcagcagttctcgagcatcatgcacggaaccttcgtgcgctcataggtgcggacgagctcccagcactgctcaatcgaataagcgccgccgacctcggtcgcgacgtacttgcccgcgagcatcgagtcgatgcagatgtcgacatgggactcccacgcggagggggtgattatcgcgtcgatttccttcatctcgaggagtctgtggtaatctgtgacagcgattggcgacttgccgcgcttgtcctctacgagctttcttccgttttcagtcctgtcctcgtattcgtcgcatactccgacgatctcgacgtcgggcatggtgtcgagcaccatcccgagaagtccgtatccgcgtccgccgagtcccacccagcctacatttatcttttccatgacagtatacctttctgttaatccgtatttcacgccgcgccgcgaaggcaccggcggcagagatgtattacatatctatgataacacatcccgccgcttttgtcgagggctttttgtaaaaaaacgaaaaaatccaaaaagacgcgaatttaatccaccgacgtgtcagctttttcgagatgatacgtgccggtattgtagtcggtaaccatgacgcttccgtcctcgtaatatgtccttgcgacgccgtccgagaactcgtgacgctcgattgtctgtgcctgcaaacaggcgtatggcgcgaactcacggtacatcccgccgagaagctccgccgtgtgtgcggtgtctttctcatcattgcaggtgaggtcatcgttgcccatccagttcgagccggacgactggaacttcgagtagatataagcggtaggtcttccgccgcgctctatgacctcgagctggtggcggcgcgacttgatcggcgagttgacggtcgacgtgtaggggttcgacagggttatgccgtgatagacgatctgccagatcggcaccggacgagtgaagagcggcggcaattttccgctgtcagtgtcatagaagctgatatacagcccgtaatcgagatacggctgggtgtgatcatacccgcccacgcgaagccgccgaacagcccgtgagcatattccgccgtctcgcggaacacgtcggcacagcgccgcctcgtctccgggtgatccttgtcatagcacggctgagccgcgattgtgcttatgacgtcgatatagtgaagtcccctgaagccgagcgcggctaccctcgggagctccttcttcgcgatctcaagtcccttttccgggcagacccatctcggtcttccgccgccccagcaccatgagtggcaggcgatcgtaccgtcgcggttctttctcgtgatctccgggctgtagttgtccgcgatggagtagctgtcggtcgtgttcgtgtggcagcagatgttgtagccgatctctttcgcgtgggagatgagcgcgcggagtctctcctcgccgccgagcttcggctcgaccgggaagatctgcggccagcgtccgtcgtgaccggatatgttccatccgacaaggcatatctcggctttttcgacgccggaagccttcatccggtcaatgaaatcagagacctgatcaaaagtcatcgcgacgtgcagcggcggctcgttctcgtctgtctgctcctcgaccggcgacggtacgggcttccacgcgaggcgtatgcgcacataaagagattctccggcgtatttcagtatttcgttttcccgctcgcgtatcagcctgcatccgcgctcgctcatcatgtattcacggtaaactctcgccgcgcccgaatagtcggcgtcctctccggagagcctgtagagccgcacggatatctcctcgtaaggctttccgtcctcgaggtaaaagcgcggatacatatggtatttcccgctcgttctgccgatgatcaggtggtagtcacaggtgtacccggtgacaatggcgcaccagccctctttgtttcttatgaacccgtacatcgccatctggaacgcagacgcgtcggtttcggcgtcctcgccttcggtgaaggcgcagatatgatcgtccggcgagttcgagccgcgcggtatgatgtagtaaccgctgtcgcccgcctccgcgtccgcgaggttataggcgaggtctatgtacttcatgttgtccatatcgccggtctcgggctttatcgtgatgtattttccgttgtcagtgacgctcaccgggatgtcggtgattcttccgtcgttcagcgccgctcttgcttttatatccatttgaattgtcctctttcacgtcggtaaaaaattccggctttttttcagaatacgcttgtattatatcacagaatatgctataatgtaaatagaaaaaagcaaacgacgatttagaaaaacaaaacttttcacgggagccttgataacttgaacatcagagacatacgccctttcatccgattcgcggagagactgcggctttcctcctcgccgttcttcacgaagtgccgtgacaggaggcttgtttacgtcgtgtccgggagcttcacgttctttttcggcgacaggcaggcgattgttccggcggggagcgttctgtacttcgttccgggcgtcagataccgcttcatggtctcggagaagccggaagtgttcatactcaactttgacctgaccgactggtatcggaacctcacagagccgcttcatgtgctgccggagagtgagttccgggacgacatgatacttccggagccggagccggatgagcttgtgaccgataacggtatgctgctgctgaggggaatggggcgtatcgggaacgatctctcgctcatcgcccgtgagatggatgagcgcaagctgtatttccgcgagacgatgtccgccgttatgtcgcgtgtgatatgcgagatggcgcgcgccgtactgtccgacggaaacacggacacggtcgcgagaacgatagatttcatacgcgagaacttcgcgagaccgataaccaaccgcgacatcgcgtcgaacgtcaactaccacgagttttatgtgaacaagctgataaagcgccagacggggatgacccttcaccgctacctgaccgcgatacgcgtgcaggaggcgaagaggctgctcacctcgacttccgagcctgtgtcgaagatcgcggcgtcctgcggattcgcgtcggacgcgtacttcatatccgcgttcggaaaagaggtcggcataacgccgagcgaatacagacgtctccacggcgggctcatatgacgcggaacaacaataacagagaaaggaagctccaagcggagtaaaggaaacataaaatgatcaaacagcgtctgctctcgagaataaactggaaaagagtcaccgagcgccgttacacgtccggcgtcatatatccctcgcccgatatcttcggcgggtgccgcgccgcttacggcgttctgcgcattgacgggatatcagagcctttgagcgtccgaataggcgacgcgaccgtgacgacggcggacaagggcttcacgtggataggggtgatcccggaaaggaagaacttcgccctgaccgccatgttcgatgatcacggaaagatgctccagtactacttcgatataacgcttgagaatcaccttgacgcggaggacccgtactttgaggacctgtttctcgacgtctcggtggctccggacggcggcgtttaccttctcgaccgcgacgagctcgacgcggcgctggggaaagacgaaataacgatggagcagtacaccacggcgctgaagaccgcgggggaaatactgatgcgcctcaccggaaagaagctgccgtcaagacgctgtcactacataaagatcggagacgcgcttgagacgcaactcgacgcgatagccggaactctcgcgccgctccttgccctcatcggtgaaaagaacgcgtgagaatttacaaatatgacgcattccgcgcttgacaaaaacgcggttatatgttataattaaacggtaaacagtgaagtcaatccgcagatgctgcgcacgcgcaggatttgcggaatgtttttgtgtcaagggaaacactgattaaggttgttcccgaaaaaaaagcccataaattcaagacgtttttccgcgaaagcctgatttgttcagcgttttccatcaaaaaaataaggaagagatcaaatgaaatatgatgtcgtaatagtcggcgccggtcccgccggtatattcaccgccctcgagcttctcagaaagaacgccgggaagaagattatcatcctcgaaaagggtctccctgtcgagaaacgccgctgtccgaagcagaagaccaagcagtgcgtacagtgcaagccgtactgccacataaccacaggtttctccggcgcgggcgcgttctcggacggaaagctctcgctctcatatgaggtcggcggcgagctcccggagctcatcggctggcagagagcgcaggatctcataaactacaccgactccatctatctcgagttcggcgcggacgagcacattgagggcgtctcgaacgacccgttcatcaaagagatacgcaagcgcgcgatacaggctggtctcagactcgtcgactgtcccatccgccacctcggcaccgagaaagcacaacatatctactactcgatacaggaatatctcatcgcgaacggcgtcgaaatactcttcagcatgaactgcaccgacctcatcgtcgaaaacgaagtctgcaccggcgtccgcgcggtcgacacccacggcggcgagcacgaattcctcggcaccgacatagttgtggcgaccggacgccgcggcgccgactggctcgagaaaatctgcgtcgagcacgccgtcgagcacaagcccggcaccgtcgacataggcgtcagagtcgaggtcagaaacgaaatcatcgaagacgtaaacaaagtcctctatgaatccaaactcatcggctatccgaagcccttcaagaacaaggtgcgcaccttctgccagaaccccggcggcttcgtcagtcaggaaaactacgacaacaacctcgcggtcgtcaacggtcactcctacaaggacataaaatcaacaaacaccaacctcgcgatcctctgctcccacaatttcaaccagccgttcaaccagcccatagcctacgcccagaaagtcggcgaactcacgaatatgctcggagccggtcacatcctggttcagcgcttcggcgacatcttagacggcaaacgcacctggcagaaagaactcgcccagtcaaacgtcaaacccaccctccccgacgcaatagcaggcgacataaccgccgccatgccctaccgcgcaatgaccaacatcatcaacttcatcaaagcggtagacatagtagtccccggcttcgccagcaccgaaacactcctctactcccccgaactcaaattctactcaaacagagtaaaaatggacgaaaacctcgaaacctccctcccaggtctccactgcctcggcgactcaagcggatggacccgcggtctcatgatggcttccgtcatgggcgttctgatgggaagacgcatcgcagggataaacgactgaaccttaaagcagggggaggaagaccgctttgaaaagcggtcctcctccccctgcaccccctcttctccgtaaacttttcataagctaacgcacaaaaatttgtgagaaataccattgtcaaagcggctccgatatgatataatattatattataataaatataaggaagatcaccatgcttaccataaaaaaacacgtcgcggaacgcctgcacgacaagtacgcgtctctcgtgaccgaacccgcgctctcatgcgacgacttcgcgggcttcctcgaatacccgccggacgacaagctcggcgacctcgccttcccctgcttccgcctctcaaaggaactccgcaaggcaccgccggtgatcgcgtcgaccctcgccgaaggtctctcggacgaaataatcggtgaagccaccgtcgccggtggatatctcaacataaagataaaccccgcctactacgcaaagctcatcccccaaatcctcggaaaaggcgaaaaatacggttccttcgactttggcaatggcaaaaccgtagtcctcgactactcctccccgaacgtcgcgaagcccttccacatcggacacctcggcaccaccgtcataggtcactcactcaagatgctccacgaattcgccggatacaaatgtatcggcgtcaaccacctcggcgactggggcacacagttcggtaagatgatcgtcgcctacaaaaaatggggcgacagggaagccgtcgaaaaaggacagtgcgacgaactcgtagccctctacgtcaaattccacgaagaagccgaaaagcaccccgaactcgaggacgaagcgcgccacgagttcacgaagctcgagcaccacgacgaggagaacatgaagctctggcagtggttcatcgatatcagccttaaagaataccagaagacctacgaccagctcggcatcacctttgacagctataagggcgagagcttctactatgacaaggttccggcggtcgtcgaggagctccgcgaaaaggggcttttgaagatggacgacggcgcggctatagtcgacctcgagaaatacggtatgccgccctgcctgatactcaagaacgacggctcgtcgatctacccgtcgcgcgacatcgccgcggcagagtacaggaagaagacctatgattttgacaagtgcatctatgtgacatcagccggtcagagtctgcacttcagacagtggttcaaggtcgtcgagctgatgggctacgactgggcgaaggatcttgtccacgttccctacggcaccgtctcgataaacggctcaaagctctcgacgagagccggaaacgtcgttgtcctcaaggagctctttgccgagtcgatagagaaggtcagcgagatcatgaccgagaagaacccggatattgagaacaaggatcagatcgccgaggcggtcggcgtcggcgctattgtattctactatctgtcgaacagccgcataaaggacataaacttcgtccttgaggacgcgctcaatttcgacggaaacacgggtccctacgctcagtacacctacgcgcgcacctgctcgataatctcgaaagccggcggagttcccgatgtcacccttgacgcgtcgtccttcactgacgcgtccgagatagagctcgcgaagacgctctcgatcttcccggagaaggtgctcgcggctatcgctgactatgagccgagcgtcatcacgagatatatcctcgacgtctgcgcggcgttcaaccacttctatcatgaatgccagatcgtgacggctcccgacccgaaggtccgtgacctcagagtcgcgctcactgccgcggtgaagaacgttctcggcgcggctttcggtctcatctgcatgaagaagaccgagaaaatttgaattatgaatttctgaaaggtttggtaataaagatgtccggacacagtaaatggaaaaatataatgcacaagaaggagaagaccgacgcgcagcgcgcgaagatcttcaccaagataggcaaggagatggctgtcgccgtcaaggagggcggacctgacccggtcgcgaactccaagctcgccgccctcatcgcgaaggctaaggcgaacaacgtcccgaacgacaacatagaccgcataatcaagaaggcgtcctccgcggacagcgctgattacgaggagattgtatacgagggctacggtccctgcggcgtcgcggtcatagtcgagaccacgaccgacaaccgcaacagaaccgcgtccgatgtcagacactacttcgacaagttcggcggaaacctcggaacgaccggatgcgtcagcttcatgttcaccgagaagggcgtcatagtcgtcgaggacgaggacggcaaggtcgacgaggacaagctgatggaggacgctctcgaggctggcgcggctgacttctccggtgaggacggagtctacgagatcacgacagagccggacgaccttgaggctgtacgcgaggctctcgaggctaagggatacccgatcgcgtccgccgacaccgacaagatcccgtcttcctacatctcgctctctgatgaggacgatatcaagcatatgtcgctgcttctcgagaatctcgaggacaatgacgacgtcatcgaggtctaccacaactgggagaatatgcccgaggactgatcagggtacaattctgagcgataaaaatacagcgcccgcgggacaacagcttccgcgggcgctctttcgcgaataattttggaggaactgcaatgataatcagaaaagccacaatgaacgaccttgacgcgataagcgaggtcgagtcggaatgcttcccggcggcggaagccgcgactaaagaggaattcagagagagacttgaaagctatgccgatcattttctcctgatgttcgacggtgaaaagctcgccgccttcatagacggtttcgtgaccgacgagcccgatctcaccgaccagatgtatgaaaacgccgcgatgcacagtgagagcggaaaatggcagatgatcttcggcgtaaacacgctcccggaatacagacgccgcgggctcgccggagctctgataaatgagatgatagcggaggcgaggcgtcaggggcgcgacggtctcgtcctcacctgcaaggacaggcttgtccactactacgcgaagttcggcttcctgaacgagggcgtcagcggaaaatcaacgcacggcggggcggtgtggaatcagatgcgcctgaccttccggggctgaaacctcttatttcctgacaataatcaatataatcttgtcatgacgcgcgaaactgttgacaggacgctctcctgtgtgctataattcattgagggcagatatgcccactctcactctgaaagggacatatatgaaaagaaacatattgaacatagtcaacttcctgcgcggcacagagccgaggacagacacggacatacacaagccgtttctcgagcagctgcgcctgatgaaggaaaacaatctccgcggaaccttccttctccagttcgacgcgctcaccgacccgttctataccgatattctgaaggagctgccgccggagcagttcgagatcggcgtgtggtttgaggttgtcgagtcgctctgcgcgccgttcggcgtcgagtggaaggggcgctggtcgtgggactactggtcagaattctcgttcaccggcgcttacacattcgatgtgcgcgagaagatggcggacaagctgttccatgattttaaggaggtcttcggctactatccgcgctctctcggcgcgtggtgcctcgacgcgcactcgatcgactatatctcgaagaattacgacgtcgacgcctactgcaactgcaaggatcagttcggcaccgacggctatacccttatcggcggctactacggtcaggcgtactacccgagccggaacaatatgcactgtccggcgtcctcagatgagacgcggatcggcacgccggtcttcaggatgctcggaagcgatccgatatatcagtatgactggggaatgagcataaacgacggcgcggataaggtgcagtcggtcgtctcgctcgagcctgtttacaacggcgcgggcggaggtgttccgtcatgggtcgactggtatatgaaggagaatttcaacggaaagtgcctctccttctcctacgcacaagcgggccaggagaacagcttcggctggaattcgatgaaggacggtctcgggtatcagttcccgctcttctcgcgtctctcaaaagaaggtaagatcgagctgatgacactctccgaggcgggaagatacttccgctcgacatataatgacaccccggcgtcgaccatcgtctgtgacagcgactggaaggacggagaggatcacaaaacggtctggtactgctcgaagaactaccgcataaaccttctttcggatcacgggaagttccgcgtccgcgatgtatatctcttcgacgaccgctatcacgagcgttatctgaccgagctctgcacgacgcatgatatgtacctcgacaatcttccggtaatggatggcaacatttataccggttccgggatcctcgcgggtatattcccggtgaaggacggcagggaagtcacgttcaccgatatgaagtacgatgagctgtcgtgtgacaccgcgagagtggaatttctcgacaacggaaagctcgtcgccggtttcacgctctcgcccggtaaggtggagatcgacggcgactgtgaatgggagtaccgcacaggcgagaaaaccagactgcctgtgacactgaagggaacaagcgccgaccgcgctgattttaccttccgtgggtttgagtattcactcagggctgaatgcggacgctttgacgggagaaagattattcctcaggacgggaaaatcgttataaccaaaggctgaaaaaagggaaggtgtctcacccggagataccttccctcttttattcactcgtcagtctcaaacccgagcccccacggctcataatcgctcttttcgatcatttcataccccatccatttcccgttcttgaacgtataggtaaccagatgtgatttcacgatccggttgacgtcatggtagaactgcatcgtcaccatcatttcttcgccttctccccagacggcgaagacctctccggtgctccagacgccgccgcttttgccgtgggtgtagacgccgtcggcataaccggtgtctgagcagaactctgtcagatcgtcgcagccgaacagctcctccgcgtacttcttcatgtcgtcggcgctgaccgctccgggctcatagccgtaccgcacgagatctccgccaggaccggtgtagtcctgcgtcgtcccgccgccgtaatagtcgcagatgaacgccgccgcgccggggtatttctttcccttgccgtaaaacggggtgttccatatccgcgacgccgcgaagaaggcacgaagctccttcacctcttccgagtccgcgtactcgtccggatagtcatagtcgtactcaagcaccgctccgagcacctgatcgtcattcagcgtgtagacgtgctttccgaccgtgacggcattaacgcctgacgccgtcacgtcaacctcgagcttcatatacgggtcgtactttgccgtgttgctgaacgtaagactgaacgacgagacctttatcgagtcataacccagaatgtcgctgtctccgagaaagttcgtcagaaactcgtacgcgctgtccgagaacataccgctgtcatgcgccgactttatctcggcgagtgtcacggcggtctgttccgtcttctcgtccggcacgaaatgcagtccgtacggttcatactccgaccgctcgactatcttgtatccgagccatgttccgccctttccgaagcggtattcgacgagatgagacttcacgatgctgttgcagtcggcgaagaagcgcataccgacgagcgtgtgatccccgtccttatccgcgtacatgacctttcctttccagccgccgccgatgccgcccgcctcgacgtatttcacgccgttattgtcgcgtatcagaccttcgattccgagcgcgtctatgtcggtacagccgaacttctccttcgcgagtctggtgtattcgtcaagtgtgatactgccgtcgccgtaataattcgtcaggaaattgttcattcccggatatgtgacgccctcgccgtatgtcggcgtgttccagatgaatgttccggtgaggaaggctttcagcatcctcacctcttcgacgtcggcgaaggagttgtcggtctcctcgtccgccctgaagcagtcgacgccgtcgaccatcttccagtgatactcgccgtccggaagcgtgtcgagcgacgaatccttcaccgtgaaatcgaaagtgaaataaaggtctttccgtgtgtcggtgacggtcacggtgaacgaatggatatcgaacttgttgtaatcggctatggcgctctttcccgacagcatattgtacaggaaattatacgcgttctcggaaatccgtccggtgtcagccagaccgcgcacgccgtcaagggtcgtcacgatctgttctgttccgtcgctctccgggtagtctttctgatacgccttctcaacgcgtatctggagtattatgccttccggcgatttcatgtacgccttgctccactcatcgaaccacgcgtcgtactcggagctgtcgtcgacatccggcggcaaatctttttcatcgttcggcttcataacgactgtaagcttgtggaagtcctttatcgtcgtgagcgtgcagagacaatttatgaagtcggttcccgccttgttccagacaagccctccggcgtaatcctcgatcatatcgccgggtctcagatcatagacgctgagatcactgtcgccggacagcatcacctcggacgccagctgataatccatgagcggcgtatccatgtcccatccgtggtacacgagatacactccgggaagtttctcaatcgagtacacaggctgtccgggtccgcgctcggaatactcgagcttcaattcaccgtactgcttccgtatctccgacgcctcggccgtcagaagggcggcgagtttctgctcggttgttagctccggagcggcggtgtcgtccggagctgtcgtcgcgtcatccggggacatcgtgtcggtcgtttcattatcggtgtccgtgtctgtaatgccgtcactgtccgcgcccctgaccgccgtgcaggatattattcccgccgtcaggcagagcacgaggacgagggagatgactcccattccgcgtttcttcttcgaatcgtccatgatgttcacaaacctctctttcacagaattttttctcgggttgaagtgtgtgctgagttcgtttgatgacggccggcagttcttcaggatatcaagaagcaccctgccgtatgatcccctcgtttcacgatccatgccgcgcagaagctcctcgtcgcaggcgagctccatggcgtccgacatcctgcgcgacgcgacgcggacgagcggattgtaccagtatagtgacgaggcgaacaccccggcgagcttcagccacagatcgcgtctgcggtaatgtatcagctcgtgcgcgaggatacctaccagcgagttttccggcagatcgagctccggaagaaccaccctcggtttaatgaaaccgcagagcatcgggctccttatgtccctgtcgatatacagctccggcggattcctgacgccaagtctgacggcgagcttttcatacagtgccctctcattgtcggacgccggaacgcctgcccgcgaaacacggcgcgtattcgccgcgcagccgacaagctgggtagtcaggcagactgccgcgacaagaaatctcgccgcgatgataagccctgacacggcgtcgagcgaaccgatcgtccagccgtcgtcctgcttcatttcctccacgggttcggaaatgacgggcggcgcaacgtcaggatgtgtcgtgacacctgatgatgtatcagcggaatggtcggtcgtgtccgccggaagatcaatccttccggtcgacggaaacgcggacggaacgtatgtatcctccggcgctgtagtctccggcgtgctgtcctccgtctgtattatctcaggtacgggtatacgcacaagagacggcagaagctgaaacggcacgcagagccgcagtattaccgccgcccagacgatatacgcgcacctcgcgctgtacttccgtcccgacagccggaaaaacagcagcagaacaagtatcaccgcagacatcgatatccccgcgccggcaaatgaaagcagaagccttgtcattttttcgtcccctcgccgattatccgttcaatctccgcgatgtcgtcgtcggttatcttcccggcgtcgacgaggttcgcgatgagtccctgccactttccggcgaatatccgcgagatgaagctgtccgacgcggctgagctgtactcgtcacgcgtgacgagaggcgtcacgaccttgtacggtgtcggcgcgtctattgtccgtatactcacgaaatccttccccgcgaggcggtcgagcaggacatgcacggcggtcttcgtgcattttctcttctttgacacggcgcggtgtatctccgagactatggcggggcgtccgatgtcccagagcgccatcatgacgtcgagctccgcgtccggcagggtctccggtggctttttttccattatacatacttcctttcgtgctttccggtgtatgtgatatatacataagtttataaccatcaacatctgttaatagcatatcatatttttccggatttgtcaagacctttcgtaaataaaaaaatattttttttttcagaaatctattgcaaaatccgaaaatatgctttataatatagacgtgtattatgagttgtttgacgggcggtcgtccgtagggcgcttgtttgcactatcctaacataattacggaggattacttaaaatggctgatgaagtattaggccaatttcagcaggccgctgccgagaagaagatcgactcgtccagaaagctgaaggtaggtattatcggtacaggctggatcgctgagtctcacatccagcagtacaacgttatgcccgacgttgaggtcgtggcaatggctgacctcattcccggcaaggcagaggctttcaaggagaagtggggcgttcagggagatgttcatttctaccctgatcacaagtcgatgatcgacaacgaagagctcgacgctgtcagcgtctgcacctacaacgcaactcacgcggagtgcaccatctacgctctcgagcatggcgttaacgtccttcttgagaagccgatgtgcgttaccctcgatgaggcagctgagatcgtgaaggccgagaagaagtccggcaagatcctctccatcggtttccagccgagatatgacgctaacatgcagatgatcaagaagatcgtcgagtccggcactcttggtgagatctactacatccagaccggtggcggccgccgccgcggtatcccgaactcgactttcatcgagaagagaaccgctggtatcggcgctctcggcgatatcggatgctactccctcgacatggtgctcaacgctatcggttatccgactccgaagaccgtttcggcttactcgtcgaacttcttcggcaccagcactgagtatcagtccgagtacgacgctaagagatttgacgtcgatgatttcgcggctgctttcatccgtctcgagccgggcaagtacggcgataaggacggcatcatcctcgacttcagaatcgcttgggctatgcacgtcgacactcctggtgacaccataatcttcggtaagaaggctgctctccgcatcccgtccaccgactgctggaacggctctgtcggcggcccgatgaagatttaccacgatgtcgctggcgctcgcgttgagaccgttatcccgatcatccagaacaagggtcagggtctcttctacaagaaggtccgttccttcctcgacgccatcaagaacaacggcacttcccctgttccgtccagccagatcatcaagaatcaggctatcctcgacggtatcgtgaagtccgccgctgccggcaaggaagtcgacatcgttatgcctgaggtctgatcaggaaaataacgcttggcaaaaagagaggctttttcaagcctctcttttttgtcacaatatagttgacatatcgcgcaaactgtgatataatataaacgggcatattttgatttcaagtcgcattgactgtaagttaaaggcaggttatccatgaacagaattgatacaagtaaaaagcagtccttcgagctgtacatatcggtaattctcatggtcgttctgttggcgtctgtcatcctttctctgctgtcatatataaacaacagacgtgctcttggtcagattgattccgatgctgacgctcagatgggttcagctccggtggacggcatattcggggattttgtcatgtgtggcgattcgctgtccgaatattacggagcgggcggagatatcgtttttgatgagtcggaatacggctatactgaggacagtataacgataagcaccggcgctttcaatcagataaggctcgatgagtatggcattgttccgaagactgtttatctgggcgacgcggtcacacgcatcgaggcacgcgcgttctacgccacgaccgccgaagagatccgtctgccgcgcgggcttggctatataggcgccggcgcgtttgccgactcgccgaatctcaggcgtgtatattttgacgcgctcccgcttgcggagcttgagattgacccgcgcgccttcgagggctcggttaatgtcgaactcgtcaattttcccgaggacatagtctttggcgaaaacaatgtcatcacaagcggaggtgccgggaaatgaaacagcgtattatcagagttctgactgtaataaacctctgtctcgcggcggcggcgctcgtgctgggcgcggctgtgtacgggcagacctcagagctctcggacgatgtgggctatgatctgtatgacatgatgagttacgattacatagtcgataccggcaagcccgggctgatggtcacgaattaccgctcatacggcggcgacctcaggatacgcgagggggcgaccgcgatcggcgccggcgtgttcaacggtgtacagcttcttaatcaggaaaacccgcagattattaaaagcgcgtacctgccggacagtctgcgcgtcatcgagagcagggctttcttcgctacgcaggcggagtgggtgcgtctgccggacgacatcaaatatataggcgacctcgcgtttgcggaatcaacttcgctgaagcgtgtttactttgacaaggttcctgaccaccgcatagagatctcgccgtcagctttcgcgtaccttgaaggggtggagtttgtgaatttcccggattatatcgtattcggtgaagacaatttcatcagctataaatgatatgacttccgcgccggacagatattgccggcgctttttgattatctgcttgtatttttgcggattctgtgatataattaatcgaataacatgaaaggaacgatattatgaattcctactgcaaatttgaaaacaacagattcatcatcggaaatgatcagatcgagcgtgcggtcgggtttgccgactgccgtccggtcagcctttacatacttgataaaaagaacggacatgagatatcgggaacgggagacaccgcgatgttcaatgtcttcggtttctcacccgtcgggacgccggaattctcggagcgcgtcacggataacgacgggctttccgaggagcacctcgagacgacgctcgtctatgacggacgctcggctgacggctcagatatgcggctcacacagatgtttgagatatacgatggctcgccgttcatcagctgttatatgacagtgtccggaaccggcgcggcgtccggaacgaaggccggaatatcgtcttcgcctgacggtctcgagaacgacccgacagagaaaaagtcaggaaagctcccgccggaggacaccatagattatgttccgatatccgctccgcacctgaaagcaaaggcgatcaccctcatcgaccgtacggacggtaacgacaactatgtccgctcacgcgaggaagagatatacgtcggaaagacgacagaattctccggttcgatattcattctgtccgaccgtgaagccgggctcatgctggtgaaggaagcgccgtgcgtcggctcgagactgcacgacaacggaaaagatctctcggtgagaccgagaaacggcggtttcgccgcgctctccggaagcggtgtcgacccggctgagatcacgtccgaaccgctcccactctacggctcgactatcggcgtaggtaaaaccgatgaactcacaagattgtggaaaaggcactactcgaaggtcttccgcggcaccggaaggctcttcgctatgtcgaacacatggggcgaccggagtcgcgacgcggcgctctgtgagagcttcatgaaaaaggagcttgagcgcgcggaaaagctcggcgtcgacataatgcagctcgacgacggctggcagaagggaatctccgcgaactccgcgaagaagaccgccgggagcgtctggtcatccggattctaccgcgaagacccgcggttctgggatgtaaacccggagaagttcccggacggactccgggcgataatgagcgatgacaccgagcttgcgctctggttcagcgccgacggcgacaatgactacgaaaaccacgaaagggacgccagaaggctcgccgcgctctctgaggaatacggtgtcagacagttcaagctcgacggaatgacccttaaatcgaaaaagggcgagcgcagcataatcgcgtttctcgaagaaacgcgtcgtctcgcgcccggcgtcacgttcaatctcgacattacggcgggagtccggctcggatacctgacgcacaaggagatcggaacgctgtttgtcgagaaccgctacacagactggacgaattattatccgcacgctgtgctgaagaacctctggactctgtcagaactcttcccgacgagaaaattccagttcgagcttctgaacaaccagagaaacgcggacaaatacgaagcttccgcgcctggagacgaactcgcgccggtgaattatgacatcgactggctcttcgcgtcggtcatgctctcaaacccgctgttctggatggagatgcagcaccttacggacgggcagaccgagcggctctcaaagatcgtctcggtctggaaaaaggagcgtgacgcgctctatgacgccgacgtttcgccgatcggcgagaagcccgacggatacgcgttcaccggttttcaggcgaaagtgtcggatgagcgcggatatctggttctgttccgtgagagcggcgacagtgacagcttcacattcgatgttgatgccgccggagaccttcgcgccgtcctcctcgcgtcgaacacggagattgatcacggagatatagctgacggaaagataaccgtgaaattcggaaaaaagcgcggatacgcgttcatcagatacgaaaaataagcagcgaaaaacggtcgccgcctgacattgtgccgaccgtttttcaacgctctatccgcggagcatacccatccggttgaacgccgcggcgagactgttccatgtgttcctgtctactcttccggtatccggaatgccgtgagtattctgaaagcatctcacatccttcattgtcccctcgtcgtaaacgccgctcggtggagagcctgttatgtcgtcgtactcatgcgcgagggtgcgcaggatgaactgtattatcgcgacgatatccgagttctcgcccggtgtcgtctcgtaaccgggctcttccggaaaatggaacaccggggaagggcgcgccgtcctctcgcgcgactcgagaaaagccgcgtaaagagccgtccatgtctgatagtctatctcgcccgtcaccggaagaccgtgcgtgcgctggaactcccttaccgcgtccctcgtctcggcgccgtatattccatctggattgatgagcggtatctccggtgccgcggcgtcgaaatgcagagcgcggagatatctctgcgcctcgaatgtccgctcgctgtcgctcctgcctgccatattgaatcatcctttcattcacgatgccgcccgccgttttctgacaggcggctcattcatctcagcgtcgtcccgccgaactgtccctcggcggcgttctcaccgctcacgacgtcacggtacgcgtttacaatttcatcccatgtgaatacatcgacgagtccggtcaccggaagcccgaacaatctctgcgccgcgatcaccgcgtcccttgtcgccgctccgaagaccccgtcgacatttatcggcggtatctcgtcatcgtcatagacctccgagagcttgctaagatactcctgaagcagtctgacctcgtttccctgcattccgatcgacagtatgaatcccgggtagggcgccgccgggacgccggtataatactgcggagtcgactcgacgattccgcggtaaactttatacgcggtattccacgtcggagcgtcgaccacgcctgtaaccgggagaccgtattctctctggaatgcgcgcaccgcctccgccgtctgcggaccgtatattccgtcgaccgcgatctccggcaccgtgtcgatattctcaccgatcacggcgaggtaatactgcaccacccgcacgtaatttccggtcaacccctcatagagctcctccgggtactgactcgatatatccgacagggtaagcccctcggaattcagctcgttcagccgcttgacgccgttatatatctgctgtatcttataccatgtcgcgttcccgataacggcgtcctccgcgaggtcaaatatcctctggaactcgaacacagagtcacgcatctcatacgtatatatcccgttcaccggatatattttcggaatcgacgggtaattctcggatatcctgttgagcctcagctgcaccagcctgatatccgtccccgaatcccccggtctgagcggtctgcgcggtcccgttcccgtgaccggtcttatcggcgtgtcgcggtttatgtcgatatcgtcgccgtaatagtacgtcagtatctcataaggcgtcatcccccgctccgcgaggtcgaccgttccccactgtgaaagccccgcgcaggttaccgtcgtaccgttgcagtactgcgcgaaaagcggctccacagacccctgtctccggatataatccgtatagatttcatcgacaatatgcccgatattctcgaatatctcccgcccgttcacgaacgactgatcaatcgccgtcgaattcgttatgtcaaaatcatacccgcggctccggtaatactccgtgtagatacgattcagcgcgaacgatatctgcgcgtaaatattcgcccgcagcgcgttctccggccacgtcgggtatatctcgctcgacgcgacgttctttatgtaatcctgaaacggcactgtgacattctgcgccgccgaatccggcggtccgagatgcaccgttatcatctcggggatgtatgggactgttggcatatccttatatgcgggggagaaaaaacctttcgagaaaggtttttcctcccccgcaccccctccttt

SEQ ID NO: 3036 - DNA, 3394 bp, Unknown
  16S sequences of unknown bacteria
gaccgcaacatcggccttgacatcgacgtgtcggtcagatgcaacggcgtttattcctacaaaatttccgaccctatgcttttctacgtcaacgtgtgcggaaacgtggagcaggaatatacaagagacgaaatcgacagccagcttaaggccgaatttatgaacgccctccagccggccatggcgagaatttccgaaatggagattcgtcccaacgccattcccgcccatgcgggcgagctttcggattttatgaatcaggagctgacaaagaaatggagcgagcttcgcggccttgaggtggtttccatcgccctcaaccccataaccctccccgacgaggacgccgccatgataaagcaggctcagcgcgacgccatcaaccgcaatcccaacatggccgccgccacacttgtcggtgctcaggccgaggccatgcgttccgccgccgcaaacgagggcggtgccatgaacgcctttatcggcatgggaatggcttcaaatgcaggcggagcaaacgcccagtccctttttgccatgggacagcaacaggctcagcagcccgttcaggcagccgcacccgccgaaaacacatggaaatgtgcctgcggaaccgtcgcatcgggcaacttctgccccgaatgcggagcaaaacgccccgacgacggctggaaatgctcctgcggacagatcaacaagggtaaattctgctcaaactgcggcgccaaaaagcccgcgggcgagcctctctataaatgcgacaaatgcggctgggagcccgaggacccgaaaaatccgcccaaattctgccccgagtgcggagacccctttgacgacaaagacattcgttaggaggagcgccgatggcaacaacactcgaatataagtgcccgtgctgcggcggcgccatagaattcgacccgaattcccaaaaaatgcgctgcccctactgcgacaccgaatttgacgccgaaaccctccggcaaaacgacgagcagcttcgcaagaccgacgctcccgacgaggcaagctggagctcggaggcgggggagcaatggcagcagggagaaaccgacggaatgcgggtgtatatctgcaattcctgcggcggcgaaattgtgtgtgacgaaaataccgccgcctccaagtgtccctattgcgacaatcccgtcgttatgacgggtcagctgtcgggcgtgctcaagcccgattacatcattcccttcaagctggacaaaaaggcggccaaggaggggcttttaaagcacatttccggcaaacggcttttgccgaaaatcttcaaggacaaaaaccatatcgacgaaatcaagggcgtttatgtacctttttggctgtttgacgccggcgccgacgccgacattcgctatcatgccaccaaggtgagaacctggagcgacagcaaaaacgactacaccgaaacaagccactttgcggtctaccgcgcgggaaatatcgcctttgaacgggttccggtggacgggtcgacaagaatgcccgacgatcttatggagtctatcgagccctttgatttttcgggagcggttgattttcagaccgcctatcttgccggctatcttgccgacaaatatgacgtggatgcccaaagcagcgccgaccgcgccaaaacccgcattaaaaattccaccgaacaggaatttgccaaaacggttttgggatatgcttcggtgattcccgagcaaagcagcgtcagaatttcgggaggaaacgcaaaatacgccctctatcccgtttggcttttaaacaccacctataacggtcagaaatacacctttgccatgaacggccagaccggcaaatttgtcggagacctgcctcttgataagggtgcctatgccaaatggtggggtattatcggcggtattgcggccgccgccgttttcgccgcaagctaccttttgtggctgcttttaggaggagaaaaaatgaaaaaaattatttcgctccttcttgttcttatgcttgccgtctgtatttcggctcccgcctttgccgacagctcccttccccaccttatcgacggggccggccttttgtccgacgaggagttttccgagctcgaaagcgagctcgacggcataagcgaggctcacaatgccgacattgcggtcgtgacggtgaactctctcggctctaaaaccgccgagcaatatgccgacgattattatgattataacggatattcaaaatcaagcggcgtgctgtttttgctctccatgggcgagcgcaagtggcacatttccaccaccgggcagggcataaacgtcataaccgacgcaggtcttgacgccatgaaggataaattcgtgtcggatttatccgacggatattatttcgacgcattcatgaccttcgccaagcagaccgacaaatattatgtcaaatatgaaaccgacggaaagggctatgacgtcgacgacctgcccaaggacgatttcagcatcggctttaatcttcttatcgccgttgtcgccggctttgtcatcggatttatcggcgtttcgatcatgaaaggtaagcttaagaccgtcagaatgcagaactttgccggagaatatgagataccgggaagtatgcaggtgacggggcaaaacgacgttttcctctatgcaaacgtggttgccaccccgaagcccgagctgtcccaaagcagcggaggcgggtcaagcacccacagcggctcgtcgggaacctcccacggaggcggcggcggaagcttttaagcaaacagatttataacacaaaagccctttttcaagggctttttctttgtcggaaaaaataaaaagttacatttttgtcgaagtcgtggactttttgaaaaatatatgataaaattacattggaaacaatacggtgcggcgcaaggaggtgcggtcatgaattcggttcgtcgttttctcaacggcagactttttctcgttattttcgtgctgacggtatttgtgctcgaccttatgacctcccttcccgccatgaaggattccaccgacgtcatgttcagcggcgcccctcccgttcttttaaagcagcgacttcaggttgcgggcgtgcttttcctttgcgttatcgacggccttgtgctgcttttttgcgacgaaataatgccgtttttggcctcggggcttatgacgattattttcgccgccaagtgctatgacagctataatctttttatgggcggcaacatggcttatatcaccgttccgatttttttgtttgtcattgccgcgctgattgtcaatttcgcccgctatttttcggaaaatcgggacattccctttttctcggtgggcaaaagcttttggggcaccacggaaccatggttgcgggagctggatttgaaccaacgacc

SEQ ID NO: 3037 - DNA, 28849 bp, Unknown
  16S sequences of unknown bacteria
ccggagttctttttaggaaagccggcgggtacggaatcttttgaaccaacgcccatacataaaacggctacggccccgggagtctgggcggctataaaatcataattttatacatagtataatagtataaaaaccgtaaaacgacaaaaatcggtggcgattgaggtttccgtgtggtatattgatgaccagcgccgcataggatggtaacggacaagctggggccggggacggtgaaacggatgagacggaaaagaacgaagcggcggtcacgccggatagggcctcggctggccgctgccgcagttgcgggcctggccgttgtagggctggcggccatcctttcgcgcggaagctggtggcccgagctgcgccgcgccctgacacgggacccactgccggccccatcgatcgggacattcctctccgaggcgggaaaaggaggcggtcctctcccccaaacggacggagaaaggagcgaggctgccgcatccgccttttccatcgcctggatcagcgacacgcaggtgtatgcggagagttatcccggcacctttacggcgatgacctcgtgggtggaggagcagcgcggctcccgaaacatacaggcgctcctgcatacaggcgacgtggtcaataaccgcaaaagcgccaaacaatgggcaaatgccgtggctgcgatggaccggcttcgcctgccgttcctcatcgcagccggcaatcatgatgtctggacacccgagacggattacgtctacttttcccgccattttggcaccgctaacgatccggacaccgtgacctggcaggaagggaaagggcaataccgcctgctggcggcgggcggcatggatatcctgttgttgacactgggctacgggaccggggaggaaggaatcgcctgggcggatgccgtactctcccgttaccccgggcattacgcggtactcggtttccacagctacatgcacgagtcgggggctctcagcgggattggaaagactctgtaccaggagctggttcaaccccatgcgaacgtcaagctggtgctgtgtgggcatcatcatggcgtagggcggcgggacagcccgatcgacgacgacgcggacggtgtccccgaccgcacggtggtacagctgctcgcggactaccaggaggatgaggatgggggcggcgggtttctccgcctcctcaccttcgatccggccgcaggcgtgatccgggtggagacctattcccccgtgctggacaccgcccgaagtgaggatacggcccgtttccaatttacgctcgaacgataaagggatctccggtcggcggaccggggatccctcatttttgccggttcctatcggccatatacggcccagcggtttccgccgccgcgtttggcctggtacagggccttgtccgcctgttcgaaaagggcggcgtaatccttcccgccggcctcggcgtaggcgatgccgatgctgcatgtgaccgcggctcccgcttccgagacgtgcgcctgacgcagccgggagagcagccggccggccaggttttccgccgcccgttcccgggcgtgcttgacaaggatcagaaactcgtccccgccgatccgtccggtgatggtatcctcatccaggtcgttctgcaggatggcgccgataccgtaaaggaccttatccccgaacagatgcccttcggaatcgttgatttccttgaaatgatccatgtccacgatcagcatcgcagaacgggtatccggttccatgcagagaaagcgccggcacagctcttcacaggacgctttgttcagcaggccggtgggacggtcgaggacactaagctgcatccaacgggcacgggagcgggaatcgctgacccgcagcttgacgacaacaacggcgcagaacagggcgatgatataagccgggatgacggcccatatatcgtataccagcgcagccggggctttgagcagcaccgccagcacgatgaaaaccgcggtgtacagcgtcagggagagaaaaagctggcggaaggaaaagaggaaaaccacggccatgccgaccaaaaccggcgaaaaaaagatggcgggccggtcgggatacgggaaaaccgagacggcgatgacgaagcccataatcaacagggacaggagggtgcacatggcctggacccgtctgtatgccggcgggctggtccggacgctgagaagccagatgtcgaaggcgagctgggcggcaacgaaaatcccgtacaggacgcgcagcgggatgctgtcaaacaggaaaagggcggtgacagcgtaggccagcagaagcagggtgtataccaggcaaacgcttttcagggtgcctaaattcttgcgccggatcaagtcctggtcccgccgcatctgctcgtcgcttgcccgaaggaactccggcactcggcgcacggctcgccacatatcctctcgcctccttccgtttttacaattgtagcatatccggttttgccctgtctatggcaaaagaaacgaaaaagaaacggcaagacccgggaacgggctttgccgcggcagaaagatcaacgggacctgccccgaaacacgaaaatacgttgcaggagcagactggccgtaaagaggaccgcctcggtaatcaatttggcgatctgggccgggataccgcaaaactcgttgaggaacatcagcagacaagtgttgaccagcaggatcagcaccacaacggcgtaatatttgagagcggaagccagcaggttgcctttgtctttgaagaccagctggcggttgagggtgaaattcagggtagagctcagcattcgcgcgatcacgttgcagatgcgcaccgcggaaatgccgacgagggcggaaaaatccacaccggacaatactctgtaaaacagccggaacagaaaatagtcgaccagaaagctcagcacggccacgcccgtgtattgaaagagggcggaatatacgcggatgaactgccgcagcgaacggccgtccgtctgacggtccggccgggccgtttccaccggcacctccagaaccgggacatggttttggaggcagcccagcagtaccgacacatcgtattccgctccctcgcccgggcagtccagcagctccgggatccgtctgagggaaaaagcgcgcagcccggagcgggggtcccgcaatttggcgccgctggcaaacgcgaaaacgtagcggaacagcgtatcgttcaggcggccgcgcagtgggcccttgtcccgatatcgtctggctccgatgacgagggaatcaggatgcacccgcaaggtgtcgctcacctcaaggatatgggaaacgttgaaggatccgccggcatccgcaaccacgacccccggctcctgcggataggcggagaccgcgtaagacagcgcggtcttgaccgcccggccgcggcccatatgaagcggatgccgcaggacggtgcagatccgcccgacagcttcaaaaaccggggcacggtcggaggagctcccgtcgtcgaccaccaggataggataagcggtcttctcccgcagctcgtttacaagatcaaccagacggtcatccggctgataggcagggattacaacgatcatgtggcggcctccctaaaactcccttatacgacattatacacgatggacggcgtaaaacctagtgaaaagattctgaatttttttggaagcctgcagagatccgcaaaatagacaaaatcccctgtgtccgcttcgctttcgccttccaactccacaaattttgcggggagcgggaatacgccttgcaattttcggggttttgcaatacaatgaaagcaagatgtgtaaggaggtcgtcgacatgcgtctggcttgtgggaagatgctcggaagccgtcgcgtcgagggcacgggtgcggggaaacgtgcaggatgagcgggctgtggcgcgggcgtgccgcagcctgtttttttccgtgccggactgtgaagaaaggacgaatgcaatgacggagaattccaaaaaagtggcggtcatcatgggcagtgacagcgaccttccggtcgtggggaaagccatcgacaccctgaaagcgctcggcatcccggtggaggcacatgtgatgagcgcccaccggaccccggaaaaggcggcggcattcgccgcgggggcggcggagaacggcttcggcgtcattatcgccgccgcgggcaaggccgcgcatctcgcaggggtgctcgccgcccacaccatcctgccggtcatcggcatcccggtgaaatcctctaccctcgacgggctggacgccctgctgtcgacggtgcagatgccgtcgggcatcccggtcgcgaccgtcgcgatcgacggggcggaaaacgccgccctcctcgccgcgcagattctcgccctctccgacggggcgctgcagcagaaactgctggataaaaaggccgatatggcccgcggtgtcgaggagaaggaccgaaagctcgccgaaaccctcggcgcataaacgggataggtttacagcatcaaaaagatatgaatacaaaggagtcgatggacatggaaaaacgggaacagctttacgaaggaaaagccaaaaaagttttcgccaccgaggatccggagctttacatcgtggattataaggacgacgcgactgccttcaacggcgaaaagaagggcaccatcatcggcaagggcgtcatcaacaaccgcgtgaccaaccatctgatgaagctcatggaaaaggaaggcatccccacccactacgtggaagaactgtccgaccgggagacgctggtcaaaaaagtcacgatcgtcccactggaggtcatcatccgcaacatcgccgccggttccttctccaaaaggttcggggtgccggagggcacggtgctcaagcggccatccctggagtacagctacaaggacgacagcctgggcgacccgatgattaacgattcccatatcctggcattgggcatcgcgaccaaggacgacttggacaccatttcgaagtacgccttcaaggtcaacgaggtgctcaaaaagtacctgctgaaccgggacatccttctggtggattacaagctggaattcggcaagctgtccgacgggaccatcgtcctcgcggacgaaatctcacccgatacctgccggttctgggatgtccacacccatgaaaagctggataaagaccgcttccgccgggatctgggcggagaagaggaagcctacaaggaaatcctccgccggttgctgggcgaataacagccggctgacgactataggccaaataagacttttggcctatagtcttggtttttcattccgtgtttgacgatatagaagggggacctgtatgggcggcgtttttggcgtggcatccagcgacaactgcattaccgatctgtttttcggggtggattaccactcccatttgggcacgagacggggcggcctggcggtatacaacgccgagaccggctttgaacgggccattcacaacatcgagaattccccgttccgcaccaaatttgagcgggatgtggacgaaatggcgggcccgctcggcatcggctgcatcagcgacaccgatccgcagccgttgatcgtgcgttcccatctcggcacctatgccatcaccacggtggggcggatcaacaacctggaggagctggtcgggcacgcctttgaaaacggcagctcccattttctggagatgagcgggggcaaagtcaacgccaccgagctgaccgcctgcctgatcaaccagaaggataccctcgccgatgggatccggaacgcccaggagctcatcgatggatccatgaccatgctgctgctgacaaaggacggcctcgtcgccgcgagggaccggatgggccggaccccgctgatcgtcggcaaaaaagagggagccacctgcgtctcctttgagtccttcgcttatctcaacctgggataccgggacgaatacagcctgggccccggggagatcgtccggatcacagcggacggatacgaaaccctcgtgcctgcgcgcaagccgatgaaaatctgcgcgttcctctggacctatttcgggtatccgacttcttcctatgaaggggtgaacgtggagcagatgcggtacgactgcggccggatcctcgctcagcaggacagggataccgacgcggactacgtcgcaggtgtccccgattcaggtacagcccacgccatcggctacgccaatgagtcgggaatccccttcgcccgccccttcatcaaatatacccccacctggccccgcagcttcatgccgcagaaccaggcggtgcgcaaccaggtggcgcacatgaagctgatccccgtggacaccctgatccgggataaacggctcctgttcatcgacgattcggtcgtccgggggacccagatgcgggaaacagtcgatttcctgtacaacagcggcgcgaaagaggtgcatatccgccccgcctgcccgcccatcatgtttggctgcaaatacctcaatttctcccgttccacctctgatatggatctgattacccacacggtcatccaggatctggagggggaggaaggcttccgccatctggaggagtatatcgacgcccgatccgagcggtatggccggatggtggagggcatctgccggcggctgcgggtcacgtcgctccggtatcagaccctcgaagggatgctcgcatccatcgggattgatcccgagctggtctgcacctattgctggaccgggaaagaatgagaaggcaggccccggcagcggcctcaagacggtgaaaggaaggaaacggatatggagagcgtgagcaaaagttatgccgccgcgggtgtggatgtaaccgccgggtataaagcggtggagttgatgaaatcccacgtggcgcgcacaaaaatcccgggtgtactgtccgggataggcggcttcggcggcctgtttgaaccggagctcggagggatggagcggccggtactcgtctcgggcacggacggtgtcggtactaagctgaagctggccttcctgctggacaagcacgacacagtggggattgactgcgtagccatgtgcgcgaatgacgtggcgtgttcgggcgcaaagcccctgtttttcctcgattacatcgcctgcgggaagaatgtgccggaaaagatcgccgccatcgtggcgggggtcgcggagggctgtgtgcaggcgggctgcgccctgatcggcggcgagaccgctgagatgccgggcttctatccggtggatgaatacgatctggccggcttctgcgtgggcatggcggattatcacaacatcgtggacagcagccgggtacaggccggcgacgccctgatcggcgtgaaatccagcggggtgcattccaacggcttttccctggtccgcaaggtgttcgacatctcggagaaaaccgtcggggcctattgcggtgaactcggcgccaccctgggcgaggcccttctcaccccgacgaaaatctatgttcggcctctgctcgccctgctggaggcggtaccggtccatggggtatcccatatcaccggcggcggattctatgaaaacatcccgcggatgctgcccgacggactcacggcggttatcgagaagaaggcggtgccggtcctgcccattttcgacctgattcagaagaccggggccatcccggagcgggatatgttcaataccttcaatatgggcgtcggcctgtgcattgccttgcccgccggcaaggcggacgaggcggtccgcatcctgaacggggcaggggaagaggccgtgatcctgggcgaggtgcagaccggggccgaaggcgtccggctggtataaaggatcatggaaaaggaaggcgggatgagtgtgcggaacatcgcggtattggtgtcgggcggcggaaccaacctccaggctctactggatgccgaggcggccggggctatccggaacggccggatcgtccgggtcatttcgtccaagccaggcgtgtttgccctggaccgggcaaagcggcacggtatcgaaaccgccgtggtggaacggaaggcctgcgagtccccggaagaatttgacgcggccatcctgcgggagctcgagggctgcggtgccgatattgtagtacttgcgggctttctttcgattctcggccccacggtgatatcccgctacgaaaaccggattttgaacgtccatccggctttgatcccctccttttgcggaaaagggtattatgggctgcgggtacatgaagaggcgcttcggtacggcgtcaagctgaccggcgcgacggtgcattttgtcagtgaggtgccggatggcggtgcgattctgctgcaaaaggcggtagatgtccggccggacgacacacccgaatccctgcagcgccgggtcatggaagaggccgaatggcagctcctgccccgtgctgtctccctcgtctgtgaaggacgggtgcgggtagagggccggatcgcccatatcctggacggggatgggaaccgataaaaacgtatgattttatagccacccaagccctcggggccgcagcccctttatgtatgggcgttggttcaagtgtcggccaaaaccacccggggtgccagggggtggaaccccctggcacgtctttgccccgttcctacccgattagcctcgggcaaatgcggaagcatttgcgggggccggggcaggccacgtatgattttgacggcggtcagcccggccttcttcgcgttaagaaagaaggtggcccgcaggccaaactttctttccatatgtccgcgcataaagaacgaatcttgccgaaaaggagattcatgcgcggccacccacttttgcccagagccgcaaaagaatcgttcggttcccgaacgatgcaaaaggtctcccgggggccttgcccccggtcccctagagaatcggccgattctctttcatatgaaagtcggcgggtacggaatcttttgaaccaacgccatacagagaaggggcccgaggcccccgggaatctggttggccataattttataggaggacatgccattatgcagaatcggacattgaccggggaactgggccggacgagctatccgggccggggcatcatcctgggcatgagcggggacgggcaaaaggccgtcatcgcttatttcatcatgggacggagcgaaaacagccgcaaccggatattcgtagccgacggagaagggctgaagaccaaagcgtacgacgagagccggctggtggacccgtccctgatcatctacgcgccggtgcgtacggtagggaaaaccgtcacggtcgtgaccaacggcgaccagaccgacacggtggccgatttcctgcaaaaaggccgcacctttgaagaggcgctgcgcaccagggaattcgagccggatgcccccaactacaccccccgcatctccggcataatcgagctggagcagggaggcttctcgtatacgctatccatcctcaagagcgaccggggcaatccggacgcctgcctgcgttttttctacgagtatgcaccggtggccggacagggtcatttcatccatacctacgagcaggacggcgacccgctgccctcttttgaaggggagcctgtgccggtggagatcgcgggggatatcgacgcctttaccgaaacggtttggaacagcctggatacggataatcgagtctcccttttcacccggtttatcgacctgaaaaccggcgggacaaagacccgtattgtcaacaagcacgagggctgatgccctttgtggatacaccggaaaggatgacgtgtatgaacgaactgctgctcaaatacggctgcaatcccaatcagaagccgtcccggatctttatgaaggacggcggcgctttgcctatcgaggttctgaacggccggccgggctatatcaacttcctcgacgcattcaacagctggcaactggtccgggaactcgcggcggcgaccggcctgcccgccgccgcgtccttcaaacacgtcagcccggcgggggccgcggtgggcctgcccatgggcgacgagttgaaacgggcctgttttgtcgacgatctggagctctcccctatcgcctgcgcctacgcccgggcaagaggggcggaccggatgtcctcctatggagactgggctgccctgtctgagccctgcgacaaggaaaccgcgctgctgctggcccgggaggtgtcggacggcattatcgcccccggctacaccccggaggcgttggaaatcctcaaaaccaagcgcaagggcggttacaatgtcgtcaaaatcgatccggactaccagcctgctccggtggaacagaaggatgtctacggcatcacctttgagcagggccgcaacgaaatggccatcgacggccggatgctggaaaccattgtgacctgtcacaaggagctgccggagaccgcccggcgggacctgatcttatccctcatcaccctgaaatacacccaatcgaattccgtctgctacgccaaggacggccaggccatcggggtgggcgctggtcagcagagccgcatccattgcacccgcctggctgggaacaaggcggacgtctggcatctccgccagcatccgaaggttctggctctgccgttcagggcggatatccgccgccccgaccgggacaacaccatcgacgtgtacgtctcggacgatggcatggatgtattggccgagggtatatgggaacaattcttcaccgtcaggccggaccccctgacaagggacgagaagcgtgcctatctcgacaccatcaccggcgtctccctaggctccgacgcgttcttcccctttggagacaacatcgagcgggcacaccgcagcggggtacggtatatcgcccagccgggcggctccatccgggacgacaatgtgatcgaaacctgcgacaaatacggcatggtcatggcctttaccggccttcgcctgttccatcactgatttcccgaacgattcggggctttttgccctccccattttacacccatgtggatatgaaacgtgataaagtgaggtttggccaatggaaaaacgagatattctggttgtcggcggcggcggacgggaacacgcgatcatccgcaaactgaaggaaagcccccgctgcgggcgcttgttctgcacccccggcaacggcggcatttcgcgtgacgcggcctgttttgacgtggcccccaccgatgtggacggcgtagtagccctggctagggaatgcggggcggacctggtcttggtagcgccggacgacccgctggtggccgggatggtagacgccttggaggaggcagggatccccgccttcggcccccgggcgaatgccgcgatcctggaaggcagcaaggtattttctaaaaacctcatgaaaacctacggcatccccaccgcccggtatgaggtattcgaggatccggccgaggccctgcggtacatccgcgagcagaaccggtatccggctgtggtcaaggcggacggcctggcgctgggcaagggcgtcctgctctgcgccgattatgaggaagcgaaacgggcggtacacgacatcatggaggaccgggtattcggcgcctccggttcccgtgtggtggtggaggaattcctcaccggtcccgaggtgtcggtgctggccttcaccgacggcaaaacggtgcggccgatggtgtcctccaaggaccataagcgggccttcgacggggacatgggccccaacaccggcggcatggggaccatcagccccaatcctttctataccgaggaacaggccgcctggtgcatggagcatatcttcctgcccactgtcgcagccatgaacgccgagggccggcccttcaagggctgcctgtatttcggcctgatgctcacccccgacggaccgaaggtcatcgaatacaactgccggttcggggatcccgagacacaggtggtgctgccccgattgaaaaccgatctgatcgacatcctcgaggcggtgcgggaggaacggctggctgagctgcccatcgaatggagcgaggatgcctgcgcctgcgtggtgatggcgtcgggcgggtaccccgccgcctacaaaaagggacttcctatccggggcctggataaacagggccaggtacccggcgccgttgtttaccatgccggcaccaaatatgagaacgggtgtttttacacgaacggtggccgggtgctgggggtcacggcggcggccccgacgctggacgaagcgctgaaaaaggcctatgaagcggtgggccatatcgactttgagggagcccactaccgccgagacatcggcaaaaccgaatgaaataggaaaaaaggaggcacgccccccgttttccataccggaagtccgtaggatggccaaacctgtacctggacggaaaaaaacaaaaagcggccgggcccaattgggcccggccgctttttgctgcgtttaaacctataggaaccccccactctaccagggaacaattccggaacgcagccctgaatatgggaagactaaggagatacggctgccgccggtttttatgaagagaaaaccggcaaattctcccgtatctttgccttgtatatgaggccacgggttgtgttataaaggaataggagaaaagaagcgtcagggggcattccccctgaacctccgactgatcgggcggccaacaatctatgtgttttgcagggtcgtctggcaccaggtgaagagcaggcggaacgcctccccggcgtccatggtatcccctgccttcaatgcggctgccgtttggaggacctccgcatcgatgccgtccaaatgggccagcaactccctcctggttttccaatacaccccggtttcgaggtagacgcggttctgcaggatatacagaacgggcttataggcgtcccgcagcccgtccgcgtcccatccatccgccgcgtggacggcccggtggcagagggcgtggtacagattgcccacgctcagcttgacatgctgacggacatcctcctcggtgtaagacggtaccagatcggccagccggccgaggatgtcgtccgtttcatggagaatctggcagatttcacaggtgttccagttgaaaagctctccccgtccgcagaggaaaccacaggatttttctgcctcccccagccgggcaagcaggccccggtacacctccagatcaccggccgtcagctcgtcgagcaccaccatcaggtcgatgtcgctgttctcatccgcttccccccggctatagctcccctgcaagccgacataaagcaggcggtctgcaaaggtatcccgcaggaggcatacggcccggctgatatactcgtctattcgcaccattccggatcacctggctcctcacatcccaaatacgtcgtgtaaggctcattacggtagagcctgcggatttgcccgcgcaatttggaagataaagcggctggcggggcagggttttgatgtcgagccactcccacccggtttgattccgagcaccatagagggccacatgccccaggacgccgttatagtcgcacaaaaagaccagatccacccggtggaaaggctcgccgcggaggccctccaccacgaatacggggtcctttgggatcacgtccagtccgatctcccctgcgacctcccgccggacggcgtccggcaggcattcccccggctcctgtcccctccgggcagaatacagaacacatccccctcatcgtccagcatttccccatcccggatgatcagtgccttggacgaatggcggatcctctgtccatacgcatcctccccgtataaaaaagtgccggtacgaccgcaccggcacccttcattcacggagtcttatttatcctcttcttcgtggcagcaatcacagccgcattcctcgtcctcgcaatcacagtcgatgtcgaattcgagatgctcgccgcagttcgggcattcgatgccgccctccaacagggtttcctcgtcgacacagaactcctcgtcacaattggggcagcagatgtcgtagaattcgtcttcacagtcctcacagccgcagccgtcgtcctcatcaccgtagacctcgtcctccagggtgtcgagatcctcatcgatggcatccacctgctcggtcagctcggcggtgtaatcctcgagatcctccacgctcacagccagatccgacaagacatccatcaccgctttgagcagcttgccttccttggagttttcatcgattgcgaagccctcgatcaggcccttgagatatgcgactttttccgtgacagtcatgtgctgtccctccttacatgtcatccggcccgaacgaacggaccggcggttgaaatccggaaacggccgcagccgtaccccggataggttgcctaaaacaacggggattatgcgcgttccatatattcgcccgtgcgggtatccacccggatcatctccccttcatcaatgaagagaggcacccggacctccgcccccgtctcgagggtggcgggcttggtggcgttggtggcggtgtcgcccttgaaaccagggtcggttttggtgacctggagctcgacaaagttcgggggttccacaccgaacaccttgcctttataggaagccaccttgcagagcatgttctccttgacaaacttgaagttgtcggagaggacgtcccgcccaatggggagaagctcatacgtctcctgatccatgaagtaatacagatcgccgtcggagtaggagtattccatatccttgcgttcgacaaacgcggtggggaatttctcattggggttgaacgtgcgctccaccaccgtccccgcgatgacattgcgaatttttgcgcgcacgaaagcggcgcccttgcccggcttgacatgctggaattcgatgatctgatagacgttgccgtccatctcaaaggtcacgccgttgcggaaatcacctgctgaaaccattgtaatattcctccattatcctaactgtcccttattctaccctacaatcgggggaaattcaagtataatttatgaatttgcgtgaaaaaggggggctgcaaagcgataagcctgcaacgcccccttataaccaacaaacctcttactcctcttccgcttccttatactgttcaataaccttctgcgccacattcatgggcgcttcctcataccgctcgaaccggaaacggaaatagccgcgtccctgtgtctgcgcgcggagcatggtggaatagtcccccatctcggccataggtacctccgcctcgacgcaagtcaggccgtcatcggccgggttcataccgagcacccggccgcggcgcttgttgatatctcccatgatatcccctgtgctgtcccccggaacgtagacgctgagcatcccgatcggttcgagcagcaccggcgaggcctggggaatccccgccttatacgccaggttggccgccgttttgaaggccatttcggaggaatcgaccggatggtaggagccgtcgacgagggtggctttcaccccgaccatcgggaatccggcgagcaccccctttttggcactttcccgcagccccttttccactgccgggaagtagttgcgcggcacggagccgccgaacaccgtctcttcaaacaccaggtcatcactatcacagggctcgaattccacccagacgtcaccgaactggccgtgtccgcccgactgcttcttatgccggccctgcaccttgacctttttccgtatggtttcacgatagggcaccttaggcacggccagcgtaacctcgacaccgaatttgctcttcagcttggatacgaccacatcgagatgctgctcgcccaggccggagaggatggattcccgtgtctcggcattggtctcgtaggtgatggtcggatcctcttccatcaggcggttgagcccgaaattgatcttttcctcgtcgcccttcttcttagcgaagacagccatggaaaggcagggctcttcaaatgagacgccgggcagcgtgaccggatgggcgggatcgcacagggtatcgccggtgttggtcgcgttgagcttggccaccgcgccgatatccccggccccgaccgaggggacctcctcctgcttcttgccacggacggcgaagagcttgccgagcttctcggtggcaccggtacgggtgttgagcagggtcatatcggggagcactttgccgctgaccactttaaaatacaggagttttcccacaaaaggatccaccacggtcttgaagaccacggccgaaaccggcgcggtctcgttcggctcgatttcgaccgggttgcctgccgcatcggtgccggtctcccccgccacggtttcggcccagggggcgagccagatcaggccgttcagcaattggtcgacgccttcgagctcctgcgccgaaccgcagaacaccggcgcgatttcaccccggcggataccggtcgccaagcccttgatccgttcctcgggcgtgaagtcctcgccggagaaatacttttccatcagctcttcatcggtctccgcgaccgcctcgttgatcgcggtgcgcaggccgtccaggcgatgccccatgtcgggcagcgggcgttccaccgccttgccgttctcatacgcataggccttatactcgagcagattgacatagcactgcacccgccggtcctccacatagggcaccacgagggggcagaccatcggtccgaaccgggtcttgagttcctcgaaaaccttgtaaaaatcggcgttttcgttgtccagtttgttgacgaagaacagcttggcaatgccttttttggttgcggcgtcaaaggccttttccgcccccacggtcacaccgcttttgccggacaccacaataacggtgctgccggccgcgcggaagccttcgctttttccgcccgcaaaatcaaagagtccgggggtgtccagcaggttcatcttggtgtccttccattccaccggcaggagcgccagggaaaccgaggccttccgccggatttcctccggatcgaagtcgcacacggtattgccgtccgccacccggcccagccggtcggaggcacccgacaggtaataagcggcctcggccagcgaggttttgccggagccggcatggccggccagcgccacgttgcggatgttcttcgcggtgtactgtttcaatgtttggactcccctttcctatgaattgcgtctcctttcaacgaaaggcgacgcaatatgagctaaattatacaaaatacaaaccaaacagcttgtatgctttgataattatatcctatcagcaatgggaattcaataaaaaaagtgtgaacggagaaaaaaatcctcctctgcaccaacggcagaggaggattttggcagttatgtacaaacaatgtccgggaaagtcaggatttgcgcaagagaaccggcaccatccaagtcaggaccgcccagcccatcaaatacgccagggaatacagcggcgggaacggctgtcctgaacggaaggcgagatatatccccaacacgaggcccagcaccccgccgaccacctgcaacaccaccgcgaggacggcgccggtgcgcagccggctgcagcgggccagggaatccgccatcccttccaggcgcccgttggacgcgagcaccgcctcagactcgggttcgcagcctttgaccaggttgctgtaggagcggccggccgtcgcaccgagcacctcgacgtaatacggatcgagctcatataccgaacagatgagctcctcggtcacattgggatcgcaggtgcgcaccagcagggtaatgccccgcttggtcaggccgtgcagggcacgggccatcccctcgtcccccacatagctgatgacgaacatcgcggataattcgccgccgatggagagatacaccagcttgcgcccatccttggcataccggccctcataatcacgggacggcacgtccacgccgtggttttccagcaggcggcgggacccgaccaataccctccggccgctgacccagccggacaggcccatgtcctgttcgtacaccagggtgtcgacctcttgaaggagttccactttgttttcgatcacgcggcggaaaacactcgacaggggtccccccgcccggatggtcaccgacgccgcatccaggatcgcctcgtcgatgcgggcgcccgaaaatgtcttaatcccatgcagcaatacgctttcactcgggaagacctccagcgcgtccaccgccagggcatgcggattcccaaacgcctccaccgccttccagcccgaaagcatcccgccccagcgcaggctttttttcgcggcccgcagcaaagggaggttcgcagccgtcaccgctgcggccggggcggaaaggcacaccataccgcagaacagggtgaccgcattcatccaggacgacatgccgttcattacggcataggcggcggccgcagcgatggcggcggccagcataagggggacaaatacccgcatcaccctgtcacagacgtccggctcataggaatgttcgaggaaatgggacaaaaaaccggaacgccggaaataggccacttccggttctcccatcgccaccgccggccggccgacctccaccgccacatgcggatcttcgatcaggcgggccgcatatttttcacccggatgggagacaaatcgaaaattctcgcaaatgcgggaaatccgcatctgtttgcccgccgctccgagcaggatccccagccccgccactccggccatgagagggaccgtcccggccgcaagggcttcgacattggcaaactgcagggcggtgtggaggaacgcgacgcatgatgccagggaaaccgcactgtccgcatcagccttgagccggaacagccctgccagcccgccgcccaccatccggtggttgagaaccagcatcacgcccaggacaaacaggtggatcgacaaaaaccagatcggatcgatggggagggcgggggtgatgaaggtcatcaccgtcagccacagcagcaggccctcgagaatacccgtcagggccaggacgatccagcccgtcctccggcgataagagagttcgttttgcaccgcctcggtatccgcatagctggtatagtcctccagctcgacttcctcatattcctccgcttcttcggcgggatcgttttcctcttcctccccggccagcttaaaaccacccgacacgctgagcctctgccgggcaaaatgttccattttttcctgccgcaccttggagaggcgggcctccagctcctcttcgctgtccggctgcccctcttcatccacaagctcatccagacgcagctgtccctcttccagaggatcctcggacggttcggggacggaggggaccggcggcgcggccggcatcacccgtgtacgggcggcatcttcggccggaagaggccggggacgcgtggttttcggcatgggcggcaccggatgcaccaccggtcccaccaccaccttgggcggctccttgaccgatgccggagggagctcttccttttcagacgcaggcaggacggtttttttcaccggcgggacatagacgcgcacgtcatcttcatcctccgcggccagagcgggacgggacggcgcgggcgcgtatcccggctcttccatgtccggttcttcgcgcccttttttgcgcccgaatatgccccggcggggcttgtccggttcctcctttccctgcgcctcctcctgttccagaagaagacggggccgggaggagcgggccggaggaggcgtctgcacaggggccgccggtttttccggcatggccggaatcggtgcaggagaggcggccggagccgtggaagcttttgccgccgcgctggttttcatccggcgggcttcttccagaatttcctcaatatcgtatgccggtttttgtccattcctgtccataaaaacccccacgctctcatcaagatcagcgggccatcagattccggcgctgccgcagcccctcatacagcaggatgccgcacgcgaccgaagcattcagtgaaccgatccgcccggacatcggcagcgaaaccaagtggtcgcaggtatcctttaccagacggctgatcccctttccttccgagcccaccaccagcgccgcggcgccgcgcaaatccgccgtgcaccaggtctcgccgtccatatcgaggccgtatacccatacgccccgtttctgtatatcccgtatcgtctgggtgatgttggccacccgtgccaccggcacgtactccaccgctccagccgacgctttgtacaccgcggaggtcagccccgcgccatgccgcttgggcacgatcacgccatgtacgccggccgcctccgcagagcggaggatggcgccgaggttatgcgggtcctcgatcccgtcacagatcacaaaaaacggcggttccccggaccgttccgccgccgcgaacaggtcttccagctccgcgtactccttgcaggcggcgacggcggcgattccctgatgatgcggcccgcacagctggtcgagcttgcgggaatccacctccttgaccgggatgccgcgttcgcggcaggcggcgaggagaggccggatgctgccgctccgctcccccttggcgaccaaaacgtgatccaggctgcgcccggatttgagcgcttcatggacggcattgcggcccgtcaccatatcccggtccgcctgaagctcccgcttttcctggcgaggccggggatcttccggtcgattcataatatccaaccccaatattcagatgaatttgtcgcgcggaccggacggatcggccggcatttctgcccaaacgccggaacaagctgctgctattatagcatatccccggcaaaaaacaaaccgtttttcacacacaaaatccggcccgtccccagtcggacgggccggactccgattctaatcctcgcggcgggaaacgggagcggcatccgggacgcttaggggcgccgaggccgcacgggctccgttgttggcgggcatgctgctgaaatagtccaccacgccgtccgtcaccgcctgcatcagcttatcccgatattcgggctttatcaggcactctttatccgctttggtggtcaaaaacgcgcattcgatgagaaccgacggcatatcgtggatcatccggttcatataaagcgttccccacttgatgggttccgaccggccctgcagaatcaatttgcctttgctatctcgtttgtcaataccgattccgtaactgacctccacaggatgcattttgtcatagatgaaccggctggcctcatatccgtactcgctgtaataatgagccgaggccccagacgcgatgctgctggaaaacccgtccatgtggatgctgattgtcagatgatacccccgattatgggacagagtggggcggctcgtaaggggaagcgtcacgtcggaggagcgggtcatatccaccttggctccaagagccaccagtttatcccgcaaggtcaacgcatacttcaggttcagcgccgcctcttcctggctttccgagccgccatgacctggatccagcaggatagacaccccctccagccggctgcccgccggattcgaggcaatatcggcagggttgaggaaggacagatgcagattgccgtcattatcccaaacctccgaaaaaccgtaaaacgcccccttgtgccgcagatgcaggcgcagggtccaggcggtgtccccttcctggatccattccgccgaacggatgagaggactgtccgaaaaatcgggcgcggcgcccacagacgacacgtaatagaaggtgacatccacatagtccgccgtcagcccggtgttccggatagaataattgggacggctggtcagcgaatcgttgctgtatttctggggcgccagcttgacgttgaaggggatccgccactgagggctgacggtcagcatggtgtggctcttgctgactttgaccgccggggtttccagcacattggcgttaaactcctcgctggcgaacagctgcgcgtccttctgatacacccgccgcccggatgccagcagataatacgacttgttcggatcgctgtttggcactttttttacgaagcaatcggtggtcccctttggaagctgagatatgtagggacgagaatagtcgtcttcggtacttccaaggaacgcttcggcgtattcggccgtgaccaccacaaccggtccgcttgtcaccttctcgccctgcccaagagtaggggaaagagtttgtatgccgtccagagttccgggcaatgggacatccggaaggaaggaagtctcggccgcattgaccgtgatggtaccgcctgtttttgattcggtcaggccgttgtagctagcggtgaccttgacagcacccagattctgggttttccccggtagggcgtcgggcaattgaaatacgccagaatagttgacaaaggcagaatcttcttcactggattcgtcttctttactaggggcctccgtcatgttgatcttggtactgccgaccgttgcgatcacagtggcacctttacgtgcaactgcgttgagaatcaggctgccgcccccgtcgaacgccatgtccgaagtcggggtcatgctctggagcacgaccaccttataggtgaccttataggtgacggtctttcccttgtgggacagcgtgaaggtgttgacgccggggttcagggtataatcctgagagaaaaagccgtgttccgacagctcgatcgtctccccgttgatcgtcagcgggaaattcgggtcggcgctgccctggaaggatacccctgactcgttggtggtatacgtcgttttagacggcgccgtaaccttgagggtgtcggagatatactcggagaggatcgtccctttatatgctttgattaacgccgtcgtactgccggaggggtcggcgcgcagggccgccaccgaatcgtaggcactccccttccatgccgcggatccccggcaggccaggagctgctcggaaagctggctgggggaattccatccggtttcgcttcccccgactttggaggcggcgtgggagatatacaggggggtccccgttctctcacagacagccgaccaccagttcagcaccgcgccgaagctcgccgagcggtgcacggtggacgtaaaattcttcaccatgacgaaattgaacagcccctcctccacccaggcgagggtgtcggcatggccgtcggtcatctcttcataatagctggcggtatccgaccctttttcgtcgaccgatttgtgggcccagattccgcgggagagcaagccgatgtaaaaattgcggtccgcctcccggatggcggcaacggcgcgcctcaccacccctgtaaccgcgtcggccgtaaaagcgtcgatgttgtcaaaggccgtctgggcggcgaacgcctcagcgttcccggtcgtaccgcccgccatgctgacgttgcccagcagatacccgtcgaagccgtaaagcggtgccgcctccttgaccatcgacaccattttgtccgcatccgccgcgagagtcgggtcccaataggttttgtccgacatatggaaatcgaacaccccgtacacatacaggctgttctcctttgccttggtcaggatatagcggagcggatcgaacacgccgccgtcctcgtccggaagggaagcggtttccagcacttgtgaggaatagagggcccggtcccctttcgacagcgggacgaacacggtgttgaaatcccattccagcatcgaggccagggccgcgtcgatctgtcccttgacggttccagccgtatccttgtccgaggtccagtaatcggtcccggctgtcagaaacgccccccgcatctcgacgggatatgcgtacacgggctccggctccggttcaggttccggaggcgcgggctcctcgctcagcggcgaagaggggtccggcggcgcggaaacatccgacgcggccggagggccgaacacccccgccagcgtctcgagcagcccattgtgcaggagcaggacggccagcacaatgatcagcacggcaccggccgaaatggccgagccgatgaggagttttttggggacaggcgcgcgccgcgcatgttttgccataccggataccaaacctttccgcccgaacgggccgtttccaatttcctgttaccggagaagggggagcagattttccgcttcttccctggcggattcaaaatacgtatagctatagaaaatcatacccggaacctttttcgcccgcaggtattccaccgatcgtttcatgatatcgttatgggtcgcccactcatttcgtcccgaaccggcccatgtatcgtcggcaatcccgcccttgtagatcgccagccccacgtacagctgcactccggacgcacggggcagggcaaaccattgatccaccatcttatcaaacggagaactcccgtggagaaagccgaagtagatctgcgggcacatataatcgacatagcccggctgggcaagccatttgtgcgtatccgcgtacatctgggaataggttttattataatcatgggagggagaaaccccgaacacgatattcttggcatgcgccacctggtaactgccggagatgagcgcatccacggcggcgcgccgccagtcggccacgctcagcttccttccggatgccgcatagtccgcctcttcaaagctttcaaccgatgaggacatcagcccggtcggataaaagtaatcgtcatactggatcccatcgatcgcgtagttcagggtcagctcccgcagtccgtcgaggatcagcttctgcgcgccggcagaggtggggacgtaataatatttgtctcccttctggaaatagtccaccccggagacacgataggacagattggaaccgatccggtacgggttaacccaggcgtggagctgcagcccccggctgtgggcggaggcgacggcataggccagagggtcgaagccgttgcctatgagattggccactgaggcggccggcttgaacagggacgatttataataggcgtcgctgttggcgcgcacatggaaaaagaccgtgttgagcccatatgacacgcagttgtccataatctggtcaatcgcgagcttggcggccgattccgtcttgtttttgaatatcgtattcagctctatgtaagacacccatacacccttcatctcggagggggcaggcggggacggcgggttggtcggcgcagccgtggtcgccgtactcccactgccggaagcggccggcgtggtgacggccgtcgacggccgtgttcccgacgatgcggacggcccctgtgaggcatccgacgaggatccgtccgtgacggcagaaccggtggtgtcctcccccgtcgtgtcggcctgcgtatccgacgcatccgtcgtatagctcgtcccgatggtaccgagagtctgcaccgtttccccgccgctgctctcgggaagggtataggggcggaaacagcccgtttggaaacaaagagccgcggccaaaaagagcggcccgactagtttgagacgtctcatcctcttcctcccatgtcccataaaaacaagattgcctattttatattctactgcctgtgaccattccggtcaaccggttccgacaaattctttgctttttccatactttaacagccgtcagtatggccggccgcccctatccccggagccgcggctcatgccggataaccgtcggttcgtgtgacgcggttcgggccgcttcgccccggcggctccctaagccggacaacctatggccgatttcccgcttgacagcaaaccttccgcgtcctatgataccatatgacctgaacgaacacgatagaacgcggggagggatatggtatgcctgccgtcatacagcctatcggcctgccgctctggattccggccgcttatctggcgctcatcagccttgtctcggtctgtgccaccgtctgggataaatgcgccgcccgccgccaccgccgccggattccggaggcgaacctcttgctattggggctgctgggcgggagcttgtgcatgttcatcaccatgaaagcgatccgccataagaccttgcacaaaaaatttatgatcgggcttcccctgatcctggcactacagctgtttttaatcgccgccctctggttccttcccgccttccgccatgcataacaaaagccgtctgcccctggcagacggcttttgatcccttcctattctttgtcctcaagaagggtgctgatcgcctcatgaaacgagttgatatccttgaactgccggtaaacggaagcgaaccgcacatacgcgacttcatcgatggccttgagcttctccatcgcatactccccgataaccgtggccgatacttccctttcgagggagttctggagctgcatctcgatatcgtccactgccttttccagcgtttcgatggagaccggccgtttctcacaggcccgcagcataccattgaatagcttgttccggtcgaataattcccgcgaccggtctttttttaccacaataatgggaagattctccaccgcttcataggtggtaaatcggttggcacaactcaggcattctctgcggcggcggattcgggaatcctcatccgtcggccgggaatcgatgaccttactctccgcgtagccgcaataaggacatttcatggcaatcacctctggcaaaaatccacacacatattgatagacggtatatccttgtatgtccttggatgattataccatatttgtttttctaatagcaaccttattttataaaaaaggagggccgtatacctctcctaaataatcgtctaccagaaacggtatctcttccgggtccaccgttttctgtttcagcctctcgccaaagccgaccaccacgtcacggttgcggtcaaggtcggaaatttccaccactggctgaccacggacaagtaatttcaaaccgtaggtttccatttccgacacgccttccgttcggcatgtacttgtcgctatttcgtagtcgtcaacatttgcgaacactctctcattcctcttcttctccatagaatttgtgtgcgattttcaccgcatcttaaaatagcatttcgggtaacacttgtcaatgttaatcctatgaagaacctatactcgctcaaaaatactaaaatattttaaaataattaaggataatttcccaatcattaggcactgacttgtgaaaaaacgagattatttttcacattatctgaaaaatctgctcttccaggaaaaggcggctatctacaagatcctgcgctttttcgaaattgccgcggtaaagctccaccaccattgtgccgtggaaccgctgttcacgcaagcgggatatcagccgctggaaatcggtttctccccgtccgggcggcaggcagtcccgttcggcatcatggtcactgacgtgtacatgcgcgatgtgttcccccatcgcctctatcacatcgtcgagcgtatggccgcatcgcaccgcctgcttgaggtcgaggacgaaatgggctttttcgccgagcctgtcccgcatggcccgcagataggcattatccgacgaccggaaccgcaccacattttcctgcgcgagccggactccgtaccgtaccccgcaatcatataactcttcaaaacgggaaatggactcttccatgggaagcacactgtcctgccggtctccgtgcatcaccacaatagaggcgcccagttccgccgcagcctcgaaaaaacgggtatacaacgccttgccgtcctcaaatcgcctggcataggcggaatagagcaaaaacggctcgtatccagaggaataggggtgcagggacacaatccgtgccccggctgcatcggccttttgccggagcatatgggtaaaacgcggcgacagctccgactctgtgttgacgaacacttccaaagtgcgaaatccgcacgacaatacatgatccaatgccttctccgtcagttccggatagaaattggctgtagacgctccgattctgatcatacgcaaccctttccatggcaaatcttgtccattgagacagaggaggtgccatgttacaattggagtagaatgagccatccataaaggggctcccattcagtatagcatgaccaatccatcctgaaaagagcaaggggctggtaatcttgaaaatggcaaaggcttgtatggccttcatacgggagcaggtctcgtccttccatcaattttcccggtacatacttcagggggccttgcagttcaccgccgtcttgtatctggccgcagggataacctatcggatcgccctctatgttcccaaccccttacaggccctggcgtattcggacggcttcctttcgattgcgccggtggttttggcaagcggcgtcatcgcggctctgatcagcgatctggtgcttcgcaaaaacaatgccgataaaaaggaaaagtgactgcatcctgatccgcttacctccccattctcagggcgtattcctatacaccgagggtttcagccatggacgctgcggatttgttgccctgcatggagacagagcggcctaaaacatagacccatcgtaagggacggggcggcttttgtgccgccgcgtgagcttgtcgacaaagtcgacaagctgctggacggggacgccggatcacggcggttcgctttcgctcaccttgttccctctgcccccgccaggtccacccctactcttgacaaagggtggaaacacggagtgtttccgccctttatcgcttataaggagtgttttcgaggcccgtgtcctcgaa

SEQ ID NO: 3038 - DNA, 17614 bp, Unknown
  16S sequences of unknown bacteria
tgccggaaggacgggccaaagtggaattttcctccccggtgcgggctccctcccccggtcagtcggcggttttttaccaggatggccgggtcatcggcggcgggtatattgaaaaacagccctgtttataaaaatttttcgtgcaatgagagaaattgtctgatataataaatccgaatgtggagcagtctgcatttttgaccctggataccaagagttttgtatagaaacacataaggagtgtagaaaatgcataagtacgtttacctgttttccgagggcaacggcaatatgcgtgagctgctgggcggcaaaggtgccaacctggctgagatgaccaatctcggcatgcctgtgccccagggcttcaccatttccaccgaagcctgcacccgttactatgaagacggggagaagatcgctcaggacatcgaggatcagatctacgaatacctgaagaagatggaagagatcaccggcaagaagttcggcgatccccacaatcctctgctggtttccgttcgttccggctcccgggcctccatgcccggcatgatggacaccatcctgaacctgggcctcaacgacgaagtggtggaatccttcgccaagatcaccggcaacccccgttttgcctatgacagctatcgccgcttcatccagatgtattccgatgtggttatggaagtgggcaagaagtatttcgaagagctcatcgacgagatgaaggccgaaaagggcgtcaagctggacaccgagctggatgccgacgacctgaagaagctggccgagcagttcaaggctgaatacaaggccaagctgggcgtggacttcccctccgatccccgtgagcagctgatgggcgctgtcaaggcggttttccgctcctggaacaaccagcgtgctatcgtctatcgccgcatgaacgacatccccagctcctggggcaccgccgtcaatgtccagtccatggtcttcggcaacaccggcgatgaaagcggtacaggcgttgcctttacccgtaaccccgccaccggcgatcctcacctttatggcgagttcctgatgaacgcccagggcgaagatgtggtggccggcatccggactcctcagtccattgaccagctgaaagaggtcatgcccgaagtgtatgagcagtttgccgccattgccgacaagctggaaaagcactataaagatatgcaggacatggagtttaccatcgaaaagggcaagctctatatgctccagaccagaaacggcaagcgtaccgctcaggccgctctgaagatcgccgtggacatggtggacgaaggcatgctcaccaaggaagaggccatcatgaaggtggagcccaagcagctggacgctctgctccatccccagtttgacgccgagtccctgaaggccgctacccctgtcaccaagggtctgcccgcctcccccggcgctgcctgcggcaaggtctatttcaccgccgctgaggctgtggccgcggctcaggacggcaacaaggtggttctggtccgtctggaaacctctcccgaagacatcgaaggcatggccgcggctcagggcgttatgaccgtccgcggtggtatgacctctcacgctgccgttgtggctcgcggcatgggcacttgctgcgtggctggctgcggcgaagtgaagatgaacgaagaggagaagtacttcctcatcggcgacaagaaggtctgcgaaggggattacatctccatcgacggttccaccggcaatgtgtacctgggcgagatcaagaccgttcccgcttccatgaccggcgactttggccgcttcatgggctgggccgacgagatccgcaccctgaaggtgtgcaccaacgccgatactcctcgggatgctgagcaggctgtccgttttggcgccgaaggcatcggcctgtgccgtaccgagcatatgttcttcgaagccgaccgtatcaaggccatgcgtgagatgatcgtctccaagaacgaagagcagcgccgcaaggctctggagaagctgctgcccatgcagcgcggtgactttgaaggcctgttcatggccatgggcggccgcccggtcaccatccgcttcctggatccccctctccatgagttcctgccccaggaggaagaggacatcatcgagatcgccggcgagatgaatatgtctgtggccgatctgaagcagatcatcgccgatctccatgagttcaaccccatgctgggtcatcgtggctgccgtctggccgtcacttatccggaaatcgctgagatgcagacccgtgctgttatcgaggctgccatcaatgtgaagaaggccaccggcctggatatcgagcccgagatcatgatccctctggtgggcatggtcaacgagctgaagtttgtcaagaatgtggtcaccaagaccgccgatgagatcatcgctcagtccggtgtggaaatgaagtacctggtgggcaccatgatcgagatcccccgggccgctgtcaccgccgacgagatcgctcaggaagctgagttcttctccttcggcaccaacgacctgacccagatgggcttcggcttctcccgtgacgatgtgggcaagatcctcaacgcttactatgacaagaagatcatggagcgggatcccttcgcctctctggaccaggatggcattggccagctggtgaagatggctgtggaaaagggcaagaagacccgtcccgacatcaagctgggcgtctgcggcgagcatggcggcgatccggcctctgtggaattcttccacaagatcggtctgaactatgtgtcctgctccccctatcgtgtgcccatcgcccgtctggcggctgctcaggccagagccaaggaactgctgaacaagtaagtcttggttccgatagactgaattgttgctgcaaagcatcatataaaaagcgtggcccaggaattttatcctgggccacgcttttttgctgaaaaatgccagaagggcctgcttttcaggcaggcccttcctatttcaggttcagtgacggggcgattgcttcacgatctgggccgcacggatcagggccgcctgtacatcggcatggaattgggcctttgcactggccactttgctgaaagtgaggccgctgatggtggaaatataacggggcggcagattgttcagcgccaaagcgacgatatcgctgtgacactgctcgcaggaacacgcatccaaacggtctttgatggcgttgtactgctcttccaccacatcttccatgatattgtggtaagaactcatggtgctcatccctttccaatttttgaatattttatcacagctttgggccaatgtaaagaaagcctccggcggcctctttttgttgctttatgaacaaagcgcaatgatctctttcttttttacaaaaagttatccccaggggttatccacaccctgtggaaacttcctggggacaacttagcatatcttgtggttacttgccgaaaaaggcggtgaagagggcgtcttgttccgcaaagtggatcacatagccgatagccacttttccctcggtcagggcgatcagctcccgggttttctccggaccgaaagcgccgcacacttcaatggcgccgcagcctttttggtacagatcctgtacccgctttttggcttgctcccagttttgcacggtgtagatgtaggtgtgtttgctttcggtttcaaaatgggcctggtccttttccggatcgtattgggctcccatgaggataaaagcaaaaatgggtttcatctggtgtactcctttcctgttacagctggattttttgtccgatgcccttttccatggccttctgggcgatggcctgggcggcaatcagatcgaacagcgccatgcccaccgttttgaaaaaggcggtctccccttcttttggctttgtcgcctgaccggccaaaagctgacccatggtggtgacctgatccatggtcagaagcccttcgtgcaaaggctgactcagatcgccgctttcctcgcaggcaaaggggagatccacatagacctgggaaagcaaagaccacaggcaggggggatattcccgcatggtgggtttataagagcctacgccaatgcagcattttccggcaaaaagggcactgtcatcagggagaaccggttcattggatgtggtggccgtgatgaggatctggctttgccgggcggcttcttgggaggaggcgcagaaagtgacgggaggatgattttcccccagaacttcctccagcctgtggataaatggcgccgggtccttggcataggcatcgtatacatagatgtgcccgatgggccgggcggcacaggcaaaggcggcctggttggccccctgtacgccggcgccgatgacggccagagtgtgggcatcggccggggacagatggcgcaccgccacacctcccacgccaccggtgcgcagggcggtgagggctttgccgtccatcatcacctgggggataccggtgtcataatcgcacaaaagcatcagtccgtcgatggcgggaaggccccgctgggtgttttccgggaaaacagtgagaatcttctggcccatggccccatcggcaaagcaaggcatatagacgatggttttgttctggtattccacggtggggcgatcgggcatgaagtagtttccggccgtaaaaagcccataggctttttcaatggcctccatcatctcctgaggggtgatggagcggatgatgtcctgtttgtttaaataaagcatggcgcttccctccttttgccttcatgatactccatggaaggcaaaaagaaaagcctttgggaagaaatgaaaaaggccggaaaaacaaaaaaaagaaaagtacccccaggggaaatgttcacaatccatgctgacacatggcagaccgttgtggtataataaccgcagaacggttattataccggattttgcggccgttttctcgtctcgcaagcgggacaaccgaaaacacggccattataccacttcgctttcgctttgtggtataatatcaacagttgccgcacatgtgcggcaggatactgtgtattcagtcgttttgctcacaaaacgactgctgttgatgttacaccatagccaaaatcggcaaagccgattttgcaccgcattggcggcgtgcaagtctgcatggacttgccgctatggtataataaaacagtctggagatcttctcctggcagtgatcgttaaaaaaacaacaatatgtcccatcaaataacaaaggatagagggtgttgcgaacatggaaaaaaacaaggaactgcgggtgttcgccgaagagatccgggtggagaccatcaaagagctggcccatctgggatttggccatgtaggcggctccatgtcggtggtggagaccctggcggtgctctacggcagccagatgaactatgatcccaagaatcccaccatggaacaaagagaccggctggtgatgagcaaagggcacgcaggcccggccctctatgccaccctggctctcaagggcttcttccccctggagcggctgaagacgctcaatcagaacggcaccacactgcccagccactgcgaccggctgaagacccccggcgtggacatgaccaccggatctctgggccagggcatctccatggcgctgggcctggctctgggcgctaaaatgcggggcaaggactttaccacctacctgatcctgggcgacggcgagtgcgatgaaggccaggtgtgggagggcgctctgtccgccgcccatctgaagctggacaatctcatcgcctttgtggactggaacaagcagcagttggacggcgctgtggacgatgtgctggacctgggcgacatcggacagaaattcgaggatttcggctggcatgtgcagaaggtcaacggccacgatatcgacgctttgctggaagcggtggaaagcgccaaagcccataagggccagccttccatgatcgtgctggacaccatcaagggcaacggctgccgtttggctatggagaccttcccctgccaccatctgaaattcaagcccgagcagatcgccccctcggtgatcgaggccgaacaggtgctggccaaggcccgggaagcgctggaggtgcggtaaaatgagctacaaagtgaaagagactctgaaaaacgaagagaaagaaatgcgggcagtgtattgcaagactctgtgcgacatggcccgggaagacagccgcatctgcgctctggacgccgacctgatcggctcctccggtatgcaggctttcttcaaagagttccccgatcgggctgtggactgcggcatccaggaagccaacatggtgggtatggccgctggcctgtccgccgccggcatggttccctttgcccattcctttgctccctttgccacccgccgggtgatggaccagatcttcatctcctgcgcctatggcaagcagaatgtgcgcatcgtgggttccgatcctggtgtcacagcggcttataacggcggcacccatatgccttttgaggacatgggctgcctgatgagcattcccaagatcaccctgatcgagccctgcgacagcgtgcagctggagcaggtgatcaaaatgcttcaggacgcatacggcgtcttctatatccggatgctgcggaaaaatgccgtgggcatctatgaggaaggctccaccttcaccctgggcaaggctcccgtgctgcgggagggcaccgatgtgtgcatcgccgcctcgggcatcatggtcagcgaggctctgaaggccgccaaggtgctggaagaacagggcatttccgccgccgtcatcgactgcttcacctggaagcctctggacgatgacaccatcggcaattatgcccagaagtgcggcgcttttgttaccgccgaaaaccacaatgtggtgggcggcctgggcagcgctgtggctgcatctctggccaagagccatccggtgcctgtggaaatggtaggcgtgcaggatgagttcggcgaagtgggtaccgtggattacctccaggagcgcttcggtctcaccgccgcggctatcgtctctgctgctcagaaggccatcagccggaaataacattgtttttcctattttatcaaaatataaaaggagaatctgtactatggacatcaaggaacgggctctcaaggcccacgaggactggaagggcaagatcgaagtcatcgcccgctgcaaggtggaaaacgccgacgacctgaccgtggcctacacccccggcgttgctgagccctgcctggaaatcagcaaggatgtggacctgagctataaatatacccgccgtggcaacctggttgccgttgttaccgatggcaccgctgtgctgggcctgggcgacatcggccccgaagccggtatgcctgtgatggagggcaagtgcgccctgtttaagtcctttgccgatgtggatgccttccccctctgcgtgcgcagcaagaatgtggacgacatcgtcaacaccgtcaagctgctggccggttctttcggcggcatcaacctggaggatatctccgctccccgctgctttgagatcgagcgccgcctgaaggaagagtgcgatattcccatcttccacgatgaccagcacggtactgcgatcatcactgctgcagcgatgatcaacgccagccgtctcaccggcaagaagctgagcgatctgaccatggtggtgtccggcgccggcgctgctgctgtggctgttacccgcctgctgctgtccatgggcattggcgacgcgatcctggtcaaccgtggcggcgctgtctatgacggccgcaccgatctcaaccccgagatcgccgctatggctaagatcaccaacaagaacaagaagcagggcactctggccgatgtggtcaagggcgctgatgtgttcctgggcctgtctgctcctggcgtgctcaccgccgagatggtggctaccatgaacaaggaccccatggtctttgcctgcgccaaccctgtgcctgagatctatcccgaagaggccaagaagggcggcgctgccgttatcggcaccggccgcagcgactatcccaaccagatcaacaatgttctggccttccctggcgtgttccgtggcgctctggatgtgcgtgccagcgacatcaacgatgagatgaaggccgctgctgcctatgctatcgctgacatcgtctcccccgaggagctgaatcccgactacatcctccccgcagctttcgatcccagagtggctcccgctgtggctaaggctgtggccgaagcggctcgcaagagcggcgttgcccgcatctagcacagtgcctgtgcacccatactggccgctcgccagcctgtgtggataaaaaggctgtgttttcgcccggccgcttgcctgagcgggacaactgcccgcatctagcgcagagcctgcgcacccatattggccggtcaccagcctgtgtggataaaaaggctgtgttttcgcccggccgcttggctgggtgggataatagcccgcatctagcgcagtgtctgcgcacccatactggccgcttggctgggtgtgcagctgatcaataacaaaaggacgcttggataaaatccaagcgtcctttttgtttatggaaatctctataagtacttataaatgctatcgttttttcgaataatggattacagcataaaaaagttgtgatataattaacaagccctggggaaaagtgagatgttcaggaggtaaaagatatgaaagtcaatgcaaaatccatcaatctgacaaaaattcagaaggaagcggaagaatcgttccgcaaaggcttcttttgctgtgaagcggtgatggaaatcatccgttccaattttgaattggatgtgccggaagatgtgatccgcatggcttccggtatggccatcggtgtgggcaagtcgggctgtatctgcggcgctctcaacggcggtgttctggccatcggtatgttctttggccgcaccgagcacaaaggccccaccgatcccaatgtggtcaagtgcatgagtctgaccaaggagcttcatgattggttcaaggagaataacaccaaaggtgttacctgttgccgtatcctcacccgcgagtttgatatgtcccaaggcggtcacaagagccagtgcatttattacaccggcatttgtgcagccaaggccgctgagatcatcgccagagagctgggcattcccaccgaaggagagatcaccgtccggccctatgaggagtacatcaaaaccagagtggctccgctggaggcatagtgcagcatgaatgtattcaagaaagttcccatccctatttgtgctgtgatattgggcatgttcggcctgggcaatctgctccagtcctactccgaaggcgttcggctgttgtgcggggccgtgggagcagtgctgatggtgatgtttttgatccgtgtactgctggattggaaaaagttttgcaatgaaatggaaaatcccatcatggccagcgtgttctgtgcctttcccatggctgtgatgatgctggccacttatgtgaaaccctatattggttctccggccaaagcaatttggtttgtgggtgtggccgtccatgtgatgatgatcctctatttcactgtgaagtttctgctgcatttttcgctggaaaaggtttttgccagctggtttatcgtctatgtgggtattgccatggccgggatcactgcaccggcctttgggaccgagtccatcggatcggcctgtgtctggtttggcattgtggctctggtggtcctgctgattttggtgaccatgcggtatgtgaaaaggccggttcccgatccggccaagccggtcatctgtatttatgccgcacctaccagtctgtgcattgccgggtatattcagtcggtcacacccaagtccttgtccctgctcactgttttgtgggccgtggcgacggtactctttgtgatggcctgtatcaagtttgtgcaatattggaagctgcccttcttccccagctattccgcctatacctttccctttgtcatcagcgccatcgcttccaaacagctgatggcttgcgcggccaatctgggaaatcccatggcctttttgaatacggtggtattggtggagaccatcatcgccacttgcaccaccctttatgccttgattcggtatctgatctttctgtttcaagaacctaagcaggcagcgaaataaatcgaaaaaatgcctgagagttaatctcaggcatttttctgcgcaaagtatccacaatacttgtccacaggttgtggataaaaaaaccgccggttttgtccggcggtttttttgcatctggttatcgctataagggaattgtcatgccatccagcaagcgcagaatggaaagcaccagcgtggcggcaaaacacaaaatggccaagatgaaaaaggtcttgtagtgcttttcttttttcagacagatgctgccgatgagaaagcacaaaacacccagggccaaaggggtcagttccataaatccaaagaaaagcttagttgatctctactttttcggcctgctcggggaaaaagtcgttgtccagatcgtagatgttgtgggtggtggagtcacggagcacccggccttccagagagtagcagcggatgaacttcttaccgtccacggtagtccagttctctgcatcccaggtgaggtagccgtcgccatcggtcttcttctgggcaaacttcaggtcgatctgccggttgttgagcatcaggtcgatcaggcccttccggtccacttccacttcctgcttgtggatcatatcatatgctttcattgtttttcctccatcatcattaaagtgtgtagctttattatagcatccctgtgggattttgcaaccaactctggggcaagggatcagtttttgacggccgtttggagataaggggcgggagtgggttcatcctgggtgagggtctgctccacgctccagtaaaaggccttttcccctgcttgctgggtgatgccgctgcggtccatcatttgccgcaccgagggagacacgccgcagaggaatacctgggcctgctggttttgtgtttggcgcagcagatccaggaaagcctgggcgccggagatatccatataggagacgccccgcatggaaaagatcacgctggaaaagccgcttacctgctggccgatctcttcgatcatctgggtgttggaaaacaggatggagccggtgatatagaccacccgggcgttttcggcccggtgagccagaagggcgtcgggggcggccaggcgatgaggaagcacatcttcgtagttgacctgaagttccgactgccgcacggccagcagcaccagagacaccacaatgcccagcagaatggccaccgtcaggtcaaagaggatggtggcggccatggtcaccaggaatttcagaatagcgcctttgaattttttggagaaaatatagcggatggtcttccactcgtttatccgccaggcggtgaccatcagcaccccggccaaagcgcacagagggatctgtcccatcaccggccccagggccagcatggagatcagcaggaaaagggcgtggaacacaccggtgagccgggtgcgggcgccggattttaccgccacactggtacgggcaatggccgcagtggccgggatgccgccaaacagcggggtgaggatgttgccgataccctgggccagaagctcccggtcattgtccaacttgacgccggtcatccggctggcgctggctccgcagagcaggctttccaccatgcccaaagcggcaatgctgatggccggagccagcaatccgctcaaggtgttcagatccagagaaagcaggtcaagccgctgaggcagcatgagagaggaagggatttcccccacggtgtttacaggcagcttcagcagcatggaagcggctgtggccaggatgatggcaaccagggatgcaggcaccacgctgttccactttttcgggaaaaacaccatgaagagcaccacaaaaacaccgatggccacagcggtccagttggggtcaaagccatgggtgaagtatccccccactttctgaataacagagccttcaatggaggtgacgccaaagaagttgtccacttgccccagggcgatgatcacggcgatgcccgaagtgaagccggtgatgaccggcatggggataaaagctgtgagccgtcccagtttgaacagtccggcgattaccagcaaaataccggccaggaaggtggcctggaagacaccgttcaggccatactgggccacaacagaggtgaggatggcggccatagctcctgtggggccggagatctgataaaaagccccgcccaaaagggcgatgatggcgccggccacaatggcggtaagcaggccggaggccgccgaagcgccgctgctgacgccgaaggccagggccaggggcagcgccaccgccgctaccgtcaggccggccatcacatcggacagcagtcctttggcgttgtagcctgcaaattccttctttagatcctgtgcatacttttgcagcattttgttattccccccggaataggttttctttcctcctgcaaacgggaaaaagtataaaaatgcaaaaaaagtatatcatggcggtgaacaaaaggcaagaaattccagaaaaacagggatattttttcagtatgacaaaaaaattccccaggcggcaagccgcctggggataatgatacagggaaatttgactactgagcgtcagcaaagcgcaccaacatggtggcggcctcagcacgggtaacagaattctggggattcagcttgccttcgctgccctggagcacgcccagacccacacagtactccatagcatcctgggcccagtcggacaccgaggcgctgtcagagaaatcggtgagggccgaagagggttcttccggcgcgccgctgtactgatacagcatataggccagctcctgccgggtcaccaaagcgttggggtccatggtggtgctgtccatattggccagaattcccttttcatagcaccagatggcgccgttggtataccactgaccggcaggcacatcggtaaagggattgtcgatggtcacctggggagaaccagccatacggtagagcacggtggccagcatgccccgggtcatggtgccgctgggggtaaaggtgttgttgccggtgccgttgaaatagccccgtttgacgcaggtgttcacatagtccttggcccaatgccagcgcatatcggtgaagggggtgtcatagatggtggagcccaccaggtcgtaggcgcacaccgaacggtaagaggtgttgaggatgacctcatattccccatcgccgtccacatccttcacagcgggagctgctttgacgccgttggtctgataagcgcccagatagccgggatattcggcaggcagctgggtgcgggagatcagcttcagatcgctgtccaggatgtacagcgagccgttgacaccggtgttttcgctggtggtgtcgtggttgggattggtgatgctgtcggtccaggagccaaagatgatctccttcttgccgtcgccgttgatgtccacacaggtgggctgggcggcatattcggcaatggtggaggtggtagccggcagggtgaagctcttcatggtctgatccaaggagaagcaatagagtttgccgtcaaaggaattgaacaggatctccttgttgccgtctccatccagatcggcggtgacaggctcgggcagcacaaaggaggagccggagttctggcaatccttgatgcgggcgcccagattggtgggaatggtggtccagtcaaagcccttttcggtgttctggtagcgggtgcggtcgccgttgaaaacggccacggacatgcacaggctgtccagccagaaggcattggagatggagttggtatccatgacgataccggtgaccaccacttcgtttttaccgtcgccgtccaggtcgtcgatcaccgagccggcatggccgaattccatgcacagacgctctttcatatccactttgccctggtcggtgtcccagccccgctgggccacggtcttttcatggtcgtagtcgatgtaggtacggatggaaccccaggggctgtcgccgaaggtttcggcatcggccatgatgagagagccgtccagctcaaaagcctggatgcaccggttgtcggtgggagcaatgatctccggcaggccatcgccatcgatgtcgccggtggaaatgccgttggcaaagatgccgtagctttccgcctgatcctgctggtcgggagaaagctggggccagtgggggaagagaacgccgtagcagtcgtagacccacacagaggcctcggagttgacaccggcgcctacaacgatctcacaggtgccgtcgccgtcaaagtcgtccacggccagagaccggataaagctgtccacttccagatacttgggccagcccttcttgaaatagccgttgtgatccagcacagagatgagatttttgtgggtggagatgatttccacatagccgtcgccgtcgatgtccttcaccacgggagagcaccaggcgccggaatagtgggcggagggttcgctgttatagggggtggaacggtccttgccggagtccacctgccacagagtcttgccgctctgggcgtcggtgacggtaatggcgaaggatacgctgaccacttcgtcccggccgtccttattgatgtcggccaccaccggctcggcataataagccaggttggtgtatttggcatgggccgcgccggaatagagatacttggtcttgacagacacagacgaggcggccttggccggagagggacacagggaaatgcaaagcacccctgccatgagcccggctaccagccgggaaagggcttttttcacaataccttcctccttatactgtttacaaaaatttaaaattcccttcaattaacaatataaaccgaacccccggtttcgtcaagacgagaaccgggggtttatttgtaaaaaacttgatggagtaaatggggttggcctctcccctttttccctgcctgtctatgtcaatgggaagcaggagaaaaggactcttcctgcttttgacggcgggagcgggtgtacagcagccacttgccaaagccatagcaggtgttgaccagcatggccgccacggtgatcagcatgatgtagctgcccgagatgacatacagggcggtgtagagcagcagggtgacaaaccaggcataccactgttcggtgtagcggagcaggagcaaaatgccgttggcaatgccgcaggcgctggccaaggcatccaggaaggagtcttcggccccggggatcatctggatcagctggcctaccaccaggccaaagaccagaatgccggcgatcaccagaatatcctgtttccagctcaggcgcttgaccacggtcagctcctgctggacttcatcggggtggcgcttccagcgcaggaagctgatgatgtcgatgggaatccagaaggccacagtgatgatggcgatggtgtaccagcccagggccacacacagcaccagctcggggatctcgatgaaaaacaggtccaccataaaattcagtttgctttgtttggagatcagaagctcacacaccggattggccaggacggcgatcaccgaacagaccaccacaaaggaattggacatatcctccagcatcatatcgggcaggaagatggtaaagccgatggtcagcagcagcaccacagtgaggtagccgatctggtaaggggtaaagcttttgagaaatgccttgaacggggatgaagttttcatgaaaaagtgtcctctcttttgaattttaaagggaaagccagcggcccagccgagggaaggcccgcaggcagttttgataatagatggcgtcaaaagtctccggcgggaaaatcttttcgatggtctcgtcgtattcctccagctgaccaagattgaggggcgggcagaagtcagtgccatagaggaactgcttccaaagatccggctgggacagaagggcctggcggaaagtggcgatggctccctgcacatcgtttccctctttggtaccggtttcataggcgccggatacatcggtgaacaggtttttatgccggtgcagtagggcggcgcactccataaagcgggggtcgtccatatgggcaatgatgaaattcacctctgggaaacgctgggccgcttgggcgatgtacttggcctgggagccctccatgtcattttccgacgggaggaccagagaacaaaggccggtgtggaaggtcaccgccagctggtgctgacgggcaaattcatagatgggggtcatcttttcgtcacaggcccttcccttctggtaggtcagatagaccttgaggcctaccaccttccactcatccagatggggttccagctcactgagctggggcgggatggggcgatggagatccacacaggggcacagaaacagccgggggtcggacagcaccgtttggatgcactggggattttccatcaggccggggggaaactgcatcaccagagcgaacccttgggcacgctgaaaatactcgtcccggatggccggggacacgatgtgggtatggcaatcgatcctggggcgcacagaaaacacctttcttttttccttttgcagcaaaggaggaatgaggaaaccgcaaaaaaagagcctggggcaaacaatgccaaggctctttttggtgccgctgaccgggatcgaaccggtacggtcaaaagaccgagggattttaagtcccttgcgtctgcctgtttcgccacagcggcaggaagcggaaaccaggaattagtatagcacgctccgcccctctccgtcaagaataggggggaaagacctacatcacagggctttttgccgggattttgccacaaatttgtccatgtccacaatgaagcgttcatggtctccccggctgaccacctcacgctcgtcctttacttcgatctgaaaaaccaggcggcggccttccacttctttcagacggcaggaagcggtcaccgtcattcccaccagtgtgggggcctcatgggtgatgttgacaccggtgcccacagtggtctgtcccggctccagatgatccatcacacattcatagcaggtgttttcgatgatggccagcagcaccggcgtggccagcaccggaaccagcccgggccgcagggcgccggccgtcatgttttcttccactttcacctttgtctcatgggtcagtcctgttttcagcatggtttcgtctcctttgcgtggtctgtaaagaaagtatagcaaaaatcccttttccccacaagaaaggggagggtttcccctccccttagcgtgtcgaaaaagtggcttaggccactttttcgagtttttgcaaggggctgtatgcacgcctttggcgcacacttgccccttgagaagtgcaaaaagccacgcacaggtcgcggctttttgcggattgataggggtagggcggacgacccttttcgttatataggtttttcgacagtctga

SEQ ID NO: 3039 - DNA, 8583 bp, Unknown
  16S sequences of unknown bacteria
ccgtcgttccccgcgcccccgtcacgccccgcggccccccgcgctccccgccccccccgcgccccattccccccttgccaatccccgccggatgcggtatgatagtgctccccccgaacgcattgaaacgcgttaaaacgcattgaaacaggaaaggacggtaacacacccatggccgacgaacgcaagacccttcaggaaatgacctccgaccagcccgagcgcgagaagcgcgaccgcaagaactgggtggcctttgtcgaaagcgacgtggtcaacttcctccagctcaacgacatcgagaagatgaccatcgacgacggcgaaggcaacaaggccaagctcacgcgccgcaaggacggcagcgtctacgtggagtgcaccagctccaacgttctgtaaggagcgcccatgaatcatttttttgcctatctggaccgtctcaagctgatttgccgctgggggctgatgcgcaacaccgtccccgagaacgacatggagcacagcatgcagacggcgctgattgcgcacgggctggcggtgctgggcaagacgcggcaccagcgggacatcgatccggcgcacgtggtggtgctggcgctgtaccatgacgtgggcgaggtcatcaccggcgatctgcccacgcccgtcaagtacaagacgccgggcattcaggacgcgtacgcggcggtggaggcggatgcgcgctctcagctgatggacatgcttcccgaggacatgcgtccggccttccggccctttgtcgatcccaaccagaccacctacgaatggcggctggtcaaggcggcggaccgcatcagcgcctacctcaagtgcattgaggaagagaagatgggcaaccgggactttgctcacgccaagctgacgatttacgacagcatcagtcagaatcccctcccggaggtccacgaattcatgcgcgagtttgtcccctccttctccctgacccccgacgagctttccaggtccagggactgaccagggggtgaccagggggtgaccccctggacccccgttccgccgggcacacggcaaaaaaaaacgccgtccccgcgtcccggcactcgtcaaccgtgcttgccggggggccgtgacggctcccgcgccccgtttcgccgggcacacggcaaaaaaaaaacgccgtccccgcgccagggggtgaccccctggacccccgttccgccgggacgttcaagaaaaacaatcgccgtccccgcgtcccggcaatcgtcaaccgtgcttaccggggggcgtgacggctcccgcgccccgttccgccgggcactcaccaaaaacaatcgccttccccgcgtcccagcgctcgtcaaccgtctctgcggggccgcaatcctcccttccgtggtcgtttatcccacggacatgcgtgttttctcattattcaaccgcttttcatggacaaaatcccacagccgtgggcgtttgtcccaagcgccgcattttttctgaaaatgtccaaaaagcccctgttgccttgcaggggctttttgttgcctgtttcacttttgaaattctgtttttcttttgttttcggctctgtgaatgcgcaaacgctatgcctcttcgtccatcaggcccagaattacatccgcacttacacggtagaacccgcataatgtaatgagatggcgcaacggcagctcattgattccgttttcataccgggaatacacctgctgcgtggtgcccagcaccagcgccacatcggattgcttcaaatcctgtccttcacgcaattcacgtaatttttcataatacggcttcattggcatacaccccttgtgggaaaagatcaacgcgcattctttatgtaaatattatacgtgaaaacttttcccagtgcaagccaatctactatttttttgcagttcttgtcatttactcccgttccagaatcatcacccgcacgccgggcagcagctggctcagcgtttcggcgatgccgcaggcctgcccgccaccgcccatgatgacatgccgcgcgccgcaatccgccgcatagttggcgatggccgtcaccggcacattggaggtcagcacgcacatttccgcgcccgcctcgcccgacagcgcatacaggtaatccagcgcctgcgcgttgatggcgggctctccgatcggtgccgcgtcggggttgaccacatgcagcaccttgaccggcctcccctcgcgcagggccagatcgaccccctcgcggatcagccgcgcacacgcatgctgcatcgtcaccagcaccagaaccggctccttttccaaatccacccgcctcccattcttccgtatccctcgcgcccgcctcacgcctgccagatcccgctcaccatcttgtcgttgctctccaccctcacgcgggtgccgatgggcagctgcggcgcgggcttctcgtcgtcgtagtaaaacaggcggtcgtcctcttcctcgccggagccaaggttgaccatcatcgcgtggcaccacagcccgtcgcgctcgcacagctccggggagaagcgggtcagcacgcccacggtttcgcgcttgcgtccataaagcatgcgttcgacatgatgcaggtaatccagcgcgggcttggcccacacgccgaacaggaacagaaacgccccgccgcccagcaccgtgagcgcggccgtggccatccacagcgtatcgctgcgccgcatctggcccaccacgaacagcgtgatccccgccgccagtccgacgatcatcggcaccagcgccagccccagccgctttttccacagccggcgcgcctggtcctcgtcctcacgcgtgtacatggttttgcctcacttttcgtcccgggtgtggatgtgctgcatcagcttgatcgtcacgaaaaacagcgtcagcaccacaaacacgcccgccagcccgcacaccgtggtgatgaggcccttggtcatcaggctcatgcctgcaagactcgcattcgtcatcgtcatgccctccttcttaccagatgccgcccagcagcatgctcaccagagagatcaccataccgcccgccacgatggagcccagctggccggacacgttggcgctgatggactgcatcaggataaagttgtaggggtcctcctccttggccatcttctggatgaccctggcgctcatggggaacgcggagatgcccgccgcgccgaccatggggttgatcttctttttgcggaatacgttgagcagcttggcaaacagcacgccgcccgccgtgtcgaacacgaaggcgaacaggcccagcgccaggatcagcagcgtgtccacgcgcaggaacttgtcggccaccatcgtgccgccgatggtgatgcccagcaggatcgtgaccaggttggccagctcgttctgggcggtcttgctcaggcggtccagcacgccgcactcgcggatgaggttgccgaacatgaggctgcccaccagcggcgcgctcatcggcacgatgatgcccgccaccgccgtgacgatgatcgggaacaggatcagggccagcttgctggcgcgctcctcgttgtaatccatgcggatcatgcgttcctttttggtggtcagcgcgcggatgacgggcggctggatcaccggcaccagcgacatatagctgtaggcggccacgctgatgggggccatgtagtccttgaggttgaagtgattggccacgtagagggtggtgggtccgtcggcggcgccgatgatgccgatggcgctggccagcctgaggatcaggttgtcattgccggcggtttcgggcagcaccacggggatcagcgccagcgacacaaggaacgtggcgaagatgccgaactgcgccgccgccccgaagaagatcatcgaggggtccttgagcaggggcgaaaaatcgatcatcgcgcccacggcgatgaagatcaggatcgggaacagctcgttggcgatgcccgcgttaaacagcacgctcagaaacccgttttcgcccagcacgcttgcggcggcctgcccgctcaccgcgtcgatcacgggcggcaggttggccagaatcgcgccaaagccgatgggcaacagcagcgtcggctcatagtcctttttgatcgccagatagatcagcaccccggcgatgacgaacatcaccagcgttttcagcccttccacggaaaacagatacgtcacacccgaaaacagctcacccagaatcagcccgatatccaaggcggttccaccccttttgttgtttttcctttccggttcgcatggccgcgaatcggtcctcattataccatcgcgggccgtcaaagtcaaagcgcccctgctccaaaaccgctttcttggcgctctcttgacaccccctgccggcccgcggttatttcctttttttatattgcgtttttgattaacatatgttacaataataaaggttatttccattttatatcatcgctgatgattatatgggggtatgtcgtgatgatctcgcgcagatggctttccctgcttctcgctctcctgcttctccttcccgccgccgcgctggcgtcctcagccgacgttgtgaaaaacgtcaccaccggcaaaacctacgccacccttcatgatgccgtaaccgaagcggcagcggggaacacgctcgccctgcaatccagcgtctccctttccaagccgcttgtcatcgacaagagcctcacgctggatttggggggcaatacgctcaaccttaccaaatgctccatcacgatgaatgcgccgggcgccgccctgacccttcgggccgccggcggcggcatcagcgggaccggcgctccctgcttcgacatcgaaaagggaaccctgaacattctctccggcgcctaccagtccgacgtcgccgtgatcagcaccgtcgagggtgtcatcaccgtcagcggcggcacgctggcgggcggcacgggcagctccggaaaccggcgcaccatctatagctacggtgccagcaagatccgccttgagaacaacgccgccgttaccaacgccaatgacgcctgcgtttccctctatggcggcgacctcacggtttccggcaatgcctctctgtcgggcgcccacggcgtactcctgttcaatgataaagacaacaccaccgccagcatccacagctccgtcaccatgacgggcggcaccgttacggcgacgaagtattttgcgctttccggcaacaaccttaagtccgccgggtccaaagcggtcatcaccggcggctccctttcctccccgtccaccaccacggccatctactggccgatggagggcaccctcaccatcggcggcaacgcgaccgtgaccggcggcaccgccatcgaggccaagatgggcaacatcaccatcaaagaccaggcggtcatcaccggcaccggcgcgtggaacgaaaacgagccggaaaacggcggttcctcccctgaaggctcggccctgttgctgtcgacgcagttgtacggtcaaaataaaggtcagttcatcgattctcccgacctgaccgtccagctcagcggcggccgcctcgtgagcgggaaaggcaacgccgtcaccgtattcaacaccgaaacaaacgacgagcccgcctctgtggccgtcaccggctcgcagctggagggccggcgtaccagcctgaaggtcatctcccccaacagcgccgttaccaacagcttcgtcaataacggcctcacctccacctctgacaagaccaccgtttccgtctccggcggcgcggctgccgccatcgcgggcagcgacggaaagtccgtcatcttctatcccacgctggacgccgccctcgctgccgccaaatccggcgaagtgctcgtcctctccgacaacggcctgacgccggaagtcctcaccaaccccgccataaagctcaccgtagcgcccggcgtgcagcttcgcgcagtctccggcgcggacggctataccctcacccaaacccgcaacgacaacggcagcatcacctatgccctcgaactaaatccgtacaagctcccgcagcccaacgtgaccgcctccctctccggcggcaagctcaccgcgaccgccaccacgcccacgcagggcgccaccttcatctaccagtggtatctcgacggcgcccccattcccggcgccaccgccgccaccttcacccccacgcagaagggcagctatcatgtggaggtacaggccgccgtcacccatcccgccaccggtaaggtcatgctctcccccatcgcaaggagcgccgccgtggcctttgatcctacgcctgcacccacgcccacgcctgcgcccacgcccacgcccgcgcctacagcctctcctaccgcagaccccgctcccgccgtcccgcccaagaccggcgacagcatgcccctcgcgctctgcgcgctgctggcgctactctccctcgcggccctcacggccctcgccgcgcgccgccgccgtcatggctgatctcccaacccacccccggcgggcacaatccgtgcccgccgtttttttgcgcctccgctcccgaaaaaaatttcttttttcccttgcacggcaaaaacccgccgggcctttctcagcccggcgggtcattccctccatcggtacgcccttttctcagtactccgtttttccctcgatctccgtgtatgcctcaaacagctcaaggcaacgctcccgctcaaacccgctcaccgtcagcaggtcgttttcccccgccagatactcgtagaatacctcgtcccggaagccgatttcgtccgagtcctcacgcgtgcagccgtagtacaccacggggatgttggcccacagcgtggcccccaggcacatggggcagggctcggcggtggtgtagagctcgcatcccgacaggtcaaaggtgcccaggttcttgcacgcgtcccggatggcctccatctcgccgtggcaggtggggtcctgattgaccaccacgcggttgtgcccgcgcccgacgatctcgccgtccttgacgatcaccgtcccgaacggtccgccgtccccggcctcgatgccggcgtaggcctcctccagcgccgcctgcatgaacgcctcctgcggcccgtccgccgccccggcgacggcctccgcgtccgcctccgcggccatggccgcgcccgcgagcgcgcacgccaacgccagtgccagtgccagtcccgcctttgcgcacccgcgcgcaaacgtccgtttcttcatgacaatacctcctaaaagcgttgtattgacgtcacttcatccacttgcgcgcgctcacggtctggggcgcgatgccgggcatcatggtgacgctgcggtttttaatgacgttgagcaccaggccgatgccggccatgttggtcaccagattgctgcccccatagctgaggaagggcagggggatgccggtcacgggcatgaggccggtggtcatgcccacgttttcaaacacatggaacagcagcatggccatcacgccgatgatgaccatctgcccgaagcggtccatggtgtaccgcgccagatagagcatgcgcaggatgatgagcaggtagaccagaatcaccagcgcgcagcccacgaacccgaaagcctcgccgatggtggagaaaatgaagtcggtccagtcctcgggcacgtaatcaagctggctgaacgcgccctgcacgaacatcccgcgtccgttgaggccgccggagccgatggcgattttggaattggtcacctggtacacggcgctttcgtccaccagcgtggggtcgatgaagctgaggatgcgttccaggcggtagttgtccgccccggtggccatcaggtagccgtagagcagcgcgagggcggcgacgcccagggcgatggcgcctcccatgagcttgaggcgcatgccgccgaagtacatcatcaccccgaagaggaagatcatcaccagcacgctgcccatctcgccctgggccagcgtgagggcccaggggatgcccatcagcacggcgaccttggccgcgccgcgcaggttgcccatggggtcggtttcggtttcaaggtatttggcgatcacgatgatgcaggccagcttcacaaattcggagggttggatcgtgtagccccatagcacgtcgatccaggccttcacgcccgcggcctgaccgcccaaagcgaccagcagcagcccgcacgccacgtaatagaacagcgtgcttcgcctgcggatgaactcgtaggggaaataggtaatcacgcccaccaccaccggggaaatcaggaaaaagatggcctgacgcatcccgtagtaggaggcgacgatgtagttgagcagcgtgccctccacctcggaggacgtgctgaacgtggccacagccacggacagcaccccgaagccggccagtccgaagaccatcagggccagcggcaggtcaaaatgcgccctcgaccggcgcgattcattgagcatcatcccgtttcttcacctcgataccgtccgggatctcgtaatgggtcagggttgcagggggcccttccggcggataccccggcggataccccggcggatgtcccggcggacgccccggcggacgccccggcggatgacccggc

SEQ ID NO: 3040 - DNA, 1750 bp, Unknown
  16S sequences of unknown bacteria
cctcgatggcggtgttcacctgatcgtcgccgttggtgtagtccagatactccacagtgaccttgatgtcaggatactttgcgttgaagctggaaaccagaccctgaacggtctcgtcattgccccagccgccgatggggtatgtccacagcttgatgctggtggaagaagcagctgcgcttgcagcggtagaacctgcggtggaagcagcagtgctggtgcttgcagaagagccgccgcatgcggccagagcgccggctgcgcccagaatgccagcggccttcaggaacgaacggcgggaaatgcagtttttcatagtagtttctccttcgcattcaagatgcttcacgttgttggcggcctgccgtgccagcggccgctcttgatggctccattatagaaaaatattttcattttgtccattcatggttttcataaattttcagaatgacagtgtacattgtgcacaaaagcgtgggatatatgttgaaatgcaaagaaaaccttgctttactcttctgaaattattacagaatagtacaaacccacaaaaacgatagtgaaaatgtttttctaaacaaaaatgcaaaattgaaagatattttcacaaaatggccggtttttccgccaaaactgtgtgctctgcacagaactgcgagccaaaatgtgggcaatgcgtctcttgcgaagcggggacgattcttttatactttttataaaggtgaatgaaacggtcggcagctgatccgggtcggtgaactgctgcgccggaaaagaggaaaaagaaaaatggcaacgaatttttgggagctgctgcagcagcatcagggcgacctgacaaaatcgggccgcaccgtggcggactatcttgtgcagcacgcggcagaggcacagtatctgtccatctcctcgctggcaaaggagtgctgtgtggcagaggcaacggtgttccgcttctgccgggcgctggggtttgagggctatcatgaaatgcgcattgcgctggcgcaggccaacgccaccggtgcactggtcaaccagcatgtgccggagccggatgccgacacggcaactttgtgcgagcacgccagcgccctgctgatgactactatcaacggcacccaaaacaatctttcgccggaggcggtggacaaggcttcggagctgatgcacaaggcccggcaggtgtactgccttggtcagggcggcagcatgtatattgcaaatgatatctgcgcccgctttgcctgcatctccaccaagttccgcacggcaggcgacagccatatgcagctgattacggccagcctgatgaccccggaggatgtggtgctgttcgtttcctattccggcgctacccgcgatatgctggaaacgctgcgcgcggccaaggcggcgggcgcaaagatcattctgctcacccattatgaggattcgcccggcgcaaagctggcggatatcgtgctgctgtgtggtgcgcaggaaagcccgctggactccggcaacatcccggtcaaggtggcgctgctgtatgtggctgaagtgctggtgctgcgctacaccatggacgaccccgaaaatgccaacgccgcacaggatcgcaccagtgaagcgctggcggtcaaaatgctgtaaaatattgcccgcaaggcccctgcagagcccgtgttctgtgggggccttggcatatccggcaaagggtgcgtaaaatctgtttctgatctttttcaaaaaaaatagacctcatctt

SEQ ID NO: 3041 - DNA, 32759 bp, Unknown
  16S sequences of unknown bacteria
agagatgtgttaatatagaaaggcttaaagaagttcatgtttagttttgaaggtgttaaaaagcactggaggatttccggtggcgatgcgcttgtgggaaacacccgtacccatgccgaacacgacggttaagacgcaagcggctgatgatacttggctggagacggcccgggaaagtaagtggctgccggaattaaataaataatcctcgatagctcagcggtagagcatccggctgttaaccggagggtcgttggttcgaatcctactcggggagcttttaaaaaaatatggcccgatggtcaagcggttaagacacggccctttcacggctgtaacccgggttcgattcccggtcgggtcatttatttttagcttgattttgttactaacatatgttataatataaaagtcatgtggcgcagtagccaagtggtaaggcaccggtctgcaacaccgttattcaccagttcaaatctggtctgcgccttaaaagcacttcaaatttatttggagtgcttttttgatatgtaaaaataaaaaacgatatgtacaaatgtaattctcttatatacaaatttaagtaaatcctgtaaaataaaattagttttaaattagttttatatcattttattttaataaggggtggatttatatgagtaatattcctgaacttaaaatcggcgttgtggcggtcagcagagattgtttccctgaaagcctttcggtatccagacgaaaagctcttattgaagcttataagaataagtatggagacaaagaaatttacgaatgtcctatctgcatcgtagaaagtgaaatacatatggtacaggcgttggaagatataaaaaatgccggatgtaacgctttagttgtgtatttgggaaacttcggacctgaaatagcggaaacacttttggcaaaacattttggtggacctaaaatgtttgttgcagctgcagaggagagcggtaacaaccttattcagggaagaggagacgcatactgcggaatgttgaacgccagctataatttaaagctcagaaatattaaagcatatattcccgaatatcctgtaggaacggctgaagaatgtgccgatatgatagcagaatttcgacctatagcgagggcggttataggacttaataaccttaagataataagcttcggtccgagacctttaaacttccttgcatgtaatgcgcctatacagcagctttataatttaggcgttgaaatagaagaaaactcagagctcgatttatttgaagcgtttaataagcatgaaggcgactcgagaatacccgatgtagtaaaacagatggaagaagaactcggaagcggaaacaagaaaccggaaattttatcaaagcttgcccagtatgaacttacattgaaagactgggtagaggagcataaaggatatcgtaaatatgttgcaatagcgggaaaatgctggcctgcatttcagacgcagtttggtttcgttccctgctatgtcaacagcaggcttacagctcagggaatacctgtatcctgtgaggttgatatttacggagctctcagtgaatttataggtacggtagtcagtgaagatgcggtaacgcttcttgatataaataacaatgtgcctgcggatatgtataaagaagatatcgagggcaaatttaactatacacataaggacacgtttatgggattccattgcggaaacactgcgtctgcgaagctttcgttctgtgaaatgaaatatcagctgattatggcaaggacgcttcccgaagaagttacacagggaacgcttgaaggagatatagtaccgggagatataacgttcttccgacttcagagcacagcggactgcaaactgagagcgtatatagcgcagggagaagtacttcctgttgcaagcagatcttttggctcaataggtgtgtttgcaatacccgaaatgggaagattttaccgtcatgtacttattgaaggcaatttccctcatcacggagctgttgcattcggaaaacacggaaaggctcttttcgaagtgtttaagtatataggagtacctgttgaagatatagggtataatcagccggcaggagtcagatatccgacggagaatccatggaaataaggagaatgtaaatgttatacataggaattgatttgggtacttctgccgttaaacttattcttatgaatgagaagggaaaaatatataatgcggttacaaaggaatatccgttatattttcctaaatcgggctggtcggaacaaaatccggaggattggtttgaaaaaaccgttgacggactgaaacagcttacagagatgtataataaaaaagaaattgccggaataagttttggcggacaaatgcacggattggttattcttgacggcaatgataatattatacgtccggctattttatggaacgacggcagaacaggcaaagaaacggaatatcttaataatactgtcggagaggaaaaattatcggagtatacggcaaatattgcctttgcaggctttacggctcctaaactcttgtggctgaaagagaatgaagctgataattttaaaagaatttcaaaaataatgctccctaaggactatattgcatatcgtttaagcggcatattctgcaccgattattccgacgcttcgggtacgctgttccttgatgtaaaaaataagcgttggtcgaaggaaatgctggatatatgttccgtaaacgaaaatatgcttccgagactttttgaaagctatgaggttgttggaacgataaaagatgatattgccgagcttctcggctttgatagaaccgtaaaaattattgccggagcaggcgataacgccgcggcagccatagggacgggaacggtcggagacggtatgtgcaatatttccctcggaacgtcgggaacaatatttatttcggaaaacattttcagaaatacaaaaaaccatgcaatacattcttttgcggcggcagacggaggctatcatcttatgggatgtatgctgagcgctgcgtcatgcaataaatggtggatggatgatatacttaaaaccgacgaatattttaaagagcaggagaatattgtaaagttgggagaaaataacgtatttttcctgccgtatctaatgggagagcgctcgccgcataacgatcctaatgcaagggcggcgtttatcggtatgtcgatggatacaacaagaacggaaatgacgcaggctgttttggaaggagttgctttcggactgagagattctctggaggctgcaaaaagcatgggtattaaaatagacagggctaaaatttgcggcggcggagcgaaaagcgaactttggagaaagataatcgccaatgtgctgaatatcgaaatagacgttcctcagattgaagaaggaccgagttacggagctgctgttttggcggctgtcggatgcggagaatataacactgtagacgaagccgttagagcaatgacaggcacatcggatacggtaattcccgacagggagattgcttcaaagtatgatgaaaaatataatatattcagaaaaatttatccgcttattaaaaatatagaaaatatttgacggcaaaaaataagtaacccccatgaaccaatcatgggggttatatttataattcaaccaatcctgttgttgtaagccttatttctggtataaccgtcaatgaaacaaatccgagcgtcataaacggatcaatttctggatttactccgagggaagcggctgttttacgcagttcgtccatttctgtggctacttcctctataggtcggtcgcacataagacctgctagaggcagagcaagctgacctattatttttccgtctaaagctatggcaaatccgccgttgttgcttctgacgcagttggcggctacagccatgtcttcggcatttttaccggcaactataagattgtggttatcatgggatatgcttgtagctatggcgccttttttaagaccgtatccggaaagatagcatttgcctatatggcctgttcctttatgtctttcggcaacggcaagcatagcgcagtcggatacatcggaagtaattattttttcggttgtaatctgtttattgtgcagacctattaccgtatattcttcttgactgtctatttcaaaatcaacgggcaaaagctcctttatattaaaggtatgctttactctgagcataagctttttatctattttaggaggctcaaaaggagtcaaaccgctgtctgcattatatatttctttgccttctttgtaaacggaaagtatatttaatgctcttatgtcgtccactacggaaaaattggctttgtatcctataccgatggccccgatgtcgggaattttgaaatgctttgccgtatttatcgatgccgtttttattgcaagtatggggtttgcaccgagggaaacggcttttttaacaatatagtccatatgtccctgtttcagaatatcaccggggtgtttgtcatcacagcatgtcatacaacggaaatgatacttactgtcaaacagctttacaagagcttcaacattttttgccgccgttccttctcttattgctatccacataccttttctgagcttttccaaagcttcgtcaagggttgtacattcgtgatctgacgttacgcctgccgtaatgtaggcgttaaggcttttacctactattccgggtgcatgaccgtctatttttttgccgtatgccagcgttgattctattttttctataagctcaaaatctttatttaatacgccggggcagttcataacttcgccgagaccgagaactcggctctctctcaggtaaggaacaagctcgtggtgggtcagcgtagctccgttttcttcacccggaatggcgggaacgcatgacggaagcataataaacacgtcaaggggtaaatcggctgtgctttgaagcatatagtctataccgtccgtacctattacgtttgctatttcatgcgggtctgcgacaaccgccgttgttccgtgcggtataaccgctttggcaaattcatacggagaaactattgaagattcaagatgaatatgagcgtcgataaacgacgggatgacggtttttcctctcagatctatttccgtatttccctcatagtcgcctattccgacgaagtatcagtcttttatggctatatcgccgtcgagaagttcgtttgtaaatacgtttacatacttggcgtttctaagcacgatatcagcctttttatatccgagcgcagagtctattctgtcgttcatggcaatccctccttttgctttcagtatactataaggttaaaaaaaataccagaattgattggatacggattattaaaaatgaatgaagtttattaataatgaagcgcagtgggagtatttgcttgtatgttcttaccgaataatgatataatcaatttataaaatacatggagggctaatatggcaagagttacatatctgtatcacagcggttttatggtggagacaaaaaatacatgtcttgtgttcgactattataccgacgggggaaaaattaataatatagacattaacaggtttaaagataaaaatgttttcgtatttgtatcacattttcatcaagaccattacgataaggaaatttttaaatggaaagacatgaatgtcagatatgttttgtccaaggactgcaaatatgataaaaacattgaaaacgttactgttgtaagtcctaataaggggtatataatcgacggtcttgcagttgagacgctgaagtcgaccgacgaaggagttgcgtttatcgtccatgccgacggactgacgatatatcatgcgggagatttgaactggtggcactggaacggtgaaagcgacgctttcaacaacatgataaagaaacagtatacgtcggagatagataaaataaaaggcgtaaatgtggatataggttttgttcccgtggatacaaggctggaggacaaatatatactggcgatagattatcttatgagagacgttgaaataaagcatattttccctatgcatttctggaacgattataaaatatacgattatcttgcggaagacgaaagaaccgaggattatcgagataaaataatgaagatagataagccgggacaggagtttgaactgtgataaaaagcgaaataaaaaatatgctcgtttccgtaagcgatgaaaaatacagagcttttacggaaaagcttaaatcatcaaattcagcggtattgggcgtaagaatgggcgttttaagaaagacggctaaagaactggcaaaggaaaattggaaagagtatgtgctttcagttgaagaggacgacagctatgaggaaaaactcataggaggaatgagcatatattactctaaatgcagtataaatgaaaaaacggagtataccgaaaaatttatgaggtttatagacggctggggaatatgcgacagtatatgttctacaataaaactgaaagaagaggaaagagaaacattttggaactattgtaaggaatgtactcagtcgggcgaggagtttaaaacaagattcggtctggtggctatgctcggtcagttcgtaacggaagagaagcttgacgatatatttaatattgtcagcgatataaactatatcggatactatgattctatgggagcggcatggcttcttgccgagtgcatggcgttttatccgcagattacattggaatttatgaaaaataatacgcttgataattgggtgtacaataaatccataacaaagatgagggagtctttcagagtaagtgatgaaatgaaaagtatgttgaaaactatggtcagaaaatagacggctggtaaggaagtgtctgtatatgctagaatacgaattaaaaagaatggtaaacaacgacatagagtattgcaaaaaagaatgggataaatattcgtttgactgggaacgtatgggcactctctttgaaaggattttacacaaatatataaatatcatagacggttttgacaagggaatgaaagttatatccgggtatgaaaaaaagaataaaagcggagatacataccgggataatcttatgcttgccataagcagactggaagcattccgagataacggatacaaaaacgaaggactgcacaaggagaaaaacagagactttaatataatagtatatgaccgagatgagtttgacgaagcaagactttgcatagaacgctgtgagcgcataagccgagaggaaaaagaagaggtttccgacagactggatcaaatagaggagatatgtacgtcatccgataatcctaccgtaaaatgggaaaaattgcgaccgcacgttatgtggctcagcggtaagaagcttgttatagcgtcgagaattttacctctgcttatgatgattgataacgacagatagaattttgaaagaaaaaagcctgaacattatgttcaggcttttttgaccttaatgaaaattatttataataacggcaaattttattccgattatgtttaatatggattttatattgcgacggttacgaatttaacatgggattactataatagctattgtaacttaacatgaaaacagcatgacattttaaattaacggaggagttgtaaaaatgaaatttaaaaaaggcttggctataatgtgcgccgcggcaatgggaatttccgcatttactttcggttccggaattaacgaagccgaagcggcaacggttgtaaaggagaataccgcgacggcaaaaccgaccgtaacaaaagcgcctaaatatgtgtttatgttcatcggcgacggtatgagctatccgcagatacagcttacaaactattacttaagtgcgcttaaggatacaaataacaatgatattgtagaatcaaagaaaaatcttacaatgatgaacttccctgtcgcaggttctgcgcagacatacgacagttcttctttctgtcccgattccgcttctacggcgacaagtatttcaacgggaaacaagacatacagcggaacaatcaatatggacgaaacaaagagcgaatcctatgagacaatagccgaaaaacttaaggatcagcttggatataaagtaggtattgtttccacagtcaaccttaaccatgctacgccggctgcattctatgctcatcagccgtcaagaaataactattatgaaataggtcaggaaatgatttcgagcgatttcgattactttgcaggcggaggccttcttaaaccggacggagcggacggaaaacagaaaaatctttacgaagctgccgaagaagccggctacaatgtagtatttacaaaggatgaggcagagaaagtcaatgcttcttcaggaaagacgataattattgacgagactcttgcggactcagacgcaatgagctacgatatggatcttgaaaacggcgagtgggcgctcaaagattatgttaaaaaaggcatagaggtgcttgataatgacaagggcttctttatgatggtagagggcggaaagattgactgggcgtgtcatgcaaatgacgccgcttcaacaatcagcgatactcttgcccttgacgaggctattcaggaggcagtcgctttctataacgaacatccggatgaaactcttattcttgtaactggagaccacgaaacaggcggacttacaatcggttttgccggaacagactatgatacgttccttacaaatcttgaaaatcagaaaatatcatatgcaaaatacgacagcgattatgtagcgaaatacaaagaaaataaaacaagctttgaggacgttcttaaagacgttcagaacatgttcggccttgtaacaaaagaaaatgcggcgcaggcaaaagacgaaactcttgttcttactgattacgaatacaataagcttaaagccgcttatgataagacaatggcaggacaagaggaagaactcagccaggaagaatatgtgctttacggtacatacgaaccgttgacggtaactcttacgcatattcttaacaacaaatcgggcgtcaactttgcgtcatacgcgcatacgggtcttcccgttgaagtattcgcaatgggcgtaggacaggacatgtttgaaggttactatgacaacacggatatattctttaatctcgcaaatatcacaggtgtaaaataatcggagtaaataaatgaaagcattatctaacagactgaatttttggactcagctgattataggctttcttcttgcagcgatcctcatagccgttccaaccggctatgagggcgctctcatatatacggaaagcgaaaaatgtaaagctgaggtaataagcactgatgaaagcagtataataagtaccggacttatacagtcgggagagcagatatgccaattggaactgcttgacggaaagtttaaaggggaaaaggtaagcggaataaaccttttatcgggatcccttgaaaacgataaaatatattctgccggcgacgaagctcttgttgtggtaagctataacgacggcggaataacgtccgttacgatgaccgaccattacagagttgacaaagaaataatacttgcgcttatgtttgtcatcctgctcatactttttgcaggcaaaaacggtatgtttgcggtcctgtcatttgttataacggttcttatgatatggaaaatacttgttccatgctatctgaaaggcatgaaccctatgtgggtgggaatgggcatcacggtagcgttgactgccgtaataatatttcttgtatacggcgttgataaaagaactctgacagcgtttatggggtctatgctcggaacggttacaacatgcataataggattgatttttacggacttatttaagatacacggagcagtcatgtcttattcggagacattgttgtactgcggttatcagcatttaaaccttacgcagatattcacaagcggtatttttataggagcttccggagctatgatggacttatcggtggatattacgtcggctgtacatgaggttattcagaaaaaacctgatatttcatggaaagaggcggcaaaatcggggatgaatgtcggacgtgcggcgatgggcacaatgaccactacgcttcttcttgcatattcgggcggatatatagcgttgcttatgacgtttatggcgcagggaacacctataatgaatattctgaactacaaatatgttgcttcggaaatactggatacgcttataggaagcttcggacttgttacggtagctccgtttacggctcttatgagcggacttcttcttacttcgggactgagaaacaagattgacgcaaataaacggtcaaaagtataattttatctgaaaggcgaactacataagaaacatttaacggcggttcaataaaccgccgttatttaggttgtttatattatttaattgtgttaaaattaatatttaacggaaatactgttagaatagacggagacagctctcccatattaactgacagcggaggaaaacttatgataaaacttatagcgacagatatggacggaactcttctcaacagcaacggggagttgaacgaggaaatatattcgatagtaggtcggctgaaaggcatgggtataaaatttgccgcagccagcggaaggcagcttatgtcgctgaaaagaaagtttgaacctgttgacgaagatattatatatattgcggaaaacggagcctatgctttggacagagacgaagaactttatataaacgccattgacaaagatacagttgcggaaatcatagaaacatcaaaggaagtaaatggttcggcaatatttatatgcggcaaaaaatattcgtatacagacaatgaagagctttttgaaacaatgaaaaaacctatattcggatatgagataaaatatgtttcggatttacggacggtaaacgaagatatattaaaaataggactttttgatacgatagacccaagagagagttctatgaaaataatgctcccgaaatttgaggggaaagttcatatgactttgtcggggtataacagcctcgattttttaaataatgaagtaaacaaaggcactgcgttgaaatgcgttatggacaaattcggcatagaaaaagacgaaactattgtattcggcgataactacaacgatattgagatgtttgatgcggcaggaacaagctttgccatgcttaacgccgatgaatatgtaagaagccgagcaaaatataccataggtaaaaatgatgataacgctgtaatagaaactattaagagcattattaaggagatagaccgatgaaaaaagttgccagccacgcacttggctgtaaagttaatcaatatgaaagcgaagcaatagcagagctttttgccgaaaaaggttatgaaattgtaggcatagacgacacagcggacgtctatataataaatacatgtaccgtaacaaatttcggagataaaaagagccgacagcttatcagaaaggtaaaaaggcagaatcccgaggcaacggttgtagccataggatgttatgcacagacagctcccgaggacattaaaaagattgaggggataaatctgattgtcggtacaaagggacgtgcggatattgtagagcttgtggaaaactataaacccgagaacggagttgtttgtacggtaggagagatagccaaagaaagggtttttgaaaaactttccataaataaactttccgacagaacaagggcatatcttaaaatacaggacggctgttcgcagttctgctcatattgtataataccttatgcgagaggccccataagaagcagagacccgcgggacatatccgaagaagttaaaactctggctgataacggatttaaagaaataatacttacgggaatacatgtggcttcatacggaaaagatttaaagggaacttcgttacttgacgttgtaaaacaggtgcagtatacgccgggcatagaacgtatacgtttcagttccgtagaaccggggctgataacggaagagtttgtaagcgaattggcgaaaatggataaggtatgcggacacttccatctttctcttcaaagcggatgtaacagaacgcttaagagaatgaacagaaaatataccgcagagcagtatgaaaaagctgtggaattgattaggaagtactttcccgacgcagctcttacaaccgatataatagccgggtttcccgatgaaagcgacgatgattttgaggaaagcctaagctttgcgaaaaaaataggatttcttaaaatacatgctttcccatattcgcctaaaaggggaacgcctgccgctgcaatggaaaatcaaattcaaaattccgtaaaaaacgaaagaacggcaaggcttatagaactgagcgacatcatgggagacgaatttatagaacggtttaagggaagaaacatgccggtactttttgaaagggaaatatccgaaaatttatatgaaggctatacggtcaattacataagggtaatagctgaaagcaaggagaatattcaaaataaaatacttgatgtaaaaattttgtcccacgaaaacgatacggcgcacggtgagataatttaaagattaagactttcctaattgcattgcaaattctggaaatttattataaaataagatattactaattgagattagaattttctttacatgggagtggtattatggaaaagaaaaattcaatgaacgaaacgatgagattcggtgcggttgaaaaagagtatacaagcgaggctgagaaaataatactctcggttacgtccgcccttgaggaaaagggatataatcccgttaatcagcttgtcggatatatcctttcgggagacccgacatatataacaagttataaaaatgcaagaagcattatccgtaaactcgagagggacgagcttcttgaagagataatcaaggactatctgaaaagaaaagcctgaagttgaaaggaaagaaacaattgcgtattttgggacttgacctgggagataagaccgtgggagtagctgtcagcgacgaattcggttggactgcccaaggagttgaaattataagaagaaataatccgtcggaacataaacagagtttggggcgcatagcggagcttatcgatcagtacggcgttgatacgatagttctgggttaccctaaaaatctggataattccgaaggtgtgcgctgtgaaaaaacaaaggcgtacaaggtttatatagaaaaaaggtttccgaagatacctgttatactgtgggacgaaagattcagtaccgtagcggcaaataacagcatgatggaagcgggactgagccacagcaagagaaagagcgtcatagataaaatggcggctgtgttcatactccaggggtatcttgacagtaaaagataaaagaaaaggagagtttgaatatgtcagatgaatttggcaataatattgaagatcttgatgaggaaatggaaataataacaatgatcgacgatgaaacggaagaagaaatagagtttgttgttattgacagaaaaaaaatgaacgatacggaatacattcttgttatcgaaagcaaagatatcgacgatgacgaagccgaggccgctatattaaaggttgtaagcgaatcggaggacgatattacttacgccgttatcgaagacgacgaggagtttgaggctgccgcaggcctttttgagagcgaagactacgaagtggaatattaaaatacatactcacggaagcctaaaaggcgacagtgattaaataaaaagacaggaggtgtttttttggcttcaaaaaaaccaaagttaaaagtaatatctttgggcggattacaggaaatcggaaaaaacataacggtttttgaatatgacaacgatataataatcgttgactgcggtcttgctttcccggaggacgacatgctgggaatagaccttgttattcccgatatttcatatttgataaaaaatatggataaaataagaggtatagttcttacccacggacatgaggaccatataggcgctttgccctatgtccttaaacagctgaacgtacctgttttcggcacgcttcttacattggggctgcttgaaaacaaacttaaggaacacggattaaataagcttgtaacgctccacacggttgttccgggagaaaaggtcaagcttggacgttttcaggtggaatttatccacacaaaccattcaatcgcagacgcggttgctttagcaataactacgcccgtaggagtagttgtgcatacgggagactttaaaatagactatacgcccattgacggagacgttatggatctgcatagatttgcggaactgggaaaggaaggggtactgctccttttgagcgatagtaccaatgccgaaagaaagggctttacaatgtcggaaagctcggtcgggggtgtgtttgacgatatattcagcgatactcccgataacagaattatggtggcaactttctcgtcaaatatccacagaatccagcagattgtaaactcggcatataaattcggcagaaaagtggctattatcggaagaagcatggtcaatgccgtcagaacatccattgaactggaataccttaatatgccggataatacgcttattgacataagcgagataaaaaattataccgatgataagcttgttataataacaacgggaagtcagggcgaaacgatgtccgcgctttccagaatagcttccaatgaacataaacaggtttccataagaccgggagataaaattataatcagcgcttcttccataccgggaaatgagaaaaatatttcaaacgttattaacgaacttacaagaaaaggcgccgatgtagtatacgagggaatagccgatatacatgtttcgggacatgccagacaggaagagcttaaactaatgctctctcttataaagcctaaatattttatgccggttcacggcgagtacgttcaccttctaagccatagggacatagccgtttctttgggaataccgaaggaaaatatatttgttatgaacataggcgatgttttggagctgtctaaaaaggacgcaaaagtaaacggaacagttccggcaggacaggtacttgtcgacggattgggcgtaggcgatgtcggaaacatagtgctgagggacagaaagaacctttcggaaaacggacttatggttgttgtcgttactatagattccgcttcgggtacaatacttgcaggtccggatataatttccagaggttttgtatatgtcagagaatccgaggatcttatggaggaagccagagccgtaataaacgacgctctgataaaatgtgaaatgaagcatatttcgggctggtcaaatattaaaaatataataagagatactcttaaaaatttcttatggcagaaaacaaagagaagtcctatgatactgcctataataatggaagtataaggggagaaatggtttgaacaggcttagaaaatccgtcgacgaacttatagaggcgttacgcaataccgatgagtataagcggtataaggaagcggcggacagcataacggttgatgaattggaaaaaatcaatgagtataagcgattgaggtttgaagtcgtgaatggcggcgcacatggagaaaatgatgaaagcgtaaggctttacagcaagcttatgcttaataccgttacgagaaactatatgctgtgcgaaaaaaagatatataatattgttgccgatatatatgatgaaatcggcagacagcttataaactgagaaaaacaccgttttgaatatccaaaacggtgtttttttacatattaagaagttcttaatcagctgtattttttattgccaagtcataaaaaacaatttataatcgaaaaaggaaggagggtgtgctattatgtcaaaattgcgcacagcagtccttgcctttgttttatcggtaacagcggtatttacggcttcggctgagacatttacggatacaaaaatgcttatgcttgttaattcaaaccacaggatagacaaagattataagcccgaaatggttaattataaagatacatcatattatttagcggaagaagcggccgcgtctctttctcttatgttgtctgatatggaacgtgaattgggaagcgctccgatggtagccagtacatatcgttcctatgaaagacagacggaagtatataacagagatgtaaacagcgcggtagccagaggcgtggagatagccgacgcaataaagggaacaagcagatatatagcgcttcccggagcaagcgagcatcaaactgcattggcggtagatttaacaaacgacggctctctggaagaaaactttattgagacggaagcggggcagtggatagaaaaatactgccataactatggatttgtagtgcgttatccaaaagctaaagaggatgttaccaagataggatatgaaccgtggcatataagatatgtcgggcagccgtattcggatattatgtacgaaaacgactggtgtcttgaagaatttatagcgtatatgaagagaaatttatacatgcgttgggaagacaggaataatatatggactttatattttaccgaaaagcctacaggcaactatgattccaatacgtctgtgtcggatacgaacagcggaggttatatcgtaacaacgagaaaaagtaaaaaaacgcttattgccgtgaatgaaaacaaagtaaggcaggaaaataatatgcgcagaaatctacttataaaactgaattctgccgatatgaaaaaacaggagtaaataaattgctcctgttttttttataattaatggattgtagtgatttaagaaaaatgcataatttttaatccaattttttatcaaacgcaagtctgtcgccgccctgatagataataactccgcattgtttaaagctgtttcttttaaatacatgctgcatacgtttgttggaagaatgtgtatctacccttatattatggatgtctttttcaaggcataatttttctatcagcttaaacgtaatatcggacatgcctttgcctataaaatctttgttcagagccattcggtgtacaacggcataactgtcatctgtattccaactgccgtctcttatatctttatatgccggttctccgtcgaaatctatgcacatatagcctgcaattttaccatcggattttactacatatcctttttgattttcgatatctcccttaattaaatttacggtagggtaatcgtcgtcccactgtataaaaccctgttctctctggaacatttttccgtcgttcaaaattttcatgcatatttcaaggtcatttatttttgccgattcaagcgtgttcattatgtttcctcctgtgcctgtaatattattatgtcttaaagagagttttgccaaagcggttataaataatattaataaattttgctttagtttcaaatatatattatttcggcaaaagtttcaatcagagaaataagaataattaagatatgttgtattttaaaatactatgcttgcgatttgtgtagagctttaattaatataaataaagcttttatttgccatacagagactctgtgtgtataatataaaattgaggtgttatagttgtcgcttaaaattaacgaaataaaagaaattttttcggaaacaccgatagaggaaattcccgataaaataaatatatttaaaaatgacgagagatccggagtggctaaacttgttgaaaagtatgaaaaaaaatataatgcttacttggaagaaataaaaagactggaggaaatatccgtttttgaaaaggaacttattaaaaacgggtacagtcttatatgcggaatagacgaagtcggaagaggacctttggcagggcctgttgttactgctgcggtaatattgcctgaaaactgcagaatacatggcataaatgactctaaaaaacttactgcggctaaaagggaagagctttctttcaaaattaaggagcaggctcttgcatattcgttcggctctgcttctcctgcggaaatagatgaaatcaatatacttcaggcaacatataaggcaatgagaaaagccatatatgggttgaaaataaaaccggattttgtattggcagacgcagttacaataccgcagatagatattcctcagcagggaatagtgcatggggatgcaaaaagcataactatcggcgcggcaagtataattgccaaggtcgaaagggacgccatgatggacgaatacggaaaggtttttgaaggttacggctttgagcataacaagggttacggttcggcggaacatatagcggctttaaaagagatcggaccgtgtccgatacacagaaaaagttttataaaaaattttgtttgatatgagaaatgatagttacggcaaaggcagagaagcggaagataaggctgcaaaatggatagaaaaaaataaagggtacacagttatagacaggaattacagaagtccgtcgggtgaaatcgacattatagcaaaagacagggaaacggttgtatttatagaagttaaatttcgtaaagaaacatcgtacggctatcctgcggaagccgttacaaggataaagcaggagagaattataaaaacagctatgcgttatattcaggaaaacggcggggaaaatataaggttcgatgttgcggaattgatagataataaaggcgtaacatatatcagatatacagaaaacgcatttgaatggaggcagtgccgatgattttgaacaagaagggaaatcttgagtattatacgtttgaaagtttggataatatagattttataggacactgttttaccaccagaagagggggcgtcagcgaaggatttctttcttcgcttaatcttggattttccagaggcgacataccggagaatgttgaaaagaatttcgatattatttgcgaggcgcttaatgtaaaaaaagaacagtgcgttacattgaagcaggtacattcaactgaaattataaaggctgacaaaagtattgaaggaatgggatttgtcaacggaatcgaaagggaagaggcggacggctttgtaaccaatgaaaaaggtatagttcttgttacattccatgcggactgcgtaccgttatattttgtagatacacgtaataaagccataggcatggcacatgcaggctggagaggaacagcaggagcaatggcagagaaaatgctggaacgcatgaaaaaagaatacggtaccgaaccgtccgatgtgaaggtcggaataggcccttcaataggagcgtgttgtttccaggtggacgatcctgtagtgaatatatttaatgagaactttgattttgcacataaatatataacagacgataatgaaaaaggaaagtataagatagatttatggggagttaataaagagcttcttataagaaacggcgtgaaagcagagaatatcgaaatcggaaatatatgtactaaatgcaatccggatattttttactctcacagagttatgggagaacagcgtggtacaatggcggcgtttctttttttgaaatgagggaaaacttttggaaaacatgaatgtgaataaaaaagaaaatgttataataagcgttgaacccggaagtattgccgaggaactcggaattgagccgggagacgttcttgtttccataaacgataaagaaatactcgacgtattcgattacagatatatgatcaacgacgaatatctggaaatagtcatgaaagacggaaacggtgaggaatatatcgcagaggttgaaaaggactatgacgaggatataggaatcgtttttgaaagcggacttatggacaacgcaagaagctgtagaaacaaatgtattttctgctttatcgaccagcttcccaaaggaatgagagaaactctgtattttaaagacgatgatacaagactttcgtttttacagggaaattatgttaccctcacaaatatgaaagacaaagacatagacagaataatatattatcatctttctcccattaatatttccgtccatacaactaatccggagcttagaaaaatgatgctgcataataataaagccggaaatattatggagagaatgaaaaaactggcggctgccggaatagaacttcatttgcaggtggtgctttgcaaaggaataaacgacggagaagaacttgacagaacaatacgggatattaccgaactgtatccaagcgccagaagcatgtcggttgttcccataggtcttacaaagtacagggacggtctttttaaacaagagccgtttacaaaagaggactctgaaaaggtactggatcagatagaggaatggcagcaaaggaatcttgaaaagttcggttccagaatagtgtacgccgccgatgaattttatctgaaggcagaaagggaaataccggaaccggaatgttatgaggatttccagcagtttgaaaacggagtcgggatgctatcgctttttaagtcggaattttacgaacttctgccacaaattacggacagggaaaaaaggaaacgcacgctgtcgcttgttacgggagcggcggctttcggtcttataagcgagatagcgtccgaaataatgaaaaaattccctaatataacaatcaatacttattgtataagaaatgattttttcggagaaatgataaccgtatcgggacttttgacgggaaccgatataataaatcagcttaaaggcagagagctgggagaatatataattcttcccgacagtctgctaagaaacggagagacggtgcttcttgatgacatatatttgtcggatatagaaagagaacttggggtgaaggtaaagattgccttaaactctgccgaaagccttgtaaataggataatgaatacggaggaataaaatatgagcaaacctatagttgctgttgtgggcagacctaacgtcggcaaatcgacgctgtttaacagacttgcaggcgagagaatatcaatcgtacaggataagccgggagttacgagagacagaatttatgctgatgttgagtggcttaattacaaatttacactgattgatacaggcggaatggagcctgacgcagatgacataatactcagacagatacttacacaggcgcagattgcaatagaaactgccgatgtaattattttcgttacggacgtaaagcagggagttacggaagatgacgcacaagttgcgaacatcctcagaagaactaagaaacctgttgtgcttgctgtaaataaagtggacgacatgcgtaaggaaaacctcgacgtatatgaattttacagtctcggaataggagaagtatatccgatttcggcaggacaggcgttaggtctgggagacatgctggacgcagtatgctctcatttccccgaaggagcggaaaatgccgaagaggaggacgttataaaagtagctctaatcggaaaaccgaatgtaggaaaatcatcccttataaacagaatactgggggaggacaggcttattgtaagcaatatacccggtactacaagggacgcaatagatactccttttgagcttgacgggcagaaatatgttttgatagacactgccggtatgcgaagaaaaagcaaaattaaagaggatattgaaaaatacagtattatacgtgcggtagcggcagtagaacgctgcgatgtagcggtgcttgtaatagacgcgcaggaaggcataacagaccaggatacgaagatagctggaattgcccacgaaagaggtaaagcggctattattgcggtaaataaatgggacgcaatagaaaaagacgataaaacaatgaataagtttttgaaggacatatccaacgagctggcatatatggcttatgccccaagagtatttatttccgctcttacaggacagagggttataaaaatgcttgatacagtgagagaagtttatgcaaataactgtcttagggtatctactggagttcttaacgatgttcttatagaggctatggcaatgcagcagccgcctgccgaaaaaggacgtcagctgaaaatatattatatgacgcaggtaggagttaagccgcctacatttgttatattcgtaaacgacagggagcttatgcacttctcgtacagaagatatatagaaaatcagcttaggcagaacttcggatttaagggaacgcccatacatttcgtagtaaggcaaaagggagataaagattgatatgtttagaataatatgccttataataggttattttttcggatgtatacaaacatcatattttgtcggtaagaaaaataatattgatataagcaagacaggcagcggaaatctcggaactacgaatactgtaagggctctcggcataaaggtcggtttatttacatttttctgtgacgctttaaaggctgccgcggcattttatgtatgctactttgttttcggagaaaatgccgttacagccggattttacggtgcgacaggaactataataggacatgattttccgttttttcaccattttaagggaggaaaggggattgcggcaatgctcggaatgatgcttggagcatttccgtttcccgctctgattgtttacataatagctatagcggtgcttatgagcggatatgtatcgcttacatctttggtgttatcggttcttataccgatatcactcagtatttggcattatcctactgaggttgtggtattgacatcggcgttggcgctgttggcgtttatacagcacaggcagaatataaaaaggcttataaacggtactgaaagcagatttgacatcattggcaaacttaagcctaaaaagaaggagaggtaaacaatgaaaaaaatagctgttataggcagcggaagctggggcactgcccttgccgttatgcttgataagtatggacacgacgttactatatggtcgtggaaggaagaagaggcaagacgtataagggaagacggtgagcataaagaatttctcccgggagtacccataagaaaagagataaaaatagttacgtctccggaggaagcggtaaaagacgctgaaataataatcgcggcagttccgtcaaagtttgtaagaataaatatgatgaaattcgcgccttattttaaagagggacaaataatagtaaacgtggcaaagggaatagaggacggaagtcttaaaacgctggcagaggttataaaagagtgcgctcctatgtgcgaggtagccgttttatcgggcccgagccatgcggaagaagtaggcagggagataccgacggctgccgtaatagcttctcatgatgaagagcttgcgaaaatgatacagcacgaattcagcaaccccaatttcagactgtatacaaatacggacgttatcggcgttgagataggcgccgcaatgaaaaatattatagcgcttgccgccggaatgtcagacggtctcggattcggcgataatacaaaggcagcccttatgacaaggggcatggcggaaataaaaagactgggagttgcaatgggaggtcaggaaagcacgtttttcggactttcgggtataggcgacctgattgtaacatgtacaagtatgcactccagaaacagaagagccggaataatgctcggacagggaaaatctctcgacgaaacgctcaaagaggttcacatggttgtcgagggtgtaaacactgcgcaggcagctacacagctggcaaagaaatataatgtcagtatgcccataacagaggctataacaggcgttctttttgaaggaaaagacgtcggaaaggttgtttacagccttatgatgagagacaaaatatcagaggcataagtaaggaagtccgaaaaccgttcctataattatcccggcaataatatcagacggatagtgtactcccgataaaagcctggaaacagctacaaatatcgaaactatgagaccgactgaaccgagaaacggatgaatgtagtacagagccatagttattacgaaggaactggaacagtgcaggctggggaaactgtgtccgcttgaatggttttccaaaggagttacgtctaaaacatcaaacggacgaggacggtcgattttatctctgaattttgttacaagaataagttcggcaagaggaaaaaaagcaaaagctattatccttatatcatgtgaaattataagaacaggcataagtccgtagaaaagtaccatcataatctgcggacttattttatttataaaaataatcggtttatgaagaaatctatgtttttgaacaaaattgtataccgacatatatagttttgtatccaaaaaaatcacctcggaaaaatactatttttgataatagcatattttccgaggtttttaaataagttttatatccttttcttttttgacgaaagacccagtatataatcggcagatacatcataatatttgcaaagtgaaatcaaatgccttatcggaagttcattggctcctctttcgtaacgcgcgtacattgtctgtgaggttccgagaaaatccgctatttcagactgggttttgtcagcgtcttctcttaaatttcttatacgtttagtatactccacataaacaccttccgataaacatctatagattgatgttatcattttatttatgatattattggctttagtaaatatatttactaaaattaaaggcgtgagcagtaaatttatttgtttaggagcgtgatattgtgagaaggagtttttgtacttttataatagtgatattagccgcggcaggtataatattttttaacagctgcaaaagcgtggagataaatgctcctgatatgatagttatcgataagggggaaagattttgcgtagacgattatgtaaaaataagcggaggaaagagcgcggaatttagggataatataaacacaggtaaagaaggaatatacagcctgacagttaccgccgaaagtaaaataggaaaatccgttacaaaagaaataaaggttgtggtggaataaatttatatacgagaaaaggcggctgaaatgccgccttttttgaggaatttggggaattatatgttttatcagcttgctttctgttctaatctgagtctgtcggctataagcgctataaattcagagtttgtaggcttgcctttgtgattgtttattgtatatccgaaaagttcgtctattgcgtctattttgcctctgctccatgctacttctatggcatggcggatggctctttcaactcttgagggtgtagtgttgcacttttttgcaatagccggataaagttctttggtaatatagttgagtacgtccatatcgtttacggacattattatagcctcacgcatatagtggtaaccgcgtatgtgggcaggaacgcctatttcatggagtattccggttactttcgcttccaagtcataggcggcggctttttcatttgtgtttccgacaacaacagaacccgaagtcggaccttcaccggcttttgtatacttaagctgacgtaatcttattacgagggcatccatatcgaaaggctttacgatataatattcagcgccaagctctattgcacgctgggttattttctcttgattaatagcagatagcataatacatatcggcttctgcatttggtcggcatgtttttgaagtttttccaaaacaccaagtccgtctaaacgaggcataatactgtctatgatagctatatcgggttttaactctcttattttattgaaagtgtctataccgtcatgtgcgattgctataacttctatatcttcctgtttgttaagatatgaacatacaacatcacaaaaatctttattatcgtccgccaatattacccttattttgttttgactcaaaacttatccctcctgtataccgcttgtttttagagcgtaaaaaatactagaaaatatgtaaaatatttacattcaagtacattataaccattaagaacgcattttgcaataatatatttctaaatattggaagaaaagttcgacattggatttaatatatcgacaaatatatataaatttgggatagaaataagcggattagataaaaaacagcataaaaaacaaagaaagccgataatgtatatattttaagcagagcattatgtcagcaaacggaaaattttattatacaataaaataaaaccgtaacctattcttactttgcttatagaaatcattggctttctttaaatttataaagcataattattataaaaatttgggattgggaagaccgtaaagagcaagatatgcattgctgtatcttatatcagatgagatttcgtctgcaaaccattccggaggaatgaaactatcagcctgctccaatgtatcgaattccacttccactgtttgcaggttttccaaatcaccgtggtagatgtcaagctccgcaatcaatccgccgtaaatcggaatttcatatcgtgtttttacaatagatgaggtttccgatttttttaacaaagtttcatactgctctttattcagttccagttcaaattcctctcttgcgatttttccgctgccttttacagtaagcgtataaaactcatcgctttttctaacccttattgcagggtctatgtttatgtaagactgcgatatttccttttttctgtatttttggagtgaatccggaatgtaagaaacaagatacttcttttcgatttccatataaacaacacctttcattccaattatatccaatagttcgattaatatcaacatattaaaacatttatattgttaaatatttatttatgctatatactgaggttatcaaagatttaaggagagattgaagatgaagaaggtatatttgtttctggcatacggctttgaagaagttgaggcacttacggctgtagatttattaagacgtgcgggtattcaggttataacggtttctgttaccggaaacgatatagttacgggcgcacataaaattcctgtagtagcggatataaaaatagacaacggagcgtttggcgacgcggacgctttcataataccgggaggacaaccgggggtagataatttatacgaatgtaaagaattcctctcggttataacaaatgcatataaaaataataagcttgtatgcgcaatatgcgcggcgccgatgctgcttggcagactgggacttcttgaaggtaaaaaggctacgtgttatcccggatgtgaatcggaacttacaggagcggatatttccgaggacagtgtatgcgtcgacggaaatatcgttacttcaagaggagtcggaacggcggtggattttgcgtcaaaaataacggaacttcttttaaacgcagagaaagcggctgaaataagagcttcgatacttgcttaataaagttttaaatataaatgttactgaaaagagtctctaaaagacccttatgcagtttgcatacgcccattgatgcgtatgcgtttaggacaacgtcgatatcaatatcatatatgtacgatacctgctccggggagtatgattccgtaacgccgcattcaagctggcgtttaaatgcacggcaaagctctccggagccgtttttcattattacggcgaaagaagacggagtaattgattttatattattttcattgagtattttatccagctcatcctttgtcatgcccagaatatctcttacttcggcttttttgtaaggcggagtttttgttttaaggaataaatcgatagtctctaatttggaaacaatatttgtgcggtatcggctgagatatgattcgtcatgtgcggttgtgcccatatagaatgcctccttgataatttatatgagaaattatataatcattataagcaaatataaatcggagcgctatatgtaatatatggtctttgattggcaggtgtataaagtgaatgctatagagaaatatttcaggtacagacaggctcttatagatcagtatgcaaaaggagatatgacaaaacgcgagtatcttcgggctaattatgaagccgtcgtatataacgatattaagccctttaagaatattgatactgttcttaagggcttgttcaattatcagtattataatgcaaaagccaaagaaaaaaagcaggcgagtaccataaaagatttatcttatgaagagaaaaaagattatattgacagctgtaattattattacggacgaaaagataaagctactttaaaggtgttacagcttctggactataaaggcgttgaagcgtattttataaacgtacgctcaaaggagctgaaaggaaagctgtttgagataattttgacggattacaatatgatacttcattcaacaaacactcttatattaaaaaatttaagggaagaaggagttttttccgaaacagtcaaaaaatctctgattgacggatatattaatcagcgatactgaaatgtttaatatatttgtccggaaaaagaccgataaaatgtatagatactttgtatatggaggacagccgatatgagaaaggtttactataacggaaacgtaataactatggaaaacgaagaaaccgcagaatatgttttgataaacggagataggatagaaagcgttggaaaaggcgatatccctaaggctgatgaatatacggatcttaatggaaaaacgattatgccggcgtttatagatccgcacagccacatgacttccgtagctatgtcatttttaaaggttcagttggatgacgctgaaagtgtagaggaagttctggacagaataaaaaagtttattgaggaaaacaaaaaagagaatagttggataagcgctatgggctatgataacaattctttagccgaaaaaaggcatataacggcgaaagaactggacggcataagcggaagcaatgctgttgtaatacagcataaatccggacattccgggatttttaacacggaagcggcaaaaagactcaatataagaacaaaagacggactgcttgaggaaagtgagtatataaatatattaaagaatataccgatggaaaacggagaagcgctgatgaacgcctatgataaggcgcagaacctttatttttcatacggtataacaacggcgcaggaaggatatgccctcggacagctgttgccaatataccgaaagcttgttgaatccggcatattgaaaatagaccttaatttatatcctgaccttgacagctatgataaatggcagcatgcatttcctttaagcatagagaactataacgaaaatattaaaattgccggtctgaaaataatgcttgacggatctccgcagggaggtacagcttgggtttccgagccgtatacaggaggaggcaacggattttctgccatgaccgacaatgaggtcgataaagcgttgaagtgggctaaggaaagaaatatgcaggttattgcgcactgtaatggggatatggcgtgcggtcagtttatagacacggtcggaagaaacggaaacaggaacgcggttatgatacatgctcagcttttaagaagagatcagctgaaaaaggtcaaggaatacggaataataccgtcgttttttatagcgcatgtgttttattggggcgacgtgcacataaagaatttcggaatcaaaagagcgtcggcaatttcgccggcaaaatcggcgcttgacgagaagattatgtttacattccatcaggacgcgccggttgtcgaaccggatatgtttaagacgatatggtgtgcggtaaaaagacaaactaagagcggaataatactgggagaagaagagcgaattgacgttttaaacgcattaaaggcggttaccgtaaatgcagccgtacagtattccgaacagggcgaaaaaggaagtttaaaagagggaaaacttgccgatatgattataattgaccgaaatccttttgaaaccgatattgacggtctaaaagatataaaaattttggaaacaataaagggcggagttacggtttacagggcgtaaagcttttgtcgataaaaataatgttcggacggttttacaggcttctgttttaagaagcctgtttgcataatcattatatataaagtttaagatgaaccggattgaaatttatttgttataagttataatatgtgttaaaatactataattagtactttgcatattttaaggagaatattgtatgaaactggggtatcttggtcccaaaggaactttttcggaacaggcggctatgatgtatgccgcaaaatgtccatatgactgtgaatatgaaatgtttttgaacataacggatgtaatttccgccgtgggtgacggtataatagatgaagggatagttcctttggaaaattccatagaaggaactgttacaagcactgtcgacacacttatattcgacgcggaattgtacataaacagcgaacttatactgagtgtaaaccagaaccttatggtaaaaaaaggggtttgcctaaacgatgtaaaaaaaataatttcacatccgcagggattggcacagtgcagaaaatatattaaaacgacgggaatttctgaaaccgtagccgtatcgtctacagcggaggccgcacatatagtgtcgcagggaaaaggagatactgccgcgattgcccctaagagagccgcagaggtatacgggcttgatataatcggcgagaatatacaggacgacggaaccaactctacaagatttatagtaatatcaaaacacaaaccggaacttaagtcgggaatgaggacaagcatagcgtttacacttgatgatgataactctccgggaagactttataaggtactggatattcttaatatatatgaaatcaatatgataaagatagagtcgcgtccggcaaaacacaaactcggaacgtatgttttctgtatagaccttgtggcggatgacaatgaggatcttaaagacgcagtaaaaatgcttaaaagaaaagtagcgttttttaaatttctcggctcgtattcatctataggataacaggtgatgatcatggaaaaacataagaacataataataaaatatcttattgttatttttatcgcagctattgtcggcggtattgtcggaggtatagcaggcattgttattgtggctgtagtttcagtcgttattcttgccacagccttggcagagataaggaaaagcgcagaagagattgtgcgtgaaagcgttcaggatgatgacgaacctgaggttatagtgaaaaacgatatacccgtaccgtatgtcgttattgacggagggttcagcgtaatgggctgtaatgaagaatttttacagcttatgggacttaaaagcttttgcgggtttaatataaaggaaaagatacccgactataacgaacatctgaacaaccagattgtaaaaatcggagaaagaagtttcagaatctattcttcacatgcggaattggcagacggagacatagccaactcactttgctttatggatgtaaccgaaatacaggctttaaaagaaagtttggaaaacgataaaaccgttgtgggaattatatatatagataactatgacgaagtaatagagagcgtagacgactcggctatacctatgctgacagctatagttgacagaaaattgaccgctatgatacacgaatgtaaaggagtacttaaaaagaccgaaaaagacaggtacttcttctgtattacggcagaagcgcttgccgagcttcaaaaaaataaatttgaaatattaaacgatatacgttctataactatcggcgaacatatacccgttacgctgagtatcggaataggcataggagaggtaacgcttgaagccgcaatgaaaagcgcaaaagccgctatagaccttgcgttgggcagaggcggcgaccaggcgcttattaaaaacggggataaatatatattctacggaggaaagagcggagaagtttcccataacgcaaggataagggcgagagtaaaggctgacgcgctttcggaactcatagcggaatcggaaagcgtttatgtaatggggcatataatggctgacgcagactgtttcggttcttccataggcgtttacagaatagcaaaatcactcggaaagaaatgctcgataatacttgacggaatcccttcgactatacaaaaaattgccgataaatttataggcaatccggaatatgacgatatgttgacagattcgcaggaagcatggcagaatatcaccgaaaatacgcttgttataatagtggatacccatataaacagccgtgttgagtctgtggatgtgttgaataaggcgtcaaaggtagttgtgttcgaccaccatagaaagagtaccgacttcattgacaaagcggtaatggtttatcatgaaccttatgcttcttccgcatgcgaacttgttacggaaatgatacagtatataggtgaaaaggttaagctgaaatctgccgaagcagacgcgctgcttgcgggaatgacggtcgatacccagaacttcagcatgaaaaccggaactataacatttgaggcggctgcgttccttaaaagatgcggagccgacggaataagagtaagaaaactgcttcaagaagacttggacgtattcaaagcgagagccatggcagtggcgtcaa

SEQ ID NO: 3042 - DNA, 17250 bp, Unknown
  16S sequences of unknown bacteria
tgtctacttgacagggggcacttcaattcgcattcgtccacggtgattattttatttgcccttctccagaccacagagggccgggacttggcgtaggtcctggatgatataatccaggtgtaggtgcgctgggggctggagacccttggggttataccagcaggcggcaaggccgacgttgttggcaagctgcatatcgctggtcagcgagtcaccgaccatcaggatctgatcaggggcacagttcggcagcaggggcgcggcggcggcaaaaaatgccggatccggcttctctgcgccgatctcctcggagatcaggacaccgtccagcagcgcgcccagcccggagcgggccagcttgcggtcctgggcgatcttggtgccgttggtggcggcgaattgcagcacgtggctccgcagggcctggacggtctccaaggcataggggtagaagcagaccgtatcgcccagattgcgctgataggcggcattgaaggggacagccagagccgggtctaagccgtgcagcgagaaaaactcctggaagcgcccttccaggacggcctgctttgtgatctcgccgcgctcaagccgctgccaataggtgcggttgatggtggaatactccgcgagcatcgcgtcgctgcacgggcccaagccgaaggcggcgaagcctttgcggatggcactttcctctgcaacttcaaaattcagcagtgttccatcaatatcccaaaatatgactttgatctgcgccatggcggtgctcccttcgtcgtgcgcgcatctggtggcccacggtttttctctatcatagcataggcgcgcgggaaaagccagcggagattaagaagcttaaaaattgcgggtgagattgacaaaagtcccggaaatcttttataataaggccaatggaatgtgatcaaaggaggtcggaacgacttgagacgagagacgaagaaaaagcttctggcatggctgctgtgcatctgcctggcgctgcagctggctcctcagatctttgctgcagagccgcagacgcaggcgtccgcagaagagagccaggttgcgcaggaggcagcgccggtaggggagagtgtggaagcaccccaagcgccccgggcggaggaaaacggccagcagagcgcgatcctgatccaggaagagccgggcgaggcggcggaaaagccgcaggagccggtctttgggatggacgcgtttgtgattccgcaggagtctgtcacctgcggctttgccgatgtggcggcgagcagttggtattataaggcggtcgcttattgcagcagcttggggctcgtcagcggcaagacggcggaaaagtttgacccggcggccaatatcagtactgccgagagcatcacgttggcggtgcaggtctaccggatgtaccacggcatcacgacacccatcccggccacaagcaccggctcatggtacacgccgtatgagaccctggcccgggcctatggcattctgccggctggcgtggaggtctcgaatcggtcaatctcgcggcaggaagcagcggcagtattctacaatatgctgcccgaggcagagctggcggccatcaacgagatcaaggacctgccggatgtcggcaagaacaatccttattacaaagaaattctggccctgtataacgccggtgtcctggcgggaacggagacggtctacggaacctttgcgccgacgcgttcgatcgcccggtgcgaatttgtccagctgctgctggcgctgattctgccgtcggagcgcggcgagcataccttctcgacgtataccgggatggcagcgttcgatatgtcccgctacgatgtgacgagcacatttgcggacgtggcaaagacggactggttctacaacgccgtggcggtgcagcagaccatcggcttgatctccggcgtggatgagacgcattttgccccccaggggaaggtgacgctggcgcaggcactgtcaatcgctgtgcgggcgtatcagaaataccacggcgtgaaggatagctatgaaccggcggcggggcaggtctggtacgcgggctttgcccggctggccgtccagtacgggatcgtctcgtcgtcttggtcgaactatgaccagcccctgacccgggaccggctggcgatgatcatctacaatacactgccgtccaaggagctgacggccatcaacagcatcgaggccatcccggatatggaggcgtcggaccagggataccaggagattctggcgctgtataatgcgggcgttctctgcggcaatgacaagctgggcaacttcgcaccgacgacaaatgtcacccgggcggaatttgccgcgatgttcacccgtctgacggatgttacctctcgggtaaaattcaccctggagacgacgtacgtcggcgagaagatcatctacggcaccagcggtgccgggcaggagttggcagcctatcgctatggcagcggaaaaaacgtcatggttgtgggcttcgcaatccatggctatgaggaccactttgccaaggacgggcaggagctggtctttactgcccagtcgctgcagacgatcctacagaagaatatggatgtcatcacaaagggtgactggacagtttatgtcttaccctgcatgaatccggacgggctttataacggctacacgaacaacggccccggccgctgcacgacgacgtattacacagccagcggctccctctccagcagccacggcgtagatatgaaccgcagcttcccggcaaacttcgtcgtccagaccagcgcccggtactatacgggaccggcggcgctgtcctgcaaggaatccagggcgttggcggcatttgtccggaaggtcaagggcacggggaagaatgtctgcatcgatacccacggctggacacagcagatcatcacctccaccgggacgagcggcctgctttacaagacgttccacagtgccttcggcagcaatacatacgccaactgccgcggcgcggcgggctatttcacagcttacactgcctccctgggctatgactcctgcctgtttgaattccccggcggcgtctacagccacaacgcatttttgagcagcggctacagcgcaaaatacatctcctgcatcatgacgctgctgaataaatactaaaatacagccccatggcaaactgaaacgccgtggggctgtgcttgtcctggaaatagaacaccccagcggccggtttcccggtcgctggggtgtttttttggaaattaggcttcgacttcgatgccgttttccttgaaggctttcaggagcagatccatatccgaagggatggagatcgggtcgccgcaggccttgatggcgttggcgacgtccttcaggccgttgccggtgatgacggagacgacagtgtcgttctcgcccaggacaccctggtcgcacagcttcttcaggccagctgcgccggtgacaccagcgggctcaccgaagacgccgcagttcatgccgaccatcttctgggcagccatgatctcttcgtcggtgacattgacgacgataccgttggactcccggatggcagccagagccttatctgcattgcggggcacgccgacggcgatggagtcagcgatggtgttctcttccatcgggtaccattcctcgttgttggcaatggcgcggttgatggggtggcagccttctgcctgagcagagatcaaacgcggcagcttgtcgataaagccgatggcgtacaggtccttcaggcccttccagacgccagcaatggtgcagccgtcgccgacggagatggccaggtagtcaggcatctgccaattcaactgctcggcaatctccagggagaccgtcttcttgccttcggacaggtaggggttaatggccgcattgcggttgtaccagccccatttgtcgatggcggccttagagagctcgaacgtgtcttcgtagctgccctggacggagatgaccgttgcaccgaaggtcatcagctgcgcgaccttgcccttgggggcgcgggagggaacgaagatatacgtcttgaggccagcggcagcggcgttgccagccagagaagaggcggcgttaccggtggaggagcaggcgatgaccttagcaccggcttcctgcgccttggcgactgccatggcggaggcgcggtccttcagggaagcggtggggttgatgccgtcgtccttgatccagagctttttcaggcccaggaccttggccagccggtcggcttcatacagcgggctccagccaacgcgcaggggagtgtccggcgtatcctcttccacggggagcagctcacgatagcgccacatggagttgttcttccgctcggccatcatttccttcgtcaggtgggctttgatatagtcgtagtcgtagatgatatccagaatgccgccgcattcgcagttggtcaggttggggacagcgggatattccttgccgcatttgacgcagcggccgcagatcacatttttcatgaatcgaattctcctttatgacagcttgcgggaaggggcaagcccctccccgcaaggatacgatacaaattacaggctcttcagcaggccggtcgcttcgttgaactcgttgaccagggcgtcgaggtcctttgcctgggcatggacagcgtcccaagtgcccttggtgtcgtaccactgggcgttcaggtcttccacattcatctgctgctgctcaacccaagtgtagtacttcaggttatgaacacgcttgcgatctgcataagtcagctccatcatattgtcggtcttgaggcccagcatgtgcaggttgtgatccaaagcagcttcggtggtgttataagcgccgtgggcttcgttcaactcttcaattctggacttgtacataaccgcagagtcagtcagaacagtgacgacgatgtcgttctcggtcagttcatagtacttggccatcttgatgcagcacaggacgttggcgataccggaaatgcccatccaggtcagcttttcgatggtctcgtcgtccagacccagctcgttcttgaggtacttctggccgtcagcggtgttgaagaggcggagcagtctctgggaatcttcgtcgtcaatatcaatgaccatgtccgtgttcttaacattgtgaacccaaggaacgtgcttgtcgccgatgccttcaattctatggccaccgaagccattgtcaaggatagtcgggcactgcagagcttcgccgactgccagcttcatgttcggatggcgttccttcagcaggtcgccagcgctcatggtgccagcggaaccggaggtgaagcacgcgcctgccagaacctggccaggcttcttcgctgcattgaaaacttcgtccagtgcatagccagtgacgttgtagtgccacagcgggttgcccatttctgcgaactggttgaagatcatcatggagggatcctgcttcagttcccaagtcttgtcgaagatttccttgacgttggattcgcagcccggggtcgcaatgatctggccggcgatggtcttgagccagtcgaagcgctccttggacatatcctgcgggaggatcgcaacagagtcgcaggcgagaagcttggagttgaacgcaccgccgcggcagtagttgccggtggagggccaaacagcatgatgataggtcgcgtcgaactgaccggtcacgagtctcggaaccaggcagccgtaggaagcgccgaccttatggcagccagtgggaaaccacttgccggacattgccaggatgcgagccggaacgccggacaggctgctggggatctcgacatagttcggaaccttctgatacagaccgccgctctctttggcttcgttgtgccagttgatacggaacaggttgatggggtcaacgtcccacaggccagtctttgcgagctttgccttgaccttctcggggatcaggtccgggttctgcatctgcgcgatggtggggatgatgatgttgttttccttggccttctggatattgtgggccaggccttctttgttgatgctcagatcaatcatggttttctcctcctgtttttacatcaagatatgagtacagcgtgtatttggatataccaaaatgctttgcaattttatcgccggatttcgtgatgagcagcgcgccgttctggctgaggaagcggatggccttgactttgtcttccttcgtcatcaaggctactggcttgccaaccagctcgacagactgcgcaatcaggtcgtccagcagatcgcttacattaagcgtaatccgttcgggttccttttgggtgacgtccttcggggagatcagctcgtggatcgagtgctccatcatggacagtgcggaaatatcgaaattgatacagaagatcgcgcccacctcaccgttgtcgtctctaatataaatagaggaggacttcagcagctttccgtcgcgcgtacgcgtcaaatagcagaggtgatcgttcaggcccggatcaatcgttttacccaaccgttccagcacgacatgggagggaccgtcgcctacctttcgcccagtgacatgaccattctctattgcaacaatggagtgctccatcgtgtccgctgaaagacggtgcacaacaacctcacagtcactgccaaattgcgcggcaacgcccttggccagcttctgcaaagcttcaaaatcacgatccttcagcattttggacctccttttgtgccagacgaatcccatgcactatgtacataatagcacagaaagcgcaagaatcaagctttttataaaaaaatttttaggaaaaataaaaatttgtttgacatctgcaattactatgctaaaatgagggtagatcatgtggcaaagacatgaggataaagttgtaattttttgacggaggtagtttcatgaacgttaattttgatgccattagagctgccgcggaaggctacaaggacgatatgtccaagttcctgcgtgacatgattgcaatccccagcgagagctgcgaagaagagggcgttgtcaagcgcatcgctgctgagctggaaaagctcggctatgacaaggtcgaattcgacaagctgggcaatgtcatcggctggatcggcagcggcgacaagatcattgccatcgactcccacatcgacaccgtcggcatcggcaacatcaacaactgggaaaaggatccctatgaaggctacgaaaccgacaccatcatctacggccgcggcggctccgaccaggaaggcggtatggcttccgcagcgtacggcggcaagattatgaaggacctgggcctcatccccgagggctacaagctcatggtcgttggctccgttcaggaagaagactgcgacggcatgtgctggcagtccatcgtcaacgagtacttcaatggcccggaagacgccagaaaccagatcgaattcgtgatctccacggaacccaccgacggcggcatctacagaggccacagaggccgtatggagatccgtgttgacatgaagggcatctcctgccacggctccgctcccgagcgcggcgacaacgcaatccacaagatggccgaagtcatcgaaaacgtccgcgacctcaacgagaacgacgcatctgacagcaccgagatcaagggcctggtcaagatgctcgacccgaagtacaaccccgagcattacgaagacgcgcgcttcctgggccgcggcacctgcaccacctcccagattttctacacctccccgtcccgctgcgctgttgctgactcctgcgcaatctccatcgaccgccgcatgaccgctggcgagacctataagtcctgcctgaaggaaatcgaagacctgcccgcttgcaagaaatatgccaaggacgtcaaggtctccatgtacatgtacgaccgtcccgcatggaccggccacgtctatgagaccgagtgcttcttccccacctggatcaacaaggaaaacgctgcccatgtccaggctctggtcgacgcacatcatggcctgtggggcgacaagcgcctctatgctgacgacaccgcgaaggcaaagcgcgaaggccgtccgctgaccgacaagtggaccttctccaccaatggcgtttccatccagggccgctacggcatcccctgcgttggcttcggccccggtgcggaatcccaggcacatgctcccaacgagatcacctggaagcaggacctggtcgtctgcgccgctctgtacgcagctgttcccggcctgtacaagcccgaaaacaagatcatggacgcggaattccgtcaggaactgaccggcaacgacatcaagtaaggttccatcgtccgttttttgcaaccaatgaccgcaaagcgggggaccggcgctgcgccgctccccagcttgcgggttaaaagagatacgtttgaaccgtttaggaggaaaatagtaatgagcaaaactgtagagcttgcaaagcatcttgagacactgaagatcaataacatgtataagagcgatttctattggacttgggacaagaccgatgacgaaatcgaagcgatcttcaccgtcgctgacgccctgcgcgatctgcgcgagcgcaacaagtccacccggatcttcgactccggcctgggcatctccctgttccgcgacaactccacccgtacccgtttctccttcgcttccgcctgcaacctgctgggtctggaagagcaggtcctggacgagaagaagtcccagatcgcgcacggcgaaaccgtccgcgagacggccaacatggtctccttcatggctgatgtcatcggcatccgcgacgacatgtatatccatcagggccacgagtaccagcagaccttcatgagcgcgctggacgaaggctaccgtgatggcatcctggagcagcgcccgacgctggtcaacctgcagtgcgacgtcgaccatccgacccagtgcatggcggatatgctgcatgttatccactacttcggcggcgttgagaacctgaagggcaagaaggtcgccatgacttgggcttattctccctcctatggcaagcccctgtccgttccccagggcgttatcggcctgttcacccgcttcggcatggacgtctgcctggcccatccggaaggctacgaagtattccccgaagtcgaagagatcgcccgcaagaactgcgagaagtacggctccaagttcaccaagacccacgacatgaaggaagccttcaaggacgccgacatcgtttatccgaagtcctgggctccgttcaaggccatggaagagcgcaccaagctgtactccgctggcgaccagaagggcatcgacgagcttgagcagagactgctggcccagaacgctgagcacaaggattgggcttgcaccgaagagatgatgtccctgacgaaggacggcaaggcgctgtacctgcactgcctgcccgccgacatcaccggcctgtcctgcgaagaaggcgaagttgacaactccgttttcgaccgctacctggttcctctgtacaagcaggcttcctacaagccgtatatcatcgctgctatgatcttcatgtccaaggtcaaggatccggtcaacaccctgatggctctggatgcagcagacgacaagcgcaagaagttctaattttcgcttcgagcacggaattttgaatttagcccaggcggtgtgccgtctggcgtgagcggttcggcggaagcgtcctccgtttccccgttatggctggccctgccagccgggcgcgcccgacgccgttttctttgggcgatgcaagtgtgcgcagcacacgggagccttccggaaagatcgttacataactataaggaagggtctctaccaaaaaataagagaggtaatttattatgtcccgtattgtgattgcactgggcggtaatgcactcggcaacaccgccaaggaacagctccagctggtcacggaaaccgcaaaggccattgtcgacctgatcgagcagggcaatgaagtcgtcatcgcccatggcaacggcccgcaggttggtatgatcaacctgggcatgagcacggcagcggaagctggcgccatcaaggcggagatgcccttcccggaatgcggcgcgatgagccagggctacatcggctaccatctgcagaacgccatcggcaacgagctggctgcccgcggcctgaagaaggacgtcgcgacggtcgtcacccaggtcctggtcgacgagaacgacccggccttccagaatccgacgaagcccatcggcgccttctacgacaaagccacggcagaaaagatcgccgcagaaaagggctacaccatggtcgaggacgctggccgcggctatcgccaggtcgttccctccccgaagccggtggacgtcatcgagaagaacgtcgtcaatgatctgattggcgctggcgtcgtcgtcatcaccgtcggcggcggcggcatccccgtcatccgcaaggacggcaagctgtacggcacccccgctgtcattgacaaggacttcgcctccgcgaagctggcagagctcgtgaaggcagatgcgctggtcatcctgacggcggtcgatcgcgtcgccatcaactggggcaagcccaaccaggagtccctggagaagatgagcatcgcagaggccgaaaagtactgcgaagaaggccactttgcccccggctccatgctgccgaaggtcaaagctgccatctccttcgcccagtgcggcggcaaggccatcatcgcctccctggagaacgctggtaaggctgtcaagggcgaatccggcacgacggtctaccgctgatcgcctgtcaaaaaattcttgacgcgcacaagcgcgaaaatcgaatcaaaacacgcgcctggctctggctgggcgcgtgttttgggattagacgccgaaaaatatcattgacagatcaaatcttgcacgctataatcaagatagcacttgaaaaccacttaaaacttcataaaagggcaatacgcccggcggcatagcccgccggaggcggaatggggtgcaaggccccgcgagaaggtcactgtgaagcctgcgcgatgcaggataagtcagatacgctaggattgtgccttggcttatgccttagccggagccaaagaaagcagatacctgcacggcgcgcgttgccgtgcattctgccagtttgggctgggtcttgcaacccggcttttttgcgtcgcgactggtcgcgacatgctttgcgcaacggcaaagcatgacagcgggactgtcaaagctgtggaaatatccgctgcagcggttattttaaaaatttcagaaaggtagaagaaaaatgaaaaaaaaactagccttccttttgtgcctggtgcttctggtcactgcgctggcccttccggcgtcggcggataattccgcggcgtgggacggcagtgtggataccagctggtacagcaaggacgcaacctcattcgaagtgagcacgccggcgcagctggcgggccttgccgcgattgtgaacggcaaagcagaaggcatcgcacaagatgcgttcgccggaaagaccgtcaaactgacggcggatgtcgacctcggcggcgtcaagggttccgacgggacctggagcggccggcagtggacgacgatcggcgaaggctcctggcagaacccctttaagggcacgttcgacggcgatggccacaccgtctccaacctgtacatcgacacgacgacggcctcttacgttggcctgttcggcggcacctctgaccaggcgaagatcaagaacgttatcatcgccagcggttatgtcaagacgatggcaagctacggctacgcagccggtctggtcggctacgcaggcagcgatacggtcatcctgaactgcgccaacggggcggacatcgtcggcaatcagaatgcgggcggcatcactgcgaacatcagcagcagtggctacatcgcaaactgctacaacaccggcaaggtccactccgagggcccgaacgccggcggcatcgcggcctacctgggctgcaagtcgacgaacctctacaacaccggcgccatcagcgctgcgggggctgactgcttcgtcggcggcatcgtcggcgagatggcgacatcgagcaagacgaccgtggagcagaactggtacaacaccggcgcagtcaccggcacgaaccccagcgtcaaggcgctgatcggcgccctggctggtaagggctacggcggcagctggagcgttgtttacccggtctacaaaaactgctactatgcaaagaccagcgagaccgttttcgccctgggcggcgaagcgacggatcgcgaaggcctaatcgccaagacggcggaagagctcaagactgcagacttgggcgcgggctttgtggcagacagcgaaaacgtcaacggcggctatcccatcctgaaatggcagaagaagacggccgacggcaaatacgactacgacaaggacgaagcggacggcctggatatcgctgccaccggcatcgagaacgccaccgccaagggcttcacggccaagatgacggcccgcctggagtacacgaagatcacgacgggcgacttcaccctcaaggtcacggtcgacggccaggaggtcaagccggagaacctgtcgtccacagtcacgacggacgacgaggcgacgacgatcgccttctcctggaaggagcttcccgcggagaaggacgtggtctactccgtgcagtttaaggaaaatgaggccaagattctcagcctcaccctgcccgccagcgacagctggatcgcctatgcggcggacggctttgccggtggcgacggctctaaggcagacccgtaccgcatcgagacggtcaaccagctggcatatttcggccgcgtggcggatgcgttcaataacaagtacatcgtcctggtgaacgatctcgacctgggcggcaaatactggatgccgaaggactttgccggtatcttcgacggccagggccatacgatctcgaacctgcaggtccgggagggtgtggagtccaactggtggagcacgaactccggcttcttcgccctgcttggcgacgacaacacgacggagtatgaaacgaagatctgctatgtgcagaacctgaccctgaaggacgccaatgtggataccgcgtctgtggattccggcgccatcctggcaggccgtgtcggtaacgatgtcatcatcgaaaactgccacgtctccggtaagatcacggcgaagtacgccggcggcctcgtcggcaaggtcacggtcaataactacaacgaaggcatcgaccatgactatatccgccgctgctctgtcaacgcgacggtcatcgcccccaagtactacgctggcggtctcgtctgccagatcgactggggcaatgatgactacggcagcctgaccattgaagactgctatgtcaccggtctcgtccagggcggttacgccgcaggcggcttcctgggccagacggagcgcaacagatgcgtcaccatcgaccacagcttcgtgacggccaacgtccttgcgccgggcggcaccgataagatgggcggcgtcggcggcttcgcgggctgtacgggcatcaccggcagccagagcgtcaacaagatggtcatccgcaacagcgttgcggcgatggaaaagctccagaacaagtccgctgcctccggtacgacgtctggccgtatcgtcagccagggttcggacctcatcgacgcaggcaagggcacctttgaaaacaactacggcctgacgacgaccctgctcaacggcgcagtcgccatggccagcatcaacaacggcgacgatgtcacccccgagaccattgccacccaggcgttctggtctgacactgtcggcttcgacctcagcgaaaacggcgcttggagctgggatgcggcagcgaaccgcccggtcctgcgcacgaacaagatggcgacggtcgccatgaccatcaccgagcagcccctggccgcgacggtttataacaaccacagcgccctgatgagcgtcgcggtcaagggcggtaccctgggctatacctatcagtggcagcgcgcccgcgaggcgacgagctccttcagcgacattgatgacgcgacgagctcgatgctggagatcaagaagaccgacagcttcgcaaaagacggctacttctatcgctgcgtcattacggacagcaccggcaacaccgtcacctccgacgcagctatgctgaccgttgcagacgctgtcttcggcgcggatgcggcccggcagaacctcgtgaagtactacgagggccggaaggtcctggattacgccggtcaggcgtacgccctggcccaggcaggtgtcgacctgagcgattacacggatacgctctacacctactacggctatgttccgacgaacaactccgcctcggcgcgcaacaccatgttctacctgtacctggatgcttacgtccgcgatatggacgtgacggattacaccgtcaccggcagcggcgcaccggccaaggagaacatgatccagacccttctgagcggccagaacgcggagaccggccgtgtgtactataagctgaacgactggatcgaaaatgccggtgtgccttctgaagtcctggcactggaaatgcactttgccggtgcagactcctggggcaatgaggccgaaggcacgaagctgggccgcagcggcgccatcgacgaaatgctgagccacctcgtcgactatgttggcggcggcagagtcttcacctatgaccgcatgttctcttccaggacggaagattccctcaccggccaggcggacttcgccctcctgatggcccgcctgacggacgatcccgtctatggcaagcaggccaaggctgctttggctgacgtcctgcaggcgatggagaacctctacgcctccggcaagatcacctacaccaagagcgcagcccgctatgtctcggccttcgtcgccggggcggaccaggccaagagcgccatcaagcgcaaccattacctgagcctcgcagaggagatcatgcaggacgccgttctgccctccgctgccatcgacggctccttcagcaaaaccgtcggcgcccaggctgtcaccggtgatgcagaagccagcgttgctgctctgatcgccctgaccgactacgaaaatagctctgccagctacgtgacctacacctatcccatgggcgacagcgcggcggtcaacaatgacctggccaacctgtcctttgcggatcccgtgactgcggacgtgaccctcccggcggaaggccgcttcggcagcaccatcacctggacgagcacgaacaacgacatcatcagcgccgagaccggcaaggtcaaccgccagaattacgactgcaccgtcaccctgacggcgactgccacccgcggcgatgtcacaaacacccgtgaattcaccctgaatgtcaaggccgacgccagcgccgcagaggatgcggtcgacgccgtcctgcgcagcctctccgtcctgcccgaaacggcgaaggacctgacgctgcccaagtcctctgacgagaacgtgaccctgacctggaccagctccgacgaagcagtcctggccccggacggcaaggtcacccagcctgaaagcggcagcgtcaccatcaccttgacggcgacggccaccatgggcgatgtcaccaagacgagagaattcaccgtcctcgtctacgccaagacgaccgacaagctgcagctctcctacgaagcctgcagagcaaagtggctctcgacgaaggaagcctctggctactggaacgtctttgcagcctacgcctccctgggcgattacatccaggatccggccaacggctacaacttcgacctgggcaaggccgaatccagctggaccggcacccattacggcgcgcaggtcctggccatcgtccagatgggcgagaacccctataacttccggggcgaaaactgggtcaagctgctggagaagaactacggcggtccgtggtccggcggcgtgtactctgagctgggcatggtcgcagctggcgcaggctcgaagtatggcttcacggccagcgcaaggccaggcctcagccagatcagcccctccgcaatgtccagcggcattgatatcgccggttgggcagcgaccatcgtcgccagccacgcaggcgaaccgggcgttgacgacgcagtcaagacctatgtcgactacctgaagaatatgggcatcgccggcgacggcaacttcacgggctgcaactacatctccaccgcctgcgccgtcatgggcttcgctggcctgtatcatgcgggctatgccgattgcgacatcactgcagcaccgtggatcaacgcgatcaccggcaagaccatggtcgacgccgtctatgacaacaactgggctggcaaggagaccatctccggctacgatacccaggctgctgtcgccatctgcgacttctacaacgccaagtacaacaacctcggcaacagctggttcgagtgccgcgtcaccaaggcccgccttgacaagcagatcgccaaggcaaacgagatcctcgccaacaaggccctctacaccgccgactctgtcaaggccattgaggacgcgatggaagtcgtcaagggcattagcgaagagcgcctgagcgccaagtttgccgactacggcgaagaatactacaccctctacgacgcagtccgctacgccaagacggcggagaacgcagttgccgacaaggccgctgccgacgcggtcactgccatgatcgacgccctgcccgccgctgcggacaccacgctcgagaatgccgatgctgtcgccgccgcccgcgctgcgttcgacaagctgacggaagcccagcagtccctcgtctctgcggatgccactgcgaagctgaaggattgcgaagcgaagatcgccgacctcaaagctgcggaagccgataaggccgccgttgccaaggtcgaggagaccatcaacgctctgcccgcagcagataagatcaccctggagaataaggaagccgtcgcagcagcacgcgctgccttcgatgccctgaccgagacccagcaggcgctggtctccaaggatgcgctggagaagctgacggccgcagaagacgcgctggctaagctggaagccgcggaagccgacaaggctgcggctgcgaaggtggaagagaccatcaacgccctgcctgcagcagcggacatcaccctggagaacaaggaagccgtcgcagcagcacgcgctgccttcgatgccctgaccgagacccagc

SEQ ID NO: 3043 - DNA, 9021 bp, Unknown
  16S sequences of unknown bacteria
cgtgtgctcggcacttcagcccttcgggccttcacctttttgcaagcatttgctctgcaaaaaatgccagaaatgacgtacacgccgtcatttctgatttaagcctcgttcttccgatactttgtcaatgctctgcgcccgccgtccgcccttccgcgggcggcgggctggacgttgacggccccagcatcgatggggagacgcgcttgtcaacacccaagaggctggcggaaatttttcgccagccggtattttttggcagggaaacgcgcggccaggcgcgaaatttgcatacaaactccctggcggcgctttggcgatgcggaaaggagattgcaatggaaacatggaaaatccaattggcgggcggagaatggacggtttgcgcgctggcggagggaatttaccgggtgattctgcgccgcgatgcgcgccagcgtgaatccatgctaacgcgctatggcattgtgcaaacggatttgggcgcggtggaagcgacccggctggaaaacggcttgcgcgcgggagaatcgcgggtggaggtggaagacgggcgcgccgtgtttcattcgcgcggctattccctggtgctggacgccagcgcgacgttccaggagcgctaccggtacggcggcttttgcctgcgcattcccctggacgaggacgagcgcctgttcggcctgggcgatgaaacgcgcgacgcactgatgaagcgcggccgcgaggcggatctgtggcaggccaacgtaacctcttatgggcctgtgccctatgtgatgagcgcgaagggctggagcattttgctcaatgtgacgtatcggcaccactacgacttgggcaaaaccgacccggacgccctgcgcgtggagagcgcgcagggcatgctggacgcgtatgtgttcctgggcgcgagcatgaaggacgcgctggacaaatacacccgcgtatcgggccgcccggtgcttttgcccaaagcggcttatggcctgacatttgtgaacaacgaggaagaaggcgcgcgcgacctgttgcaaaactgcttgatgttccggcgggaaaagattccctgcgacattatgggcctggaaccgggctggatgagcaagcactacgatttttccgtggacaaaaagtgggacgacacgcgcttctaccggccctattggatgcccgagaattacagcggcagcggaacgttcttttataacctgcgccagatgggctataaattgagcctgtggctgtgctgcgattatgatttgctgtggcaggaggaaaacgagtgccgcgagcgccgggcggcggatggcgcgatggcggcggacgcggaaattgtggacgagcacttgagcggagccctctacatggataagctcacaaagccgggcgagggctggttcgagcatttgaaaaaatttgtggacaacggcgcggccgctttcaagctggatggcgcgaaccaggtgctggaacatccggatcgcctgttcgccgggcgctataccgacgatgaagtgcacaacgtgtatcccgtggtgtatggcaagcaaatgaaggaggggttccagaaatacaccggccgccgcgccatgatttacacgccctgtatgtatgccgggcagcagcaatattgcgccacctgggcgggcgatacgggcggcggctacaaaaccatggtttccatccaaaacctggccatgtgcgggcacagcaacgcttcttgcgatatggacgtaacccagctttccagcatccactattgcgcgctgatgccctggatgcagcatttgggctggcgcaattggcaggatccctggttcttgggcgacgaattggaagggatttaccgcgattacgcgcagctgcgctcgtctttgttcccgtacatttattccatggcgcaccgggccaacgaaacggggctgcccatggcgcgtccgctcgccctggcctatgagggggacgcaaagtgggaccatgtgctccatgaatatatgtttggcgatagcatcctggtcacggcctttgatagcaccattcaattgccgccagggcgctggacggattacttcacggggcaaacgtatgaggggcaggaaccctttgtgtacgacccgccgcgcggcaaaggcggcgccatgctggtgaaggacggcggcattgtggttacgcagccgtggatgccgcatttgacgcaccacgacccgctggagtatgtggtgaacgtgtatctgggcgcggatggcgcgttcacgctgtacgaggacgatggggagacctacgcgtatgagcggggcgaggtggccaccacgcagttcgcgttgcaaggcgacgcgctgagcatcggcatgcgcaagggcagctacacgcggcaacacggttcccggcaaaaggaagacaatggggtcgtgctagaagagcggcgcgtttgccagggaatggcaagcttggtaccgttctatgtgcgactccacaacgcgcaaaagggcgcggcggtcacgctgaacgggcagaaagtggaaagcgaatggcaggatggatgcctttgctttgtggcgccggtttccttgcacgagcgccaggatttgacgtatcgcattgtccaggagaacgcctaggcatgcgcaagccaaagaagaggagtgcggttgcatgatagcatatgaaagcgccctgaagggggatttgcgcctgcgggtagaggcggtttcccgccgcaccttccgagtgcgcatcgccgatgtggaggccagcgagccgggcatgaaccggtatggcttcattttgccgcagccagagccagatgccaacgtgctcgacgcggacgcgttcctgaccgtggaaacggaagccgctagcttgcgggtttccaaagaagatggcgcaatttggctgcaaaacggcgcgggtcacaccattttgcaaagctcggagccgcccgtgtgcaagcgctcgggatttgaggcgggctttgcgctggcggcgggttcccgcgtctacggcctgggcgacgtcacccgggagcggctggaaaaaacgggctttgccgtggaaatgtggacggagaacgtggaaaagtacattcccattcccttcctttccagcacggcgggttggggcctgtatctgaacaccacgtggcggcatcgctttgatgtgggcgttgcgcgcgagggggagttgcgcgtctgcgcgtcgggcggcggattggatttctatttgttcgtgggggatggctttgaggaaatcctcaatgaatatacgaacctgctgggcaaaccggtcatgctgccccggtgggcctatgggctgacctatgtgtgcaaccaaaaggtcaacgatgcggagatgatgcaggaatgcctgaatttccgtcgggagggcatcccgtgcgacgtgtgcggcctggagccgggctggatgagcaagcactacgattttagcgttgacaaggcctggaatccggatcggttctatatcccatattggtcgcccaagggagaacaaacgttctttggcgcgctggatcgactgggattccaactgagcctgtggctgtgctgcgattatgacctttcttttgaagaggagcgccaggcgcggcgcgcggttccggcggaagcggcgggcgaggagcccaacgcgaacgactttgaaaacgacgcgaatttccacaaaaagcctttgagcatggatccctataccaaggtggatgagccgtggttcgagcacctaaagaaatttgtcgatcagggcgcgcgctgcttcaagctggatggcgccaaccagattgtggatcacccggatcgcaaatggggcaacggcatggacgacgaggaaatgcacaacctgtatcccctgatctatggcaagcagatgagccagggatacgccgactacacggggcggcgcagcatgatctattcggcgagcggctacgcgggcattcagcgcttttgcgcgagctgggcgggcgacaccggcggcggccccaagccgctggcccacatgctcaaccatggctattccgggcacgtgaacaccagttgcgacatggatgtgttcagcgcgggcggcattcactttggctttttccagccctggagccaactgtgcaattgggcctattggcggcaaccctggttcctaacgccggaacgcaaggaaatgtatcgcttttacgccgtgctgcgctatcgcatgctgccgtatatttacacgctggcgcatcgcgccgccaccacgggctatccgctgatgcgcgccatgtccatggaatttccgcacctggaaaaggcggatgaattgctctgccaatacatgtttggcgacgatatgctcacggcggcgtttgccgaatcccttgttctgccccagggccgctggatcaacgcctggaccaacgaaaccgtggagggcgggcggacggttcccgccagctatcccagcacggttggcgggccgctctatctgcgggaaggggcggttattcccacctaccaaccggcggagtgcgtcagccgcatggactttgcgcaggtggaatggaacctgtatccgggccgccaggcgcgcgcctatgaactgtatgaggacgatggggaaacctatcgctatcgggagggcgctttcgccatcacgcgcatagagatcgcgcccgctggcgcggggttgaccattcgcctccagccccggcgcggccagtatgcgggcatgccgcagcggcgaacccaccgcatcaatttgctgaactggcccaacgcgcaggaggttcgcgtcaatggccaggcggcggaatattcgctccgccaggatggctggtgcgccagaatagaaggcgggtttgtttccattccggtggaggaaacgggcgaggaaatttgcctggaagtgcgctgaatttgtgatgccggttgacaatccgccgcgaatgcgctatactgaggacgttggctttgtcaacgcgcagcgcgcccgccttcttttggaaaggcgggcatttgcctgcaaaggcgggagggaagaatgtgagcgatcggcaggaagggcacgatttttttcaaaaccgcgcctgccagtattttccctgccacaagggggcggacgcggaggactttagttgcctgttttgctattgcccgctttacgcgctgggcaggcgttgcggcggcgcgtttcgctacacgccgtcgggcgtgaaggactgctcgcggtgcgcgtttccccataagcgggaaaattacgatgcagtgctggaacggtatgcggagattgcggatgtggtgcgccggatggacgccataccggacagcgattggaagatggagggaaaatcgatgcgcgaatggaaagccgccgcgctggatggggcggccatggccgcggcccaggcgcggtgggacgcggtggccaagccgctgaattcgctcggcttgtgggaagcatgggtcgtgcgcatcgcgggcatgcagggtacgccggatgtgcgcatagcgccccggtgcgcgctggtgttctgcgcggatcacggcgtggtggaggaaggcgtgtcgcaatccggcagcgaggtgacggcgctggtggcgcagtccgtggccgagggcgcggccaacgtcaacctgatggccgcggcggcgggcgcaaaggcgttcgccgtggatatgggcatggcgcgggacgtggcgcacccggacatgatcgttttgaagcaggcgaagggcacggcgaatttcacgcgcggccccgccatgccgcgcgaggcggccgaacgcgccgtggagagcggcgcggacctggtggcaaggatgaaagaacgcggctataggatgatcgccaccggcgagatgggcattggcaacaccacggcggccacggcggtttcctgcgcgctgctgggccgcgcgccccgcgaattgaccgggcgcggcgcgggcctgtcggacgcgggccttttgcgcaagatttccgccatcgagcgcgcgctggagggcaaccggcccgacgccaacgatcccatggacgtgctttctaaggtgggcggctatgaaatcgccggcatggcgggcgcattcttgggcggcatggaacagggcgtgcccatcgtgatcgacggggcgatttccgcggcggcggcgctgctggcggcgcgcatttgcccggccgcgcgcgattttatgctgccgtcccacgccagccgcgagcccatggcgcgcgcgctgctggaagcgctggacttgcagccgcccattcacgcggatatggccttgggcgagggcaccggcgcggtgatggtgtttccgctgctcgacatggcgctgcgcgtatacgcgggcgagcacacctttggcaacctgggtatggaggcctatgagccgcaggagggcaaaccatgatcgcgctcatcacgggcgggagcggctgcggcaagagcgtgtacgccgagcaactgggcgcacggctcatgggaacggcgcgctgctatatcgctaccatgcgcgtgtgtgacgaggaagcggaaaaccgcgtgcggcggcaccgggcgcagcgcgcgggcgcgggctatgccaccatcgaatgcccgctggatctggcgtcggcgcgggtcgtgcccggctcggtggtgctgctggaggatgtgccaaacatcttagccaacgaaatgttcgaacccggcggggatgtcgcccgcatccggcccgcgctggaaagctggatggagacctgcgcgcacctgctgatcgtgaccaacgacgtgttctccgatggcgtgcgctatgacgcgctgacgatggaatacatgcgccgcctggcggagctcaacgcgtggatcgccgcgcgggccgatagcgtgacggaactggtgttttccctgcccgtggccataaagggggctttgccatgcgcctgatgcgcgcgattgccatcgcgttttccacgtattcgcgcattcccatgccgcgcgtggagtggtcggaagaaaaccagcgctatagcatgtgctttttcccgctcgttgggttggcggtgggcctggcgctgtggctatggctgtggctgtgcgatttgtgggcgctgggcgcgtttgcgcgcggcgcgatcggcgcggcccttccgctgctggtgagcggcggcattcacatggacggctttatggacacgctggacgccatggcctcctggcaaccgcgggaaaagcggctggagatcctcaaggacgtgcacaccggcgcgttcgcggtgatgggctgcggcgcgtatctgctagcgatggcggggattttgagcgaggcgcgcgccgggcaggggctggccatcgccgcttgctttgtgctttcccgcgcgctcagcgcgctggcgctggtgtggtttcccaaggcgcgcaagggcggcatgctggcgggctttgcccgcacggcaaaggaaaaggccgtcacgggcgcgtgctgcgcctatctcgcgctgtgcgccgcggcctttctctgcgcgcagccgctgtccggcgcgctggcgctggctgcggcgggactgtgcgtggcgtattatttctttttcagccgcaagtattttggcggcaccacgggcgatatcgccggctggtttttgcaaatttcggaactggtcacgctggccgtgactgtgctgatcgggggaagattgctatgaagctctatgtgggcggcgcgttccaggggcaggaagaactggcgcggcgggagaacccgggcgcggagatctggccggatttccatgaaaccgtgcgcgcggccatggcgcgtggcgaggaaccgggcgcgtttgcccggcaaatctgcgcttcgcatgcggatgccgtgattgtggcgaacgaggtgggcgcgggcatcgtgcccattgacccgggggagcgcgcgtatcgcgagggcgtggggcgcgcgctgtgcgccattgcgcaaaatagcgaaagcgtgacgcgcgcggtgtgcggcatcggggtgcggctcaaatgaaatgcgtgctgatccggcatggcaaaaccgcgggcaatctggcggggcgctacattggctgccgcacggatgaaccgctgtgccccgagggcatcgcgcagctgcgcgagggacgctatcccgcggtggagcgggtgttcgccagccccctgcgccgctgccgggaaaccgcgcgccttctctatcccgccatggagatggagattgtggaggatttccgcgagtgcgatttcggcgcgttcgaggggctttcctatgccgatctgaacggccgggcggattaccaggcgtggctggactccggcggggaagcgcccttccccggcggcgagagcaaggcggagttctcgcgccgctgcgtgcgcgcgtttgcggcgtgcaccgcgcgcgcgggcgtttcgtccgccgcgttcgtggtgcatgggggcacgatcatggccattttggaaaagtacgcccggcctccgggaacgtattacgattttcaggtgggaaatgggcagggctatgcgctcgatctccccgaggggcgctatcgcaaattgaacggcagatgaatcaaggcatccaaattgcgggttcgccagcaatttgggtgccttttgtcgcggggatttctgccggttggcttggcaattcttccgtcacggtttgcgccgtgccatcactttcccttccctttgtaatattgtgcgtaaagattggggtttgcgggtagagatttatctccaattgcgataaaatattcttgattgtggacggggggggaagctccccccactgccacccccaccacaatttgcttgagttttctgcgaaaactccggccgcaaattgtgcaaggaagatatttttcttccggcaaatgggatttgcctgcagaaaaatatcgcaaatccgccgcgcatgtcgccggatttgatggaaagggtggtttaccaagactttcttagcaatcaaacgggaatccatcccgcgaaaaggaggaatcgcaatgcccaatcggattttgcacgaaagcatcaagtactgcccc

SEQ ID NO: 3044 - DNA, 11705 bp, Unknown
  16S sequences of unknown bacteria
acaaccagacagatcacatcggccagaaagtctttgattcgccttcaaacaaaaacaatttctttagttttccacttgacaggttttggctgactgtgaatagtaacgattcgccttcaaacaaaaacaatttctttagttttccacttgacaggttttggctgactgtgaatagtaactctttttgatcaaacgggagcatagccacgatctgggccacgctcccgttggtcaattatgcttcatcacccttctgtgatgaacggatgacatgtgcgatgcgccggttgcatctcatccggatgaggatgcaggcgatcaaggcaatgatcgtcgatgcggcaaacacaccggccgcgatgatgaagatctgctcacgctgctgctcgcgggcatacgcctgttcgctgatcgcggcggcgccagaatacagctgcagggtattctgtgtcttctcatactgatagtagttcagttcgcctttttcattcatggcatagatcagcgcataatcggaaaactgcggatcatcgaatgtccatcccggcagttcctgctcatccacgctcaccgtcgtaaatgtcatgccctctctttcctgcaggttttctgggacatctacgatgaacaaggcattgcccagcagcgccatcgggcggaatatcgaggtcactttgccgctctcttcatcatagagatagaagctgcgcgcaccgctctcctcgtcgatcaggtagatgaccgtgcggttcatcagcgtgctggtccacgcgtcgatctccttgccttcgaccgtgatggtcgttttctcgaatgagtctgcaggcgcagccacgtctgcggtgtttttgaccacgccgagctgctttccaccgtattccagatagacctcaggcgtttcttccacataggcgtggatcacataggtccgtgtagtgccgtcctctgccctgacctggacagacagatcgttgtttcccgggtcaagctgatgctcgccggccccgcttacggcagcggcatcatctgcggccgaagcgctgatctcgatcttctccgtgccggaaggcaggctcagctcatattcggtcgtatctgcgctgaattccggggataatgtccctgcagagacgctgagggcggacaaagcggcattagaggagagcgatggctgctccggctgctggatctcctcctgctgttgctgcgtctgttcctgcgtgccgctgtcatataccgggcgctcaaggacagtgacgctcgcgctctcatagacctgcatatcctgcgcactatcataatccgcgatcgtaccggaaatggtgacggtgatcgtgcctggggaaacggcgttgaccgtatagctcttggacgagcggtcgaaccagtcatggtcgctgaccgctccgcccacgctgatctctccggcggcgttcaccgtcccgacggtaaatgtcacgctgtctcccacatagatgctcgtgctgctgacgtagacataggcatagcctgccgcgcgcacatggatcggcagcgcgaacgcgctcacgatcagcatcagcgccatgaccatgcaggctgctcttttcatcttgctcatcaaaaatcctcctctccctatcggttcatgatcttattcttgatctggacgtaatcggcgggcgagactttgttgtccttgttcatgtcggccgccttcagcgcattgccgcgcaggctggtcttgcccatgatatgattcttcaccaagacatagtccgccggggtgatctttccatcatcgttcacatcgccgcgagtgtagctgctctcacccgacgatcctgatccgctggatccgctgtttccgccattggaaccgccggaggatccgccttctccctttatcactttatctaacagggaagaatgaacgtagccatagctcttggcaaaatcatagccctctccgctgtaatcaatgttgcttcgcgatgcatcgagcggcgtatccagctggatccgataccagacatctgatccggagaccttcgtccctttcacctcatccagcaggacgaaggacatgtttccgctcttcggcgtcgtgtaaaggccgaggaggtagaggcctcttttcggatattgaccgctccctgcgccttgaccatgatcgtctcacggccgacatcgctcttgccgctgatgtattcatcgagcttccaggcccagtgcgccgccttctctccccaatatgggtcagaggcatagctgagcatccccgccgacttatcgccgaggaaagagccgtgatatgtactgtatttcggtgtcgaataccagagattgacatagtatcgcgcatggtcagcgatgctgttctggggactgtggtatccgttggcctgtcccgggtctgcatcgaccgcattgtggccgaacagattgttcttgctcatcgcgatgctgctcgtgccaaaggcgctctcattggctgatacgccaaagagcgcaagcgcattggcgccgtatcgatcttggttctggataaaatagcggcccatctgatacagcttcgtgcctgaagcgctgtagcggctgcccagatagtgctttacatactgatcgatgtcattcgccgtaaacgacgtctttgtccggttagagacaaattggtaataattgtaatacggatcgtccggattgatggcatgctttctcgtgtcttccttgtaatcatccagcatcgtgttgtaatccgtgtagaaataatgcccgtcatagctgtaatacacttgattgctcttcatgtaggactgctgctctcccacggtcactgccgaggcgtagctgctcccatgcatgtcgttcttgatgtaatgcttcagcatcccttgctcacagcggtaaaagctgacatagagcgtatcgctgccatccgcatcgagcacctcgacctcgctggcattcaccagaccgacgactcctgacagcatgaatttgacctttgtgccctgatagccgagaaacgcggcatctgccgcatagtatccattggtgtatccgctgtagccggttccgacctccgtatagctcgtgttcagcgacgcgctgttcttcgtgcggaaattgaccacaccgtgggtgatggcgtgcatttctttgacatttgcgccacgctgtctggccgcggatgcgttatgctgcgccgtctgtgcttccatctgcgcagtatccatgatcaccagcctgccctcttcgtccatcgtggtgaacagatgatccggcggaagcactgcgcccgtggaaaagctgttctcttcctgcgccatcatctgtgcgccccatacacatcctgtgcatgccagcagcgcgcagcagatagctgcaattgcttttttcatcaatatcctcccgtttccccttttttcacactcgtgcatcgccattatagcatatttgcaaagacgctgcctatacaaaccagaaactgtcatatcgcctttgaccacggtgtttgcggcgaaaaaaagccccatgcgggcttatcgcatgaggcgttttcattactgtgtatcgacgatggacagatcgtcttcagctacggcttcattgatcgcgtcgctgctgatcggctccacatactgtgtttctgccggttctccggcatagctcatgaaggtctcatcctcttcatggcggtgattgcgctcttcgcggatctgcttgagctctgcagccttagccgcgatgatgtggttggtcgggcgatcgacctcacagccggttccagccgggatcagcttaccgatgatgacgttttccttcagtccgatcaggtgatcgaccttgcccttgatggccgcatccgtcagcaccttggtggtctcctggaaggaagcagcagacaggaaggaatcagtttccacagaagcgcgggagataccgagcagcaccggcttgatcttcgccggcttctttccgctgagcaatgcttcacggttgatcttgtttgcattgaccagggaaacctggatgcccgcattcagcggtgtatctccgccgtccacgacgacgaccttacgcagcatctgacggatcatgacctcgatatgcttgtcgctgatctcgataccctgagactggtagaccttcttgacttccttcaggatatagttctgcacctggcgcacgccggcaaccttgagcagctccttcggatcgaccggaccttcggtgatcttgtctccggcctcgatgtgcacgcccggcttgatccactggcggatcgcctgggaaggattgatcttgtgcaccttgctttcgagctcattggtgatcgtcacctcaaagcccggggtattttcgagcgattccacgctcgtcacttcaccgctgatctgtgcgagcacggcaacgcccttcgggcagcgggcctcgaacagctcctcgacacgcggcagaccctgagtgatgtcgccgccgtcggcgcttgccacaccgccggtatggaacgtacgcatggtcagctgcgtacccggctcaccgatggactgtgccgccatgatgccgacagcctcgccgacctcgacattcttgccggtcgccatattgcggccatagcatttctggcagacgccatgcacggatttgcaggtaaaggcagagcggatatagaggcctttgatgccgctgtcgacgatctgcttcgcgatgtcttctgtgatgaattcatcagaagcgatgatcagttcgccgctcttaggatcgacgacatcctgcttcgtataacggccgatcaagcggtcatacagggattcgatctctgagttggtcttgcggtcaacgatggcttccacccagtagcccttatcggttccgcagtcttcttccttgatgatgacatcctgtgccacatcgaccagacgtctcgtcaggtaaccagactccgcggtcttgagggcggtatcggtcagacctttacgcacgccgtgcgtagagataaagaactcggacacgttcagaccctcacggaagcaagagtagatcgggacctcgatgatgctcggcacatattcgcccttggccgatttggactgggacggcttggccatcagtccgcgcataccggccagctggcggaagttggagggatttcctcgcgcaccggagcgagccatcatattgatcgggttcttacgcggcagcgagctcagcagctcatcagcgatgtcatccttgacatctgcccacagcttgttgaggtggcgctcccattcctgcatcgtcaacaggcccttgcgctgcaggcgcttgagctcttcggccttttccttgccttcgttgacgtgcttttccttgttcggcgcgatctcgatatcggcaagtgatacggtgattcccgccacggtcgaatatttgaatcccatgtccttgatctcatccaggatctgggaagtcttttctgtagaatagcgcttgaagatctctccgatgatctttccgaggtctttcttcttgaatgcggccgtgaccggcagattcgcgatcgcctcgcggatgtccttgcccatctccaggaagaacttgtccggcgtagcatggaagttcgcttcagaaacctcgttcaggtaagggaaatcctccgggaacatgttgttgaagatgacctttccgaccgtggtcagcaggtacttgttcatctgttcgctggtgaagctcgtcttgttcagcgcgcgggccgggatggcgatacgggagtgcagatggatctgcttggtctgatatgccatcatgatctcatcgatgctgccgtaaacgtgcgcttcgttgtctgcgaaacgattccacatcgctgcttcttcctcgcagtccacatccagataacgctgggcttcagcgcggaactcttccgcggtctcttccatggtcagatagaagttgcccatgaccatgtcctgacccggcgtaacgatcggctttccatccttcggaccgaggatgttgttcgatcccagcatcatgacgagcgcttcggcgcgcgcctcttcgctcagcggaacgtgcacggccatctggtcgccgtcaaagtcggcgttgaaggcggtgcagaccagcggatgcagacgcatggcacgcccttccaccagcttcgggatgaaggcctggatacccaggcggtgcagggtcggcgcacggttcatcaggatcgggtatccgtcgatgaccgattccacgatatcccagatccgcggatcctgacggtcgatcagtttttccgccgtcttcgggttagatgcgatctcgcggttcacgatctcgttgatgacgaacggcttgaacagctgtacggccatctcacgcgggatgccgcactgatacatcttcagatccggtcccacggcgataacggaacggccagagaaatcgacacgctttccgagcaggttctgacggaaacgtccctgcttgcccttcagggaatgagacagcgacttcagggcgcgtccgcttgcgccggtgatcggcttggagcggcgtccattatcgatgagcgcatcgactgcttcctgcagcatacgcttctcgttctgcacgatgatggccggcgtaccgagctcgagcagcttcttcagacggttgttgcgggtgatgacgcggcggtagagatcgttgagatcgctggtcgcgaatcggccgccatccagctgcagcatcgggcgcagatccggcggtatgaccggaacgacggtcatgaccatccactccggcttgtttccggaacggcggaacgcttcgatcgtatccaggcgcttgaccagctttttgtgcttttcgccctgggcgttttccatggccgtcttcacgagcttgtattccttctcgagatcgacgtccttgagcagcgtcagcgcagcttctgcaccggtctgtgcgacaaagctgcccggaccgtagatggccatgttctcgcggtactccttctcagagagcacctgtttgtattccagcttcgtatctctgggatcggtcacgatccaggaaacgaagtaaacgacttcttccagctgtttcggggtcacatccagcagcagcgccatccgggaaggaatgccgcgcagataccagatatgtgcgaccggcgcagccagctcgatgtgtcccatgcgctcacggcgcaccgtggacttggtgatctctacgccgcagcggtcgcagatcacgcctttgtaacgcactttcttatattttccgcaatagcattcccagtccttggtcgggccgaaaatgcgttcacagaacagaccgtctctctccggcttctgtgagcggtagttgatcgtctccggcttcttgacttcgccgtggctccattcatggatacgctccggagaagcaagcttcacctgaatcgaggcaatattattgatgctcataatctatttacgcctccttttcttcatcttcacgctccagcatatcatccgctgaactgtcctcctgggactcttcgtccagctcttctgcttccgcaggagcaggttctgccgccttcggttcttcaatgaccggcagcacggtcggttccgagctgtcatcattgctgaggtcgacttcatttccttcctcatccagcaggttgacgtcgatggcgagtgcctgcagctcatgcatcaggacgcggaaggactcaggaatgcccggctccgggatatccttgcccttgatgatggcttcataggtcttcgtgcggccctggatatcatctgatttgacggtcaggatctcctgcagggtatgcgcggcgccataggcctccagcgcccagacctccatctcaccgaaacgctgtccgccgttctgcgccttaccgcccagcggctgctgcgtaacgagagagtaaggtccggtcgcacgggcatgcagcttatcgtcgaccatgtgcgccagcttgatcatatacatgacgccgacagagatgcgctcatcgaacgcttcgccggtacggccgtcatacagcacctgcttgccatccttggtcatgcaggcttcctgcatgatctcgctgagctcttcgttggagataccgtcgaataccggggtcgcgaacttcacgcccagctttttggccgcatagcccagatggatctccagcacctgtccgatgttcatacgtgaaggcacgccgaacgggttcagcatgatgtccaccggtctgccatccggcatgtacggcatatcttccaccggcaggatcttggagatgacacccttgtttccatgacgtccggccatcttgtcaccctcagagatcttacgcttctgcacgatgtagaccttgacggtctccttgacgcccggaggcagctcatgtccgtcctcacgcttgaagacgcggatagagtgcacgatgccggctccgccgtgcggcactttcagggagttgtcgcgcacctcgcgcgctttctcgctgaagatcgccagcagcagcttctcttccggagagatctcactttggcccttcggggtcaccttgccgacgaggatatcgccttcctgcacttccgcaccgaccatgatgatgccgcggctgtccaggttgcggcaggctgcctcgctgacattcgggatatcgcgggtgatctcttccggtcccagcttcgtctcgcggcagtcgatgtcgtattcttcgatatggatcgaggtgtacacatcgtcgcggacaaggcgttcgctcatgatgatggcatcctcgtagttatatccgtaccaggtcatgaaggcgatggtcacattctgacccagcgccagctcaccgttttccatggacggtccatccgccaggatatcgcccttttccacacgctcgtgcttcttgacgatcgggcgctggttgatggacgttccggcgttagagcgctggaacttgcgcatgcggtattcatgcgtctctcccgcatcatcgcgcacgacgatacgctgagaatccacatattcgacgacgccgtcttccttggcgacgatgccgacgccagagtctttggcgatcttatattcgatgcctgtgccgacataaggggaatgcggcatgagcagcggaacggcctgacgctgcatgttggcgcccatcagggctcgggaggcgtcatcgttttccaggaacggcacgcaggctgtcgccactgagacgatctgcttcggagagacgtcggccagttcgacttcttcgcgtctggcgatgatcgtgtcgccgttcttacgcgcgacgacatgctcgttgatcagacgtccatcacgcacctcgttggcctgagcgatgacataatccgcttcttcatccgcggagagatagatggcattctcctgtacggtgccatccgcattgacgatacggtacggcgtctggatgaagccatactcgttgatctttccataagtggtcaggttggagatcagaccgatgttcggtccttccggcgtctcgatcggacagatacggccatagtgtgagctgtggacgtctcgcacctcgaagccggcgcgatcacgggtcagaccgcctggaccaagcgcggagatacggcgcttgttggtcagctcagccagcgggttctgctggtccatgaactgagacatctgcgaactggagaagaactccttgatcgccgcggtcagcggacggatgttcgtcagcttcttcggcgtcagcgtcgctgtctctgcgatggacatgcgctccttgaccacgcgctccatgcggctcagaccgatgcggaactggttctggatcagctcgccgaccgtgcggatgcggcggttgcccagcatatcgatgtcgtcggtctcgccgatcccatccatgatgttcagattgtaggaatagaacgcatacatatcggagatagtaatggtgtgcttatctgcaaacgggtcattgccgatgatcttcaccacattgccgtctgcgccgcgtacatacagctcctgcacggcagcgccgaccagccatgcgtacacttcatttccggcatagacattcgcgatgatctcttccaccgtatctggatccagcgtatccggctttacgcgcggcgtatagccgtcgacatacagatcgccgtctgcatctgcgatatcatttccctcttcatcagtcagacgcgccagcgcgtacatgcgctgtccgtagttcagcaccgctgccgcattttctgcggtcatcttcacctttttggcgatgatcccgccatgcacgctgatcttttccacgttgccctgcagcatgtcgacgtcagcctcgctcagcacgctgccttcatacagcgtgatgtcatccagttcgacgtcggaagccaggacacggccgaccagcccgctcttccattccaccggcacttcgaccacatccgggtggttgaacagcggattgaacgggaatgccgtcatatagatgcccttgttcagctctttgcgcagcgcgttgcgctcatcgcggcggatattcgttccgctctccatgaagatcgtgccgtctgcaccgacgatatcctgcgccagcgtcgtatgatatgtacgcgcaaacgcattcagcttctttctcagcttgaaccgtccggccttggtcaggtcataacggcgcggatcgaagaacttggcgttcatcagggtgacggatccatccagcgtcgggatctcgtcgctgcgctggttctcatagatggacagcagcgcctcctgcgtcgacttgaccttatcggcgagcagggtgttttccaattcctcatattttccgaagaacgcggtatataacagcagatacaggttcatgtattcgcggttttcatcatcgatggccagatcctcgctccattctctgcccatcgcgcgcaggaaggactccatctggctcgtatccagcggatcctcgctcggcatcagatccacggacataccgatggccttgaacaggacactggaaaggattttacgcttacggtcgatgctgacggaaagctggcgtccggtcgagctcttcttcagctccgtcatgaactcaagccaggttccccggctcgggatcagctcgcagctgtacgacgtcttgccggtcttttcctcgtatccggtggaaaagtaagcgcccggagaacgcacgatctgcgaaacgatgacacgttccgctccgttgataataaatgtgccggtttccgtcatcagcgggaaatcgccgaggaagacttcctcctctttccgcatgacttcacctgtgttcgtatccgtgatttccagctccatcttcgccttcagaggtgcggcatagttgcactccctgtacatcgaatcttcagcgctgtatttcggctcttcaaattcataaccgaggaatttcagacgaatattgcccccgtagttctgaatcgggtaaatttcgttgaaaacttcagcaattccctgagtcttgaaccattcgaaagagtctgtctggatttccaccaggttcggcagttccagcttaccgctgaccttggaatagtctctgcgctcagcctttttaccggaagcgacaatacgataaggtttctttttgtccatgtacgccatcctttctctgtcattgtttactaaaatcggataaaattcagcattctatcatcttagtattctgcattttattataatatcaatcacctgtcaatttgtcaactttttttgccagcaagacaaga

SEQ ID NO: 3045 - DNA, 3201 bp, Unknown
  16S sequences of unknown bacteria
tcgcgctgctcgcttgctcgattttttcgaccgctacgggtgctccgcctcgctgcatccgccactggcggcgctcggctccgcaccccctacccctcccctgatgcggggaaggggccgtctgggcaagtaactgcttgttttacccacagtctcggcagcgtgactttctgcgattggcttgcagaaaccaaattaaaaatcgaccttataagcgtcgtcgcgtcggacgcaaccttcgcttaagtcgggttgaccctgcgctttgctccgggcagccctccccgctgcggtgcatcctcctttccccacaaggtcttacgaccttgcgggggccccgattatacggggcgtaccgacgcgtcgggtctttagggcggagccctgaatgacttttggttacttttcttcatagaaaagtagcccctcgccgggtaggcgtacagattaaaaccatttataaagcttcgcgacgccgaaggcgactaaaaattttttgcctacttttcttcacagaaaagcccccaccatgcgggataggatttctccacacattcggcatcttttatagttaccggctcccggcaggccagggctgccaccgccgcggccatcgccagccggtggtcgccgcagggatcggccacgccgccccgcagtccgctcccggcgatccgcagcccatccggttcctcttccacccggccccccagcgcccgcagcagcccggccatcccggccagacgatcgctttccttgagccgcaggcgggccgcaccggtcaggcggctttcccctttggcaaaggccatcgccgccgccagcggcggcagcagatcgggacagccgctgacatcaatagttgtccccgttaatcggtggggataggccgttatcccttccggggaaagctcgatccgggcgcccatctgccgcagcagcgggagaatgacccggtcgggctgggtgctttcgggctccagaccagtcaccgttactggcccggccaggtagcctgccgccagccaaaaggccgcgtggctccaatctccgcccagggccaggcggccggggctttggtatttcatcccgccggggatgcgccaccccatgggggttttttcgagttcaaggccgaagcgccgcagcatttcctcggtcatcccggcatagccggccgattccagtgcccccgtcaaacggatctcactgggcccggtcaaaaggggcagcgccagcatcagtccggaaacatactgggagctgacattccccggcagggaaaaagcgccgggggtcagccgcccggcaagctcgatctcccaggggtgctgccgcacctcggcagtgatgccgttccgctgcaaagcggccaaaagggcctccaccgggcgctgggacagccggccccgcccggtaaatatggcccgcaggcccagggcagccgccaccggcagcaaaaagcgcagggtgctgccgctttcccggcagtccagccggaggggcgcggcgggaggccccgcaatcggggtgaccagcaggctgttttcccgctcggtaaagctggctcccatctgccgcaggcagtccatggtggccagcagatcgccggaagcgggcagccgcggcaaaagggtttccccctgggccatcgccgccagaataagggcccggtgcccttcggatttggaaagcggcaccgccgcccgccggggggccttccccgggcaaatcgtgatctccataggccgggctcctttcttttcctctgccgcggcagggattatgacataatttcatcttgccttcggcggcgcggagtcaccggaaggtgacagccagtacggctcgccgctggggcccaacttttcttcagagaaaagaagctttgatttaggggtgcaaaagcccccagattttgtgggcatcggcggccaggcgggcaaaatcctgcggaagcagggcttgctccccatcgctgagggcctgggcgggatttgtgtggacttccaccataagaccaccggcgccggcggctatagcggcccggcccagcgccgggatccagccggcggccccggaggcatgactgggatccaccagcagcggcaggtgggtaagaccctgcatcaccggaatggcggccagatccagggtggcgcgggtgccgctttggtagctgcggatgccccgttcacagagaatgacatggggatttccctcccgcaggatgtattcggccgaggcaagccattcttcgtaggtggcggccagcccgcgttttagcaggacgggtttgggctggcggcccagtgcctgcaaaagggtataattctgcatattgcgggcccccacctgcaaaatatcgatttcctcaaactggggcaaaagggcggcatcggtgatttcactgacggtggggagctgaaattcccggccggcttccgccaaaaggcgcaggccttcctcccccaggccggcaaaggcatagggggaggtgcggggcttataggtgccgccccgcaggatggtggccccggcggcctttaccgcagccgcggtggcaaacagctgctcccggctttccacagcacacggcccggcaatgagggtcagattctccccgccgatggcggcggaaccgacggggataacggtcccctccgggtgggcggtacgggcggccagcgggtaatctttcatcagggcttcttcatcgtaaaggtgacggttcattttgctctccttgcagttggcggttttcttctacaagattaccacccgcggggcatttaggcaagccatcaggaaatattcttttttcaaggtactgttgggaggcaggttcccgcttaaggcagacccccaaattgcccgatgaggtctgctgagaaattatagaccggcacccctgtttgaccggtggggcaaaaaggctctcgatttgttattcggggagaggggccgatgagaaagaattttttgccggtgagaaaaagtcctttcactaatccctgcaaatcgccccttttttgcatgtgagaggttaatatttcacttttttaatggaaaatttacagaattgggaatttatgggcgatgttcgcataaatagtgggttttactggggaagtaacactgggatttgttgcgcgattttggagggagagggggtcgcggcggttggggtgcgggctgccg

SEQ ID NO: 3046 - DNA, 4021 bp, Unknown
  16S sequences of unknown bacteria
cgctgccaatccctcagtcggcgttcgccgacagctccctttgcacaagggagccgtctttgcctttctgcatcgagcctgcccagcgcggcagcgcagtatggccgtcccggcacgggaccgcatagaatgaaggggcgggaagcacttccgtcccggaaaggagggaagacgatgaatacggagcaagcggggggcatgggaaaaaccgccctgagcctggcggcggccctggtgccctttgacggctggctgtggcggctgagcctgattcatctggggtgcatcgccctggatttgctcaccttcactttggcctgccggaaaaatggcgagaggggaaagggattggtgcgctccaggctatgggtcaagctgggcgggatcatcgccgcgatggccgctgccctggccgacagtatgctgcgcatgatccttctgcgtctgcccatggagctgccttttgaatataccaccctgctttgcccggtggtgatggtgtggtatatcctcaccgagctgggaagcatccttctggaggtggcgcgccttggcactgtggtgccgccttttctcacccgggccttcgccaatctggcctcccaggcatccgatataggggatcaggggtccgccagcgtgacgctggacccaagcggtgctcccgcacccagcgacagaacttaggacaaagccaaaaaaagcctcccgggtgggaggcttctttatttttcgatttcaatatggtggacaccatgggctaaaatcaaattgatcaactcattgcgggaataattggcttcggaggccaggcgatccaattcggccagagtgtcttcacggatgcgcaccgtaatgatgcggctgccgtcttctccccgtcgtttgattttcagtggttcattcatcaaaatgggacaccctcctgtcttgatatacattatagattgacagatgatgggtgaatatactatactttgatatgtaattgtattacaaatagatatcaaaacaggaggttcccatggaagaggaaaagagagaatggggaggaaatgcagtcagtgagccccagggagcaacaaaattctgcaagcattgtggccggtccattccagcggctgcggtggtatgtgtgcattgcggctgtcaggtggaagagatagcgcaaaaggagcagcctaatattgtgatcaacaatagcaatcaaaatatcaatagtaatgttaacagcaataggatcggcgacttgggcacgcgcgcccggaacaaatgggttgccttttttctttgtctgtttctggggtatctgggcgcccataagttttatgaaggcaaaacgggaacgggtatcctgtatctgttcaccgttgggttgttcggtatcggctggatcattgactgcatcattctgctgctgaaacccaccacttattatgtatgatccagcaaatcatggcaaagaaaaagcctcccgaatgggaggctttttgtccagtgcctggactcccaacctatgctcccgcacccggccaggactgcactctggcccctaccgggtgatggtttatcacacccggagaagcaaggcgtagcaacgcatccccaccggagacaggaacgggtccagcgtcacgctggcgacactccgcacatggtcaggctgatgcgttttttggcttcgtccaccttttccacccacacggtgaccacatcccccacctgaagcagctgggagggatgccgtacccgctggggcagcttgctgatatgcaccaggccgtcctggtgaaccccgatgtccacaaacaccccgaaatccaccacattgcgtaccgtgccttgcagctccatgcccggcttcagatccttcatctccatcacatcggtgcgcagcaggggcgggggcagctcctcccgagggtcccggcccggcttgcacagctcccggagaatgtcccgcagggtgggcacgcctgccccgatccgctgggccagctcttccagccccacggcctccgccttttccggcagatgttccaaagctcccttttccacatcagaaagggtgaagccgcattcctccaaaagtgcctgggccgcggcatagctttccggatgcacgcccgtgcggtccagcacctgcttactctcaggcacacggataaacccggcgcactgttcataggccttgggccccaggccacgcaccttgagtagctccttccggctctggaaggcgcccttttcctcccggtagtgaaccaggttcttggcggtggaggcagtaaggccgctgacccgctgcaatagggaaggggaggcggtgttggcgtccacgcccacggcacccacgcagtcctccaccaccccgtccagagcctggcccagccgggcctggggcatatcgtgctggtactggcccacgccgatggccttggggtcgatcttcaccagctcggccagagggtcctggagcctgcgggcgatggacaccgccgagcggaggtttacatcaaactgggggaattcctccgccgccagcggggaggcggaatacaccgaggcccccgcttcgctgaccaccatatagctgaccccgccgcccatgcgccggatcagctctgccgtcatccgttcggtttcccggctggcggtgccgttgccgatggcgatgcactccacctggtgccgggcgatcagctgggacagggtgcggatgcactcttccttctgccgctctccgtgggtggggtagaccaccgcagtgtccagcaccttgccggtggcatccaccaccgccaccttacagcccatgcggtagcccgggtctaagcccatggtcaccttgcctttcaccggcggctgcatcagcaggggccgcaggttgagggcaaaagtatggatggctccctcgctggcctcctgggtgagcagagtgcgcacctcccgttccagggaggggaaaatcagccggtcataggcatcttccgccgcccttttcacaaaggccatggccggagcgccggggcgcaccaccgcccggcacaaaggcaccagggcatttggccggtccagctggacgctgactttcagcatattctcccgctcgccccggttaatagccagcacctgatagccctggagccgccggagagggaaggtgaagtcataatacagccgatagacgctgtcctcctgggtggcggctgcggagtggagggagccttgccgcagcaccagttcccgcagggtcttgcggatggcggcgtcgtcggagagccactcggcaatgatgtcgttggccccctggagggcgtcctccaccgtctccacccctttctgggggtcgatgtaatcccgggcggcctcttccggggcagggccgttgcgcttttgcgcaaagagcagctgggccagcccttccaggcccttttcccgggccatggtggcccgagtgcgccgcttttgtttgtaggggcggtacaggtcctcggcttcggccagggtggcggcgttttcgatggcctgggaaagctcctcggtgagcttgccctggttttcgatggcggtgcggatctcttccttccgtccttccaggttccgcagatattggagccggtcacagagctgccgcagaagctggtcgtccatggagccgtggagctccttccggtagcgggcgatgaaggggatggtagccccgccctccagcagggtgatgacatttgccacctgctttgcatcccggccgatctcccgggccagggtgcttgtcagtttgtccatatccataaaaacagtctccttactttgcaaaaagggtatctgcttcattataccccatgggcgagccaaagaaaagaccagcgtgacgctggacccatactctccccggctgtatgggctgcgggcctcgatgctccggctccgccggaaggggctattgtgcaatcctggcagggtgagtgaattgtcaaactaagtgcaacaggagttaagctcgagttgccataattcc

SEQ ID NO: 3047 - DNA, 2935 bp, Unknown
  16S sequences of unknown bacteria
acgtcatggcctgccgcgacacggggtttgcgcagctttcgagcggcagcgtgcaggaagccgccgacctggcggccatcgcgcacctgtccgcggtcaagggctcggtgccgttcatgcacttcttcgacggcttccgcacgagccacgagctgtcgcgcatcgacatgcccgacctcgaggcgctggcaggcctcatggaccaagacgcgctcgcgcgcttccgtgcgcacgcgctcaaccccgagcatcccatgctgcgcgccaccgtgcaaaacgacgacgtgtacttccaggtacgcgaggcgaacaacaccgcctatgccgagctccccgacatcgtcgaggattacatggccaaggaaggcgccatcacgggccgcacctaccacgtgttcgactactacggcgcgcccgacgcgaccgacgtcgtcatcgccatgggcagcgtgtccggcaccgtgcaagaggcctgcgattacctgaacgcgcgtgcgcagagtaccggccgctcgtacggcttcatccaagtgcatctgtaccggcctttttccgcgaaatacttcctcgcggcgcttcccgaaagcgcgcggcgcgtcgccgtcctcgaccgctgcaaggtcatgggcggcgcgggcgagccgctgtaccaggacgtcgcgagcgtcatcgcggacagcccgcgcgcgaacgaggtgagcgtcatcggcggccgctacgggctcagctcgaaggacaccgacgtcgcccagatcgtggcggtcttcgagaacctcgcgtccgaggcgcccgtcaagagcttcaccatcggcatcgacgacgacgtgacgcacctgtcgcttcccgtgcacgagcttgccgacttcgacgacagcgacgtgtacagctgcaagttctggggcctgggcggtgacggcaccgtcggcgccaaccacaacaccatcaagatcttgagcgatcacgaggacctgttcgcgcaggcgtacttccagtacgacgcgaagaagtccttcggtgtcaccaagtcgcacctgcgcctgtctaaaaagccgatccgctcgacctactacgtcaaacatgccgacctcgtggcctgccacaaccaaagctacgtcttccagtacgacgtcgccgacgaggtaaagcccggcggggggttcttgctcaacaccgagtgggacgccaagggcctcgaagagcacctgcccaacaagatgaagcgtgtcctcgcgcagaagaaggcgcgcctgttcaccatcgacgcggtcaggattgccgccgagctgggactggggcagcgcgtcaacatggtgctgcagtcggcgttcttcaagatctcgggactcatggactacgacgaggccgtcgcggcgatgaaggaggccgtgcgcacgacctacggctccaaaggcgacgcggtcgtgaacatgaacctggctgccatcgaccgcggtggcgagggggtgcgcgaggtcgaggtgcccgcggcatgggcggagctttccgacgaacaacccgcaagccgtggggacgtgccttccgtcgtaacgaacatcctcgagccaatcaacgcgcagaagggcgacgagctgccggtcagcgcgttttccggatacgaagacggcgtcatcgacatgggccttaccgcctacgagaagcgcggcatctccgtcacgacgcccgagtgggatgcggatgcctgcatccagtgcaaccgctgctcgttcgtgtgcccgcatgcggccatccgcccgtacctagtgagcgaagaggagacggcagatgcccccgaaggcttcgtgagcgtgcccgccaagggtgcgaaaggcgcgcctgaagggacgcgctttgcgctgctggtgtccgaattcgactgcacgagctgcggcagctgcgctgacgtgtgcccgacagacgcgcttgcgatgacgccggccgtccacacggtcgcggcgaagcgcctgtgggattacggtctggggctttccgacaaaggggagctcttcgaccgctacagcgtgaagggctcgcagttcgcgcagccgctgctggagttctccgcggcgtgcgccggctgcggcgagacgccgtacgcgaagcttctcacgcagctcttcggcgagcgtgtgtactgggcaaacgcgacgggttgctcgcaggcgtggggaagcgccatgccgggtatcccctacacggtcaacagacgcggcttcggccccgcctggacgaacagcctgttcgagaacaacgccgagctgtgcctggggatggcgctttccgtcaagcagcagcgcgcggcgcagaagctgcgcgtcgccagactctccacgctgctcgacggcgatgaggcggtatcagcggtgctcgaggcctgtcgcgcatacctggatgcgttcgacgactacgatgcgtcgcgcgtcgcggccgatgcgctggtcgaggcactcgaggcagcgacgcttgccgacgatgcgcgtgagcttgccgagcaggtgctgcagtacaaggaccagctcgcgaagaagacgttttggatgttcggtggcgatggctgggcctatgacatcggctttggcgggctcgatcacgtcgtcgcgagcggagagaacgtgaacgccctcatcgtcgacacggaggtctactccaacacgggtgggcaaagctccaaggcaacgccggcgggcgccgtggcgcagttcgcctcgagcggcaagaagaccaacaagaaggacctgggcgcgattctcatgacctacggcaacgtctacgtcgcgcaggttgccatgggcgccaactacaaccagctggtcaaggcgatcaaggaggccgagagctacgacgggccgtcagtgatcatcgcgtacgcgccgtgtacgtcgcatgggctcaagtgcggcatgagcggggtccaaggcgagatgaagcgggctgccga

SEQ ID NO: 3048 - DNA, 9898 bp, Unknown
  16S sequences of unknown bacteria
atgcggtgatgaaggataaggagcaggtggcaattcgttttgccatgtgttttccggatgtctatgagatcggcatgtcgcatctcggcatccagatcctttatgacatgttcaaccgtcgtgatgacgtatggtgtgagcgtgtttactccccatggattgaccttgacagagtattaagagaaaagcatatcccgcttttcgcactcgaatcacaggatccgatcaaagattttgattttcttggcattacactccagtatgagatgtgttacacgaatatcctgcagattctggagctctccggcattccgctggatgccagtgagcgtggcgaggactgtccgattgtcattggcggcggtccgtgcgcatacaatccggagccgatcgcagaattttttgatctgttctacatcggagagggcgagacggtctatgatccgctgcttgatttgtataaggaatgtaagcagtccggcgcatcccgccaggaatttctgcgccgtgctgcgcatattccgggcatctatgtgccgtctctctattcggtgacatataaagaggacgggacgatcgcatcgtttaccccgatggaggaaggaatacctgagactgtagaaaagcaagtacagatggatgtgacgaacgcgccatacccggaagcaccggtcgttccttatattaaagtgacgcaggaccgtgttgtactggagattcagcgcggctgtatccgtggatgccgtttctgtcaggcagggatgctttatcgaccgacccgtgaaaagagcctggagattctgaagcagcatgcataccggatgctgaaaaataccggacatgaggagatttctttgagctcattaagctccagtgattattctgagctcgccggcatcgtcaatttcctgatcgatgaatttcaggatcagaatatcaatgtctgtcttccgtctctgcgcatcgacgccttttcgctggatgtcatgagcaaggtgcaggacgtaaaaaagagcagcctgacctttgcaccggaagccggttcccagcggatgcgcaatgtcatcaataagggactgacagaggaaattatcctggatggcgcgaatcaggcgttccacggtggctggaacaaagtaaagctgtactttatgctcggtcttccgctcgaggaggaagaggaccgcaaggcgatcgcacatctggctgagaaaattgcagagaactattacgatgagattccgaaggagcaacgggtcggcaaatgtcagattaccgtcagcacctctttctttgtaccaaagccgttcaccccgttccagtgggcacggatgtacacaccgggcgattatctcggctttgccaaaacggtcaaccacgagatcaaggatatgaaaaaccagaagagcattcgctacaactggcatcaggccgacgagacgctgcttgaaggcattttcgcacgtggcgatcgaaaggtggcaaaggcaatccgccttgcttatgagaatggcgcactctttgacgcatggacggagtactggaattatgaccgctgggtacaggcatttgcagatgcgggactcgatatggatttctacacactgcgggagcgtgacagggacgagatattcccgtgggatttcattcgcatcggtgtgacgaaaaaattcctgtggaaggaatgggagcgggcccatgcacgtgaggtgacgccaaactgcagacagaaatgcagcggatgcggagcggcacagtatggtggcggtgtctgcacggaatgcagagaataaggagcgaagaacgtgagagtacgagtaaaattttcaaaatatggagtcatgaagtttatcgggcatctggatgtcatgcgctattttcagaaggcgatgcgccgtgcagggattgatatcgcatacagcgaggggatgagtccgcacatgattatgtcctttgctcagccgctcggtgtcggtctgacaagtgacggcgagtatatggatgtcgagctgcgcataccgattgcatctgatgaagcgatccgacggctgaatgaagtcggcgtggagggaattacggtcacagaatggagacagatcccggaggagaagggcagcaaggcgatgacgctggtagctgcagcggactatgagctgcgtttccgcaaaggactggcaccaaagggagactggcagtctgcgatctctcatttttacgctcagaagtctattccggtcatcaagaaaacgaaaaaaggagagaaggagcttgacatccgcccgctgatctatgacatgtacgtcaatgcaggaacggtctatttccggctctctgccggaagcgaggcaaatattaagccggagcttgtcatggatgcgtatctggcatccattgacgtgacaccggagccatttgcctatgaaattcatcgcagggagctgtatgcggatctcgggaaaaacggaaagcgaaagctcgttccgctcggagagcttgggcaggacgttgcatcagaacaggtttaagatagtatataaaggaattttgacatatgagaaacgaaaaatcggctgatcgcatttatctggttacgcgcagagaaaatcaggtaatgtcctttctgatgcatggctccagagcgatcgagattcacagtgacagctatgaaaagaagtcgtcggatacggtcgctctgggcgatatttatatcggaagaattcagaacatcgtcaaaaatatcaatgccgcttttgtcgagctcacacctggaaatgtctgctatctgccattggaggatatcaggcagcccatttataccaaaaagggggcctctgcaaagccacaggcaggcgatgagctgctcgtgcaggtcctgcgggaagggatcaagacaaaagcacctgccgtcacgacaaatctgacactgcatgggaagtatatgctgctgacaacagggaaccgacagctgtccgcatccggtaaattatccgcagaagaaaagcagcgtttgaaagcgatcgtgtcagaacaggaaaaacagcttcgatcagagacagaagcgaccacaggcggcgatacatcatctgctggttttggctggctgatccgtaccaatgcgggcggaagggatgctgaactgatctggaaggatcagcagatactttaccgtcaatataccgagctgatggagcatgcgcagtaccgcacctgtggcacctgcctgctgcgccgtccgcagggttatctggcgcgcttatccgatttgtatgaggcagatgccgaccgaatcatgacggatgataccggactgtatcaggaactgacagcatatctcaggatatggcagccggaggatctggaccggctcgttttttatgaagatcacctgcttccgatggagaagctctatgcgctggaacgtcgtctgtcggaagcattacaggagcgtgtatggcttccgtgtggcggctatctcattatccagccgaccgaagcattgaccgtgattgatgtcaataccggtaaattcgagggcgggaaaaagaaagaagcagcaattttgaaggtaaacaaagaagcggcagtggaaattgcacatcagattcgtcttcgtaatttaagcggtattatactgatcgattttattaatatggaggattccgcatccaaccaggtgttgttatcattgctgaatacaaagctccgggaagatccgatcccgaccacgctgattgatatgacaaagctgcagctcgtggagatcacccggttgaaaaaagaaaagcccctttctgaaattccggacatccatcgcttttttggccggtcaaggtaattgtctgcttctattgtacagcgcaataagccgtggagcgaaggaaaaaaatcagagaatcttgtaaaaataagttgacgtatcccgatgcttgtgctattatctttaagtatgccgcacaaagaggtataaatgtcttaaaagactaccgaatttggcgagtaatgataaacaggaggtgccatatgtacgcaattattgcaacaggtggtaaacagtacaaagtagccgaaggcgatatcattaacgtagagaagcttggagtagaagctggcgagactgttacgtttgatcaggtgcttgcagtaagcaatgacggacttaaggttggcgcagacgttgcatccgcaactgttaccgctaccgtagtaaagaacgataagtccaaaaaggtcatcgtttacaagtacaagagaaaaaccggttaccacaagaaaaacggtcacagacagcagtacacacaggttaagatcgaaaagatcaacggttaattccgatgattaccttcacagtgtggaagtcaggacatcagtataaagggtttgagtgtgcgggacatgctggatatgcagaggagggatctgatatcatctgtgctgcagtttcagctcttgcggtgaacaccataaatgcgattgagcagtttacggaagatccgtttgaggtggaagaggctgaggatggtggattgctccggattcgtttttcggaagtgccggatgagaagactcagttgctgatggacagcctggttctcgggatcgggaatatcgaggctgaatatggaaatgaatatattaccttattacttgaggaggtgtaactatgttaaagatgaaccttcagcttttcgctcataaaaagggagttggttctactaagaacggcagagactccgagtccaagagacttggcgcgaaaagagcagacggccagtttgtaaaggctggaaacattctgtacagacagcgtggcacaaagattcatccgggtcttaacgttggccgcggcggtgatgatacactgttcgcaactgctgatggaattgtaagattcgagagaaaaggaagagacaagaaacaggtttctgttcttccggtagaagcagaataagagtgatgcaggcttcaaatcaggatgtggtttgaagcctgtttgtataattgggtatttgacttctattgttatagaggttatgaacaagcagcgaagcggattgcgaatatccgctggacagaagggattaattatgttcgcagacagagccaggatcatcatccgctccggaaaaggcggcgacggtcatgtcagcttccggcgggaactgtttgtgccggacggcggcccggacggcggcgacggcggtaaaggcggagatgtgatttttgaagtagataaaggattaaatacattaattgagtaccgtcacagaagaaaattttcggcgcaggacggcgaaccgggcggaaagcgtcgttgccatggtgcaaacggagaagatattgttctgagagtaccggagggtacggtgatcaaagaagccgaaagcggtcaggttatcgcagatatgtccggtgagaacagccgtcaggtcatactgcgcggcggccgcgggggcaatggaaatatgcattatgccacctcgacgatgcaggcgccaaaatatgcacagccagggcaggaagcacgtgagctggaagtatttctggagctgaaggttattgctgatgtcggactggtcggcttcccgaacgtcggaaagtctaccttgctttcccgtgtgacgaatgcgacaccgaaaattgcaaattaccacttcacgacactttcgccgaatctcggcgtagtcgatctggaaggcggcggtttcgtcatcgcagatattccggggctgatcgaaggcgcgtccgagggtgtcggactcggcctggaatttctccgccatatcgagcgcaccaaggtgattatccatatggtagacgccgcatcggtagaaggtcgggatccggtcgaagatatccgtaagatcaaccaggagctggcaagttatgatccggagctggcgaaacgtcctcaggttatcgcagccaataaaatggatgcactttatgcagaagatggagaggatccgatccggcgcctgagagatgcgttttcttcggatggtattgaagtatttccgatctcagccgtcagtgggcagggcctgaaggagcttctgtattatgtacagaagatgctgaacagccttccgaaagagacgacggtatttgaacaggaatatgatccggaagtgcatttaaaagtagaaaaccttccgtttacagtcgagaagtccgaagaagaggcagacaccttcattgtagaaggaccgcgcatcgaaaaaatgcttggctacacaaatcttgaatccgaaaagggatttcagttcttccagaactttctcaaagaaaacggtattctggaacagcttgaggcactcggcgtaaaagacggggatacgatccggatgtatggattacaatttgattactacaaatagtttcaggcaggcgcattgtgtagagacagacagctgcaaatttatttgcagatggctgtttatacacgatgtgaggtcgggaaattctatttcccgacctcagccgcagatcatttatgatctgcggcctgtctgaaacgtctgcatgagacagatgcaggcgactgaggcgtctgcatgaaacaaatgcaggcgactgaaacatctgcatgaaacagatgcaggcgactgaagcgtctgtatgagacaaatgcggagtccgcataatataaggagaaagcatgacaagtaaacagagagcctatctgaaagggctggcaatgaccatggacccgattttccagatcggaaaatcaagcctgactcctgaaaatacagctgccattgcagaggcacttgaggcgcgtgagctgatcaagatcagcgtgcttcagaactgcatggacgatccgaatgagcttgcacaggttgtggcagaacgcacccgttcacaggtcgtacaggtcatcgggaaaaagattgttctgtataaagagggaaaagaaggcaaaaagaaaattgaacttccaaaggctgcaaagaagcaggcataggtcagagaagtacgcatagtcggaggaatggcatgcaggaacaaacaagaagacgtgttggactgatgggtggtacatttgatccgattcatatcggtcatctgatgctggcagaatgtgcttatgagcagtttcagcttgagcaggtgctgtttcttcctgccggtaatcccccgcacaaggataagcgaaaggtcggtgcgactgacgctcagcgcattgatatggttcggcttgcaattgagggcaatcctcattttaagcttgatccggaagaaatgctccggaaaggctatacctacacaaaggatactttgaacctgctcacacagcagcatccggacatcgactattattttattatcggtgcagattccctgatggcgtttgatacctggtatcatccggaagaaatctgccgtgacagcattctgactgtagccgtccgggatcagatgagtctggaaaagattcaggcgaaaatgcacgaactggaagaacggtttcgggctagaattcaccttctgcagacaccggatgtcgacatcgcatccagtcatcttcggcagatgcgcagtcagaaacgttccatccggtattatgtaaccgatcccgtatggcagtacatcgaagagcatgcactgtatctgtaaatttgaggaaaaaagatgagtacctacaatctgataaaaatgcagaaaaagctgaaaaaatatattgatgaagctcgctatcagcatacactcggtgtaatgtatacagcagcggcgcttgccatgtgctatggcgctgatccggaacaggcacaggtcgccgggcttctgcatgactgcgcaaaatgcattccaaatgataaaaagctaaaactctgcaagcagcacaatatccagatctctgaagcggaggctgcagcgccgtatcttttgcacgcaccgctgggcgcttacattgcaaaagcaaagtatgacattgaggatccggaaattttgtctgcgatcacctggcatacgaccggtaagccggagatgacgctgctcgaaaagatcatttttatttctgattatatcgaaccgatgcggaacaaagcagagcatcttccacagatccgccagatggcctttcatgatctggatatggccgtatatatgaccttgcatgatacgattctttatctggaaaaagaaaaagcacgacttgataatcagagcgttgtggcttataattattataaaaatttaatcgaaaaaaaggaggcatagcacatggccgacaaacagtcaaaagagatggcaaagctcgcatacgatgcgcttgcggacaaaaaggcacaggatattaaaatcatcaatattgagggcgtttccgtgattgccgactattttatcattgcttccggaaccaaccacaatcaggtacaggcgatggctgacagcgtagatgaagcgctgcataaggcagggcatcaggcaaagcagaccgaaggctatcagtccgctaactggattctgttggattatggcgacatcatcgtacatgtatttgatacggagaaccgtcttttctacgatctggagcgtatctggagagatgggaaagagattcaggtagaagagctgtaagaaaaaatgtgctgccggcattgtccggcagtggaacaggagaaaaactatggcagttgataagacatttttgatgagaaacatccagaaaaaggaagatatgatcgttgcattttgcatgttaccaatatgccgtttgtaggtctgcgatccggagacttttaatgatcagatctggatctttgataccgaagagcagcttcaggcatttgcaaaaaaatactcggaaaaaaaggtccttttaaagggcattaagttccagaaccagcgtttcttaagcttcttctccatgctctttacgatcggcgtcaatgagctggtattcgtcagtgaatccggtactgatacaatcgagctggctgagcttgtgaagcgtccggacttttcacagcttccgaaagagcagcagccaatatccaatccggagctgcagctgacaggcctgtatttcatgcaggaggcttcccgcccggttccgaatgagcagaagaacctggtcgatctggaggaagagctcgctgcaaatctgtacaaggcgaaatacatggttccgattgaactgctggaaggaccggagccggatctggaaaagctcaaagagaagaaataccgtctcccgattctgaagaataagaacggtgatgtacttcagccgctgttcacggatccgaatgagtttgcaaagttcaaccgtgagaataagttcaaagcgctttctgtaccgtttgcgaaccttgccaagctcgtcatcaaagattctaagggctttcttctgaatccggccggcttccatatcgcaatgccgaaggagctgcttgagggccttccaaagcgttttggtgcagctgcaccggcatgggtcaacccgccggaagaggaaaagcctgctccgggaaaaacagaggataataaatagcttacataaattcattatgtaaacgtaatagcagaagagctctccaatcatagttttatggttggagagctcttctttttagatttcagatgatatgagtgcttcctgacaccgtgtcgggaagcaaaggtatgacatggctcgccgacgtactgcacatggtacgctggcgggccgtcttttatttgcaaaacagcgcttgtgttccttctttaagaaactgtgcatgttctttgcggtcacgggtaatatattccagcgtcacataaagcggggaaatccggtcgattagtttccggacgccgggcgcagtaaagggacggtgctgatcgatctgaaaaatgtgcaaaaatgcctgtgtagccagtgcttccgggtcatcctttggggtga

SEQ ID NO: 3049 - DNA, 4095 bp, Unknown
  16S sequences of unknown bacteria
gctggaaaacgtgatggacccggcgccggattccatggtgcgggtcgtccggaaggtcgatgacccgcggctgcggctgtgcttggatatcgggcacgccaactgcgcccggggcgaggtgacgctagaccaatggctcgaagcgtttcggccctacctgcgccatgtccatctgcacaacaacgatggcaagtgggatctgcacagccccctgggcgagggcacgatccctatggccaagacgctggactggctgaacgagaacgcccccgatgcgacgatgacgattgaaaatatgaactgcagcgattccatgcaatggctggagaaagaaggctatctatgatgacaatcacaaaaaccgtccccgaaatggagcgcgcgctggcccagtgcctggcgggcatcaaaccggcggacgaggccgttatggaggaggcccggcagcgccaggcgcagctggccaagccccccggttccctaggcaagctggaggatatctccatccgcctgtcggggatgacggggcgggtccataacaaaatggaccggtgccgcatcatcgtcctgtgcgcggacaatggtgtcgtggccgaaggcgtggcctgtgctccccagtcggtgaccctggcgcagacgctgaacctgacccggggcaagaccggggcttcgtgcctggccaagcactttggcgatgaggtcgtcgtcgtggacatgggtgtgaacgccgtcatccgggacccgaaggtcctggaccggaagatcgccatgggcacgcgggacctttacttagagcctgcgatgacgcgccagcaggcgctgcaggcgatcctggtgggcatcgagctggcggaccaggcggcggcggaccatgtcacagccgtcggcgtcggcgagatgggcattggcaatacgacgacatcgtccgccgttctgtgcgcgctgacgggcgcggcagtggcggatgtcaccgggcgcggcggcggtgtgaacgacgagggcttccgccggaaaaagcaggtcatcgccgcggcgctggaaaagcaccggcccaacgcggcggacccggtggatgtgctgcagaaggttggcggctttgacctgtgcgccatgtgcggcgtctttttgggctgcgcgaagaaccgggtgccggtggtcatcgatgggtttatctctgtcgtcgccgccctgtgcgcggcgcgtttgtgcggcgcggcgcgggattatttcttcgcgtcccacgaatcctatgagatcggctatcagcttgcagtgaaggagctggggctggagccgtggcttcttttgggcatgcgcctgggggagggcagcggctgcaccgtcgccttccgggtcatggacgcggcctgcgcggtcatcaacgagatggcgacctttgccgagggcgccattgacgacggctatctcgatgagatccgcgccaacgactccttcaccgtcgaccgggaggccccgtgaggtactttctctccggcggctcgaagagcgggaaatccatgctgggccagcgcctggcgcgggatatggccgccggtggcccgctgtattatattgcgacgatgatcccccgggacgaggaggaccaggcccgcatccgccgccatctgcaggagcgggcgggctggggctttacgaccgttgaatgcggcacatcgctcctgggtggcctgcagggctgcgacccggcggggagcttcctgctggactcggttacggcactgctgacgaatgtcatgtttccaagagacggcagcttctgcaaagacgccccggcgcagctggcgcgggacattgagacgctctgcgcccgctgccggaagctcgtcatcgtctcggacgatctttattccgatgctcggcgctttgacgcctggacgcagggctattgtgcgggcctgggtctgatctgccgccgggccgcggcggcctgcgatgtggccgtagaggtcacagcggattttccaatctgctggaaaggagcgctgtaatatgggttggatcacggccttttccatggcctttggcatgttctgtgccatcccgtttccggtaaggcgttgggatgagcggctgcgggcgcggatgctggtgtgtttcccctgggtcggcgcgatcatcggcgcgatctgggcgtttgcctgctggctgctgcggcgcatcggcttttccggcgtcttggcgggggcactgctgacggcgctgccgctgctgctgacagggtttatccacctggatgggtttatggattgctgcgacgccatctattcccgccgggaccttgagacgcggaaaaaaattttgaaggactcccactgtggggcctttgccgtcgtccatctggcactgtacctgctggtctttgccggggcgatgacagaggcgacggcggcaccgtggctgctggtgtttttgccggtggccccccggtgtatcacggctctggccgtggcgacggtggagccgatgcagacgagccagtatgccggaaaggaaaatctctatcacaagggccattacacggcgctgtttgtgacgctggctgctagcatgctgctgccggtggtgctgtttggtctgccgggcttcagtgtcgcggtggcgtcggcggtggcgcttttgaatgtgtgcttcggggtgaagcagttgggcggcatgtcgggggatatctccggctttgccatcacgcgtggcgaactgggcggcgttttggcgctggcggttctgatttggctgggaggtatactatgacgctggtttttggcggcgcttatatgggcaagcaggactatgccaaagcccatctcggtgcgggagagatcgagcagtgcgggagcgacctgccgtcgttccggacgggctgcgtggcggggctggagcggtttagcctggcctgcgctgagcagaagcgggatgccgctgcggcgctggaggcctgcgcggcccagtgggagaattgtattttgatcgtccgggatatttcctgcggcgtcgtccccattgacgcgacggagcgggcctggcgtgaagaaaatggtcggatgatgcggatgctggcgcagcatgcaaagcaggtcattcgaatttggtatggattgccgcaggtgctgaaatgaaacaattacttttactccgccacgggaggaccgtggccaacgaacagagaaaatactgcgggtggacggacagccccctatccgacgcagggcgggcagatctggcgacgcagaaggcccagtaccgctacccgagcctatccggttttgccgtttataccagcggcttttgccgcacggagcagacactgcaggctctttacggtgacgtggcgcataccgtcgaacctgggttccgggagataaactttggtatctttgaaaacagaacctatgaggagatgaaggatgaggccgagtaccaggcttggctcagcggcgataacgaggagaacatttgccctggcggagagagcagcgtgcagatgaaggcgcgggtactcgctgcgctggagcgggttttagagcgggatgagcgggtgtgcatcatctgtcatggcggggtaatcgcggcgatcatggcgcatctgttcccagatgagcccaaaaatcgctacacctggcagccaaaaaatgcctgcggatatctgattcagctggagccggcgctgcgctatgtccccgtgccgtttgccaaggccaattgggaggggaagcactacagcttctttcagaaccgggcgtgtgaatttttcccttgccatgaaggcatggcggcggaggaattcaactgtctattctgctactgtccgctctatgccctgggggaccaatgcggcggcaaattcacttatacagaaaacggcatcaaaaactgtacagactgtacgctgccccattgcaaaagcagctacggttatatcatgcgccggtttgacgacctggtgcagatgatgcgggagaaccacctgacgccgtctatcggcgacgggaaggccaattgcccgctgaataataaaaaataaaggctctatgtcaatagttggggtagagacaaaacgcaaataattgggttgtgccg

SEQ ID NO: 3050 - DNA, 1626 bp, Unknown
  16S sequences of unknown bacteria
cagcggccgatcgtcctgtgccgcaagcatcggcgcgatgcgttcttagagctgtcggaaaatcaggatatcggcctctttctgccatacagcccgctgcatgtcctgctggcacaggaatgttcggccatggtgatgaccagcgctaaccgcagcgatgccccggtgctcatcgataatgaagcggcgctgcaagcgctggatggcatcgcggacagctttctgctgcatgatcgccgcatcgccaaccgctgtgatgattcgctggtgcgctgcgtggacggcagagcttacttcctacgtcgcagccggggatatgtccctgcgccgctgatgatgcatgcggcgtgcagcggcatactggcgcttggcgcgcatgagaagggatcctttgccctgggcaagggacatcacgcgctgctgagcccttatatcggcaatatggaaaactgggagacgatgcagcattatcggcatacgctgcaaacctatgcacggctctttgatgtgcggccgaagctggcggtctgcgatctgcatccggattatgcctccacgcagctggcccgctcgctggatctgccgcttctgcaagtgcagcatcatcatgcgcatatggcttcctgcatggccgagcaccacctgcgcggcccggcattcggcatcatctgggatgggaccggactgggcgaggacggcacgctgtggggcgcggaatttctgcgcggaggatatcaggaggtcagacgggtcgggtcgatccgcccgatcttgctggcagggggagaacgcgccatccgcatcgctgccgcgctctgtcatgacgccggcatctcttcgccattgaaagggcacgaggagatcgaagcgttgctggcaaaggaacatctgtgtgtgcgcagcaccggcatgggacggctgttcgacggcgtatacgcgctgcttgcgcatgcggatcatcaggcttatgatgcccaggcgccgatgctgctggaaagcatggccgatccttcagagacgacggcctacccgctcgtcatcgaggaacgagacggcgtgcgggtctttgactggcgcacgatgatccgcgcgctgatgcaagatcaggaagcgaggatctcgcatgagcgcatcgcggccaggttcatgaatacgctgtgtgcgatggcgctggatcaatgccgagcgctcaaccctgagcatctccccgtcgtgctcagcggcggcagcttcctgaatctgtggctgctgcagaagatcagggatgcgctgcagcaggaagggtatgccgtatactggcatcagcacacctcctgcagcgatgaaggcatcgccctgggacagctggcgatcgccatggaaaggatgtgagaaacatgtgtctggccattccgctgaaagtcatcgagatcgatggaaaatatgcgcttggagaagccggcgggctgacacagcaattccggatcgattttctcccaaaggcaaggatcggtgatcatgtgatggtccacgccggctttggcatcgagatcatcgacgaacaagaggcagaaaagacgcaagcgctgtatgaggagatattccatgcggtttcagattgatccggacgttccggcgatgacgctg

SEQ ID NO: 3051 - DNA, 6097 bp, Unknown
  16S sequences of unknown bacteria
tgctgaaccgctcttccgatcttataaaaaagcgcgggcggaatcgcctttatctcctcttctctattcgccgctcggccaaacacgatgtttcttaaaccaatcggtgtctttgaaaatcgtgttatgattggaacagttcacgttcacttcgccgccgtctgaggtgacgacgatgttcccgttcatggactcgtagcctttttcgttatcggaaacaatggtcgtcacataaattttctccgtatatttggaaacacggtccacaaacgcctgcgacgggaacatattatccacgttttccgtgtattcgtcgctgccgcagcaacagcacacgcagacgatttcgggacggatcacggacaaaagcgcgtccgtattcgcggtatagctgccgtggtgtccgcccttgaacaacttgcatacgggcagagcgttatttttcactaacgccgcctctccgtccttttcgagatctcccgtaaagagataatgattttccccttgcgacaagagcatacagacggaataatcgttttcgtcgctcgttttttcctcgtaaaagacgttgtagaggatattcatagtgatcccctccgcaatctcgtaagaacgctgagcgccgttttcttctttccagcagtccaaggcggtataatgagcggcgcccgattccacttccgcatcccgttttgacacataattattgtaaacggacgaagtggcgttcgtcagcgcaaagtcaataatggtgcggcattcaaaggattcgaaaatcccgggcgcggctttcgtccccacgaatcccgcaatatggtcctgatgcgcgtgcgtggcaatgacgtattcgagcaccccgtccgtacagtattgctgtatgtagggcacgatcgtcgccgccgacccctgccttgatcccgcatcgatcaggatctccgtatctcccgatttgattaaggtacaatcgcccgtatacttgtttcccacttcgagaaaatgaatgcttagctcgtctgtgacaagatcggtcgcggaattttcccccgacgaatcgtgttcccggtttccgaagcgaataatatcgaaatcgtataaaagccatacggcagccagcagcaaagcgactaacaaagtaatcgcaagcccgccgccttttttctttttcttcgtattttttcttttttgtgccatttgtaacctcgttcaaatttttaatctgcgataaagataaaaacgtacggagcactaaatcttatacgcggataaatctctctcgacgactcccgtcaagccctcttccgtcccagcaaaagcgacggctccgacgtcctccccgtcgttgatttcctctatcgcgccgtaaatatcgttagacagccccacttcgtcgaaatgccgcaaagcgcgcatcagacgtttgaaatccgcccttacgacaatcgttttctccgcgacgaacgcacgaaacaccttcgcggcgttcttgttttcttccgtctgtccctccgacgtcttcgcttcggcggcgcgtatcgcttccccacgaaactctccgcagtcggaaaaagacgcgtactcctcccaattaccttccgagagcgcgtataaagtccatgttctcattttttatctccgcaaatcgaatttttatttcctataaaacgggcgcggcaaaaatgtttgaacgaccgcttttgttcccggttcttttttcgcatgatcgctcttttttaaccccggtcataccatacctcgcggcggcatacaagacaattttccgctttttttcgttcgtcgcagccctgccctcgtcgaattaaattctcgacgtttcaaaaaaagccgaaacacggtgagagcgcgtccgcatactccgaattgccctattttgtttcgattttgccgaaacgttcaacgcccgcgggacggatatttttatctccgtcccgtccgcttcccgtcggacaaaaaatcctttcaaaatacgcttttcttttatgcggtcgtgccccttccgttcggctttttcaaatgcgcgtctgaaattttacatggattcgtgaatggtacggaaaatcacgtcgtcctgctgttctttggtcagtttgttaaagttgaccgcataccctgaaacgcggatggtaagctgcggatatttttcgggatgcttctgcgcgtccagcaaagtttcgcgactgaacacgttgacattgagatgatgaccgccgtccgccacgtaggcgtcgagcatattgacaagattatctactttcgtggacataataattttctcctttcattctatgattttttgctttaaaattttcactcttttcggaagtttccttcccgcttgttcgatgcgaacgattttactcgtccttgccgagcgagccgggcgtgatcgaaaaggtattggaaatgccgtccctcgaatactcgtaagggagcttcgccactgattcaagggaagccagcgccccatgggtatccctgccgtgcatgggattggcgcccggcgcaagcggagttcccgcccttctgccgtcgggggtgttgcccgtcttctgcccgtaaacgacattggaagtgatggtgaggatagacgtcgtaggcacgctctcgcggtaggtgtactgactcttgatgtccgtcataaacgtctttaaaagccatacggcgatctcgtccactctgtcgtcgttattgccgtatttgggaaaatcgccctcgattctgaaatcggtgacgatcccttcctcgttgcggacgggatacactttcgcgtacttgatggcggacagcgaatcgaccgcgcaggaaagccccgcgatacccgttgcgaagaagcggcgcactttcgtgtcgtgcagcgccatttccagcgcctcatagcaatatttgtcatgcatatagtgaatgagattgagcgtattcacgtacagccccgccagccaagacatcatttggcggtatttcctgatcacctcgttatagtcgagcggaccatcgccgagcacgggcgcaaattcgggggaaacctgcatgggcttgcccgtctttttgtccttcattagctcgtccttgccgccgtttatggcgtacagaaggcacttggcgagattcgcgcgcgcgccgaaaaactgcatatctttccccacgcgcatagagctgacgcagcaggcgatgcagtaatcgtcccccatttcgggacgcatgagatcgtcgctctcgtactgaatggcggaggtgcggatggaaatttccgcgcagtattttttgaaattggcgggcagacgcttcgaccagagcaccgtgagattaggttcgggcgcgggaccgaggttgtccagcgtgtgcaggatacggaaagaggacctcgtcaccaaagttctgccgtccgcgcccataccgccgatcgactccgtgacccaggtgggatctcccgagaacagttcgttatattccttgatgcgcatgaatttgacgattctcagcttcatgacgaactgatccatcaattcctgcgcttccgcttcggtgaggacgccgtttttgagatcgcgttcgatataaatatcgaggaaggtgctgtttctgccgatagacatcgccgcgccgttctgatccttgactgcggcgagatagccaaaatagagggcctgtacggcttcctgcgcgttttttgcgggctgagaaatgtccctgccatagatcgccgccagcgttttcagggcttttaacgccttgatctgctcggagatttcctctctgtcgcgcactttgtcgggcgtcatgacgccgttcatagcgagcttatcctcttcctttttgcggatgagataatcgacgccgtaaagggcgacgcggcgataatcgcccacgatacgcccgcgcccgtaggtgtcgggaagtcccgtgaggatatgcgcgctgcgcgctgcgcgcatttcaggcgtgtaagcgtcgtaaacgccgtcgttgtgcgtcttgcggtacttggtgaagatcgctttcacctcgggatcgagcgtatatccgtacatattgagcgcttcctcggacatacggatgccgccgaagggctgcaacgcgcgcttgaaaggcttatcggtctgcaatccgacgatcttttcaagctccttgtcgagatagcccgcctcgtgcgaagtcagcgtagaaacgattttcgtatccgcgtccaataccccgcccgcctcgcgttctttttgggacagatcaagaacgatgttccaaagcttttgagtagcctccgttgcgggcgcgagaaaggaagcgtccccctcgtaaggcgtataattgcgctgaataaaatccctgacgtctacttcgtcgttattccattttccgggaacgaatccttcccatccttcgtactgcatagtatatctcctaaaattaaatgattttccgatttattccgattatgtgctttgttgaataaaagaatacgttttgccccgcacggcagcgacttcttttcatatcttcaattgagttaaattcctatctttttagctcttttgagaggacttatattcttggatctttgcgtctatccagatttcgaggatctcctcgggctgaaagcccgaacagcgggcaaagatctttccgtcgtccatcaaaaggacggtggggactctgcaaacgtcccattcctccatcaacgctgtggtatcataatccgcttccacgtgcaccagccgtatatcgccgcgcgcgtcggcaatcgattttaagatgggcatcagcgtcagacaattggcgcacgattccccgctcacctccacgcagcaaagtcctttcaggctttctttataattcttttttccgaaaatttcactcattttgttcctttttaaacctttcgcgtccacaacgtttcgcgccttttacgcagaacggagcgaacgtcgcttttccctttgcgcataacgcggcgattaacgtcctttctcctcacatttccgcttctcagacaacgaaaggaattctttttactctttgaggatgccgaggatcctttttgcgtttttcactcgttccgcagtcggcggctgcaccccttttaaaggatatgcatagccgagtttttcatacttgacttctcccatggtgtgatagggcaaaacctccactttttccaccgttttcaacgtgtcgataaacgccttcaatcttttcagagcctcgtcctcgtccgtcaaatccggcaccagaacgtgccttatccacatgggaacgccgttgtcgctgagaaagcgggcaaaggcaagggtatgttcgtttccttttcccgtcacctttttgtgaccttccgtatcgatatgcttaatatcgaggagtacgagatcggtataggcgagaagttttttatgctgttctacgcccgctgcgctgtcgcggtcgaaagtgtagcccgaagtgtccgctgccgtatggatcccgttttctttcagcatccgaaaaagctccgtcacaaactctatttgcagcagcggctcgccgcccgaaaccgtaacgccgcccgtatcgccgaaataatttctgtatttcagcgcttgatcgcatacctgctgcgcggaataagcctgtccgcccgccagccatgtatccggattgtggcagtattgacagcgcagaggacatccctgcatgaataccacgaaacgaatgcccggtccgtccaccgtcccgaacgattcaaacgaatggatacgcccctccataactcaccccttaacaataatagtctaaaaggacagcacacgcctcatcgtatgccgtcccccctctttcatcacgtctatattatagcaaaaaagaccaaatcttgtcaagtctttcttatcccgtgtgtcaaatgccctctttcccttgcggcaaaaggctttgaaggcaatttcttttccctttttcaaaaaaacaatttttatcgatttttttccccgcagtttcgttgccctctttcccttttgagaaaaggcattgagccttcttttacaaacgggcgcgaagaggcgggcgacgaaaaaaattatcgaataaaaaacggcgtgcggcggggtgccag

SEQ ID NO: 3052 - DNA, 32759 bp, Unknown
  16S sequences of unknown bacteria
ggcggataccggcctgtgccagcgccgtcttggcacccccgccgatcccgccgcagagcagcgtatccacgccatgctccttgagaaacccagccagtgcgccatggccgctttcgccggtttcctcgatccgggaagacaggacccgtccgtcctccacctggtagactttgaactgctgggtatgcccgaaatgctgaaagacctgaccgttttcatacgtcaccgcaatgttcatcccttgtcatctccctgttttatttggatccgatggttttggcagcgggaacacccgcagcccggcgtggggccggcgcatatttcataatctccgccgccgatggaaagctcgtccccctccaccaggcagtgggccagcttgacccgggcgcggttgtaaatggcctgcacagtggcccgggccacccccatacggcgggcgcatgcctcctgggtcaggcgttccaaatcgatcagacggatcgcctcatactcgtccaccgtcatatggatcagatgttttccacgggcggggacatccatggcgccgaaccgtataaatcctggaagggcgcagatccggcggcgtttgcagggcctgggcatgcgtttcacctctttccggcgtatgccaataaccaaatcctattatatactgttattggcatatgtcaagaatggaatggtactttccagcggatcctctggacaaaggggggaaaatgtggtatactctctttcagaatgaaatacgggtgccagagtggagagctgcaccaacccatccgttttgaacgggtgggtttggtgcggcttttttgcgttttgcagaggcacgtgcgagaaaaaacggaggcgggatggtatgcaggcatatgatgtggcgatcgtcggcggagggatcaccggctgcgccctggcgttcgagctcggccgctatcgggtgaagacggcgctgctcgagcggagcaacgacgtggccgcgggcgcgaccagggccaacagtgggatcgtccacgcgggatatgatcccgagcccggcaccctgatggcgcgctgcaatgtggagggcaatgctcttatccgggaactggcgcccgctctcggggtatcctaccggaacaacggatcgttggtggtagccctgtcggaggaggatcggccccggctgaaaaacctgtttgacagggggattcaaaacggggtacccggtctcgagctgctgtcgggtgaggaagcgcgccgacgggaaccgcagcttgcagcagaggtcgtcggtgctctatacgcccccacggccgggatcatcagcccgtgggagttcgccctggcccttgccgaaacggctgtgcagaacggctgtgcgttcctgcccgaatacgaggtggtttccatccggaaagacggggagggattccgcctggcaaccgcgggaggacgggaaatccggagccgctttgtggtcaacgcggcaggaacccacggggatcgggtcaatgatttggtggcaccgcatacctttgatatccggccttccaaaggccagtattatctgctggataaggctcaggggaatctggtaggcgccaccgtcttccagtgcccgtccaaggacggcaagggggtgttggtggcgcctacggttcacggcaacctgatcgtcggccccgacgctgtgagccaggaggaccccgacgacaccgccgtgacagcgtcggggcttgccttcgtggcggcacaggcccggcggtcggtccccggtttcgtgctgcgggattcgatccgcaatttcgcgggggtgcgggccgtcggcgctcgcgcggatggcagggacgattttatcgccggagaggcacccggcgtacccggctttttcaatctgtgcggcatcaagtctcccgggctgaccagcgccccggccctggcgagggtgggggtggagatgctcggaaaggcggggctgccgctggagccgcgggaggagttccgcctatgtccccggccccggccgttccggacggccaccgacggggaacgcgccgccatggcggcggaaaatccgctgtacgggcgggtggtttgccggtgtgaaaccgtgaccgaaggagaagtggtggccgccgctcacgagccgatcccggccgtgtcggtcgacggggtcaagcgtcggtgcaacgcgggaatgggccggtgccagggcggtttctgcggccctcgggtaaccgcgatcctcgcgcgggagatgggcatcccgatggcggaggtgccgcaggacggcccgggtacgcagatgctcacgggccgcttgtgaacgggcaccggaaatagggaaaagggtggatgagacaatgaatgaacagcatataccgctgctggtagtgggcggcgggccggccgggctcgccgcggccgtggccgcgaaggaggcgggctgtccccgtgtcgtggtgctcgaacgggacaccgaaccgggcgggatcctcaaccagtgtatccacaatggctttggcctccactatttcaaggaggagctcaccgggccggaatatgccgcccggttcgtccgaatggcggaagaggccggggtggaaatcgagaccgataccatggttctcgacatcacgcgcgaccgggtggtgcgggcggtcagcccgtcggagggataccgggaataccgggcggatgccgtggtgctcgccatgggctgccgggaacggacgagaggggcgatcggcatccccggcacccgtcccgcgggggtttttaccgccggctgtgcccagcggtatctgaacatcgaggggcagatggtcggcaggcgggtggtgatcctgggatcgggggacatcggtctgatcatggcaaggcggatggtgctctccggggccgaggtactcgcctgcgtcgagctgcagccctattcggggggcttgcagcgcaacatcacccaatgccttgaggatttcggcatcccgctttacctctcgcataccgtcaccgaaatccggggccgcaggcgggtggaacaggtggtggtgtcggcggtggatgaaaaacgccggccggttccgggaagcgagatggtgttcgactgcgacacgcttctgctgtcggtgggactgatccccgaaaacgaactgtccaggggggccggaatcccgctggatccgcgcacgaacgggccgctcgtcgatgagtcgatgcagaccggcttgccgggggtgtttgcctgcggcaatgcggtgcatgtgcatgacctggtggatttcgtcaccctcgaaagccagaaagcgggccgcgccgccgcggcctacgccatggggacgggttcctccgccgcgcgggcaccgctcgaggtgtgcgcgggggccggcgtgacttataccgtcccgcagcgtatcctcccggaaaagctgcagaagacggcggaggtttttttccgggtcggcggcatttatgaaaacgcggagatcgtcgtttcggatggggaaagggatctgctgcgccgaaagcgggagcatctggcgccgggggaaatggagcgcctcgcgataccggcggcgttgctgcgcgaggcggccgggccgctgacggtggcgttggacttgggggaggtgtcatcatgaagaagctcgtctgcatcgtctgtccacggggctgccgcctgacggtggaggaaggggaggagatccgggtatccggaaatgcctgtccccggggggagacgtacgcccggcaggaactgttcgcgccggtgcgggtgctcaccgctacggtggcactggagggaggcgttcatccccggctgccggtcaaaaccagcggggccatccctagagaacgggtgtctgaggccgccgccctgctgcgggagctgcgggtgacggcccctgtgaaggccgggcaggtgcttctgcccaatatactggacaccggggtggacgtcatcgccacccggaatgggtgaggcgatatcacaccgggcgggagctccgtcccgtccggttttcggcctattagacgagggagacaacggcagatccggattgccaggtcttaagcagcgccgatgagaaagaggaaaagccagggcaaaagcattgcttttgccctggcttttttgggctgatgaaccgaacgacggcgcaggagggaaatccatttatgtcgggccggccaacgacgcgacagcaaacaagtgaaaaacggactcgttcatttataagggaaaccgctccccaaaacgaataacagagcaagtgccttaatcgggtgcgtttttgccgcggtatatggcccaattccgccgcagaacctcccggccccgccagccataggctttcccgtccgggttttccaggtcggtccgcccagccagcgggcgatattcggaaaaacagggatgcgggtcgcatatcgcgtccgcgttgaggggacaggcctcctggcaggtgtcgcatccccaaagcaggccgttatcccggatgagacgttcttcatccggggtcagcccgccttttttttgggtgagggaggacaggcaacggtttttgtccggcgaggtgccggagaggcagtgcccgggacaggccgccgcgcaggcaccgcaatgcgggcaggcggagagggatcccgccgggacgggccagggcgcgtttgtgacgatcgacccgataaacacgtacgaaccataccggggatggatcagaagtccatggtcaccgatgcggccgagcccggagagagaggccgcccgtacctcggggatgggcgaattgtcgataaagggttcaaaaacaaaggcgggataacaccgggccagctggccggccgcgcggcgcaggacatcgccggccacccgatgataatcggggacacaggcgtaaagggagaggttgcggggcccgccgtcgtccgggaagcggtagggaaacagcgcgatgatgacagtacaggccgcggccgggatccgggaagcggcccggcaggacaacagatacggccgtatctcctcaaaacgacagaagccgtgcagcggaagcccggcctcgtccaaaacaggggaaacctccggtatgcggttcgccatggcggccctcctttcccggcccggtgggtcttgtatcccattatatgctggaaacgactgaaaaagcaaggggattcgcccctcgctggcgggctgccaacgaaaccgaccgctcatgtctctctatgaggatgcggacgctgggaaaaacaaagcactgccgtgcaaacggcagtgcttgtatacgggttacagatcgtccgcgtcctgctcgggaatctcgccggattcggcggtgccggtatagctgccgagcacatcggaaaggatgtcgccgcgcccttgttcccgcagggtgaccgcgtcttccatagccgcccgctgggcggtgggaccgggttttctctttttcttgtccatgcccgctcctcaatagtcctcgatgtggagctggaaataggactgcggatgcttgcagaccgggcagagggcggggggcgtttcgccggtatagaggtggccgcagttcaggcagatccagacggtgccggcgccccgtttgaagaccttgccggtttctatattctcgcgaagcttgaggtagcgctgctcgtggaagctctcaatcttcgcgacgagctcaaaagccgtggcgatggcggtaaagccttcctcccgggctaccttggcgaaatccgcatacatctgggtccactcataatgctcgcccgctgcggcgtccgccagattgtcaactgtgctgggtatgctgccgccgtgcaattgcttgaaccagagctccgcgtgctccttctcattcgcggccgtttcctcaaagatccgcgcgatctgcatgtagccatccttttttgcttgggaggcataataggtgtacttgttgcgcgcctggctctctcctgcgaaggcagccatgagattcgcctcggtgcggcttcctttaaattccatgtgcagtcatcctttctttggtgttgaacgggtgtgttccggcaatagtattgacaggaggcgatggtttactcaccttccccgcaaacttcatccaaaaatttcttttccccttttccataaaaacaggggcccgccgtcgtatcattggcgaaaagcttttcacataaggaggcgtcgacttggaaaatggattgtttgatcaagcgatagcccgtgtggcagccggtgacgtaggcggccttgaggagatctatcgcgcgtatgcctccagcgtatatgcggtttgtctctcggtgacgggacaacgtgccgacgcggaggatgcggcggtggaaaccttccttcgtgtttggggcaaggctggcacctatcgccgcggcagcgggcatcgggcatggctgatgaccatcgctcatcacaccgccgccgagatgatgcggcggcagagccgggcccaccccacagaggatgctgttctggagacggttccgtctccagcccgtctggaggaggaagcctgcagcaggctgcttctggagggctcgctgcaaaaactcagtgagccggagcggcaggtggtgtccctgcacctgatcgcagaccttcccctccgggaggtggcccgcattctggatgaaccgcttggtaccgttgcctggagaaaccgccaggccatgggaaagctgcgccggatgatgatggaaagggaggaatggaccaatgaaacgacaatctgactgcgatattcaaaacaggctcaaagaagcggccggacaggaaaccccgcctctgtggggccggatagaggccggccttcgggatacccgctattccttcgaggcggcagaagaacccgccacccgaaaaacatggtggcgccggccggccgtggcggtcgccgcgtcgttgttcctggtgttggcggccggcctgacgctgctgtatccggttcttatgccgccggcttcctccactctggaggagagggtggagctgtcgttcaaagcgcgggccgatatcctcggggcgcctgattacgggctggagggcaaccgctcggagagcctccgcctgatcgagtcctacacggagtttcagaaggtgctggcacgcatcgggctgcaaaccgccggggaaacccgggtgtcgacagaggttccctatccacgggaaatagaagcggagctgccctacaacgagacgtattttgaaaagcatgtgctgctgatgctcctttatccgtgggaaaccggttatgcggcggaggatgtgacaggggtgagcagaaccggcacggtcttgacggtgaacctgtcccaggccgccccgagggaggatgcctatgccgggttgcgtcaggcgctgtttgtggaagtggagaaaacggatgtcgaggactgtgaccgctttgtcttcgaagtccgggcgtcggagcattccgaggctgaaacgctgcagaccatgagataccgggtggaggcggtcgcggtcaataccgaaaacgccgcagccaaccggatcctgaccgatacgaagggcatcgccgatttgaagagccgcctccccgacgctgcggcgagagagaggctggaccggtacgacgagagctattttcaagatcatgaccttgtcacactgtatctgcggcagccatattctgatcgtatatgggatatcgccggtgtcacgtcactcaaaaacgattccggcagtgcgctcgatatcgtactcacaaaaaagaatgccgatccgggcggggctaacggacggatttactatctggagctgcccaaaggcatcgtttccgccgatacgattctctatctgtatgacgcgttccagggatcggtgaacattctggcggatctcgacgaagacagcctgaccgccctggagctggtgcagggggaagaacggacggtactgaagatcaatggggacatgtttatggatttctggaccgaacccgtgatgtacggcgatatcatgctgcgggcggtcgatttcgacagtgacggcgtcaaggaaatgatgatcgaaacgggatgggtgttgccgaaagggatgcggccctatgtgctcaagcgtgccgacggcagctggatcgagatcgcggctgacctgttcagcaacccgaacctgagcagttggttcttacccggccgccggctggtgtcccaccggctgccgagcggcaaggagcatgtcctggatatcgccgggcatgacgactggttttacgagaatggggagctcgccgtgaagataacctgtgaaagcggagcgtatgagaagcaacccgcaattgtgacgctcccggacgggcaggtggggttatggctgcggcagttcatttacgcggtggacggacagggaatccggtataagctggccgtgtttgagaccatactcacgatgaaggcggacggttgggaaatttatagtgaagaattgaaaccgatttaggactagaggaggggcggagatgaggcggatgaagatgcgggtcgcggcggccatggtgacaggctgcctgatatggaccggttgtgtgtctacacccgatgcggccgaggtgctggagtatcgggagtccgccgcgacacatgaggagccgacggcgtcgccggaaacgacagcggaggcgtccggtgaggttccgccgcaaacgagcgcgccgtccgagacctcgatccggtccacagagtccgggaagctgtcgagtacgccgcctccccatacttctagtaagacggtgctgatgctggatgtcccctatttgagtcagaaggggattttgcccaacggatgtgaggcggtcagcgcggtgatgctgctgcatcatctgggcgattccattgccccgctcgatttcgtcgaccggtatctggactgcgagccgacctggaaagacggcgatacccgatccggtcccgatccggccaaagcctatgcggggactcccaaaaccaacgggggcgggttcggctgtttttttcctgtgatcgtccgggcactgaatcgggcgttggaggaatatgcgccggctcaataccaggcggcaagcctcgctggccttcccttgagggagctggaaacgtatatcgaccggggaatcccggtggcggtttgggcgacgatcggaatggtggaggtcccgttttattacgaatggatctcaccggaggacggcaaaacgtaccgttaccccgccagagagcactgcctggtgctggtgggatacgatgacgaccggtattattttaacgacccttataattccaacggcctggtcagctaccacaaaaccacggttgagaagcgctatgagactttagggcggcaggcggtggccatcctgccgcgcacctcatccacctccccgacggacgatctggcgcattcgcagagctggaccctggcatgagtgggatttggccgccctcttccgacgacgggtcaggcaaaaacgccgattaaagggcctatcaaatcaaaacaggcggacgccgatggcgcccgcctcagcgcgtcggtaaaatcgatgcgctgctggacagagggcatcggatcgcggcgcttcacgagttcggcttgctcccgtgtttcgcctctgcaaagcaaggttgccccggccccatccctatcttgtaaaatagctctaatgccggcatttgagccgttctgttgtctatacggcatacatccgaggaacatgtcctcagatgtatgatcggtcgaataccgcgtggcttccatgcataattctaacgctccatcgccatttgatagtttgaggcggaggcacttttgtgcctccgcctatcttctgcccggccagctattcaaagccggcgaggcacaaagcctgcccattgtcctgtccgttgaaacaggcgggcagccaaaaccggtgagggcggcccctatccggccgttaggacgaaggaactgcaaattccatatagtattctgcctcgccggtatcaggggcggttctacagaaggaggggataaacccttcccgtaggtagaaacgcatggccctggtgtttttttcatagacatacaaggcgagatggggatgccgcgcctttacataatccaggagggctttgccgataccgcacgaccgccggccttctgcgacaaacagcccttccacttcatcgcccgacaggccgatgaaacccacgacggccccctccagctcgtatacgtacacgtcggcattgggcagggccttatgcaccagttcccggcgatcctgccaataggagggcgatatgaacgaatgtgccgtcgtgttggaatccagccagatttgcaggaccggttggagatctccggcccggaacgggcgtatcatcagctcacgtccttccgctgtgccgcctatggctttatgacggccaaaaggtctgggatcccgggattgtactggtcacaaacccataaaatgaacccaagccctggggcggcagtccctttatgtatgggcgttggttcaaaagattccgtacccgccggctttccaaaaaagaactccggcctcgcccctgaaggctctctatactggcgggaactggggccggtcacccgctattgtggtatcccacaatggccctaaaaatcaaaattacccagggggcccccaggggggctccccctggcgcttcttttccccctttctttgtgtaaagaaagggggtggcccgcaggctaggcccgtttttgcagggcgtgttggagtttgtccgcgcatataaaacgctgtcctaatgaaaagggatatccaatgcgcggccacgtcctttctccgcgtggagaaaggacgcaaagagacgccgggggcttcgcccctggtcccccagattgctggccgattttctttttatgaaaatcggcgggtacggcgtctgctgaaccgacgttcatacaacaagggggcccgaggcccccgggagtttgggtggtcatcattttatggaattttatcctctgtgagaacccaccatcccattggaagaggcaacggggaaacaggtgaaaggaagacacctttccatccttcgacgaagacataaaggggcggggttacattcccgctattgcaggaggcgcccgtcagccggcgggagcggctgacggaatccgccccaccgcctcggccaccggctcccgcatccacagccccggcgtgattcgcagggtgaagccgcagcccgccggcgtcccccactcggacaaatccgcccgaggcagcgcgtaagccgccatgagcagcatgatcaccccgccgtgagtacagacaaccgcctcggtttcccccgaacgcatcaaccccgtcacgatttcctcaaacgccgccgttacccgctgctggaaatgagcggcgtcctccccgtccgggatggactgccgtttcccggctacccagtcccgaaaatgaggatcatcctgcagctccgccgcgcttcgtccatcccagtcaccaaaatcgcattccgccaaaccgtcggcaacctccggccggcatccgggatagagcacctccagtgtctgacggcaacgggttaacgggctggtaaaaaaacgtgccgcgcccggataaccgccctttttcttctgttcaagcagtgccgcgagaccggagggagacagcggcagatcggtcaggcccagataccagcccctctcattcgcctccgtcaggccgtggcgcaaaaggtgaattttgtagcttttcatcaaaattttcctccaaatctcctattttgacgatttacaaagggtaacattctgcggtataatcatgtacatgtggtataattcttttgtttcgggaggtgtcgtcttccggggcaagggttttgttgcctttcgcgcggtgtgtccggtatatggacgccgtttttcagataaacccgcacacaaagccgacagaaacgtccgcccgggacggcatggagggatttcatgaacagcgcatttccacggatactcaccctgctcaggaaagagcgcggcatcagccagaaggaggccgcctcctctctgctcgtttcccaggccctgctgtcccattatgagaaggggatacgggaatgcggactggattttgtcgtccgggccgcggatttctacggggtttcctgtgattacctgctcgggcgcacggcggacaaatcgggcgccatgatcgccgtggacgagattccggaaaacgatcccgccgccaaggacaaccatttccgcggcagcgtactgcctgtcctcaataaaaagctgatcgtcaattcgatccatgtgatattcgatctgttgcagcgctgcaaccacaaggggctgaccaatgaggcttccgcctatctcaccctggcggtttactcggttttccgtcagctgtataccgctaaccccaaaagtcccgccgccctgttctctgttcccggatatttgttccagccggcggtgacgggcgagctcgcgcgtaccgccgcggcaatcggggagctggcctccgggcgggacgcggcgggggacaaggggatggatccatccaaggcccctcttctggttcccgacgacatcacgcgggactatcctctctttgcctcgtccctgttcaacctcctccgcaacgcggagacccggctgcaataatctcaacggctctgaaaaaggtgccgccgaatgcacagcgatgtcccgagggactgcctctgtgcgcattcggcggcacctttctgtcaggacggggattgtgtatttgagccggaaggggccttcccggcctccggagagcgggcggcggattcctccgccgctttagcgtcgacgtcccccgttccatccggaaggggacgcaccggccggggatggctttccctccacttttcatactgtttcttgaaaggccagtttttgggtgggtgacagccaaagctgcacaccaccaaaacagccgcgcacaggcagaatgcagcgccggcatacgggctgtcaaggagaaaacggactccgatgccctcggccctatagaagcacaggaacagcgacaacaccagaaccgccaccgcgtatacccgcatcgccaccacgtcgaacgtgcggccgtgtctggcactgaacgccatcaccggcagcatgaacaacagcccggtgttgagcaggatctgaaggtaggcattggcatacatccagaattccgaagccggtatctccatcccctccagccccgcccccgtcagaacgatcagaaggatcgagagtacgataagcaggataggtatcaggatatagagcgtccgcatcccaatacgcacgacgcggcttcggtccagataccgcccggccaccagggacaagacggacgaaaccacggcggccgtgatccaaaccggcggctggatggcggtcacgacatacaagacaatcgccagaaccggcatcaggacagcaaatgccagcatggttacacgaaaaaacggatcttcctccacatggtgacgctcaggcatgcgattggacctcccaaatcaaccagaatagaaccattataaacgcaatttcataaaaagacaaccgatataatggtttcttcaaaaattagatggctccgggagatatcccccaccaaacagctcaccgctccggtccgcatatgggagcaagcagctctttctctatgcggcccatctcctccaaagcggaggcggcttcccgggcaagcgtctcccggccggtgaggcggagcttgattccgagattcagcgccgtttcggctgcggctaccaccggccggtagcgggcgggatctatcccggcgccacttgcctccagatgggtcaggccttcgtatgtcaggttcgcatgctcccggatgacgcgaagcggcctcaaatcgaacgggccctccgaccgttcccgcagcgccgcggctatcacgccgaggcattcgatgccgtagatattccgtgtctctcccttgttggccgcactgatataatccgacaaaacggcgcgatatgtcccgggctggaaacggcaggccgggttcggctggtaataacagaaaagagcccctataaaccgctgtttgagccggtagacgctttccacatagtcggtatacgagacggcaaacggctcgtaaagccgattgcgggtatagccgatcgacaaaaaacaacccttctcgtcgtcataaccgtacagcaggttgttgtggacaaaatgccgcttttgataacccagtttcgccgggacatagaattcgtcgaatgtgcccatctgataatacccgtggtccagcatctcgcggatcagtgccaccaggtcaaaggttcggtatccgcgcaccatcgcgggcgggacattgacgagaaactttgtgggcaggagctgttctgtctcaaaacgccaatcgctgtatatgtaagggtttagcaggccgtcacgggtgtcccacatgaggttggtgtactgcatcgtcagccaggggcgggcggccggctcgttcccgaggatcatgctcagccagaacgcatggtgctgataggattggacgggcggattttgttccagcggcagcgcataaggatgtgacaagaggcaacatctcccgatatcaatttgcagggcaggggccgttccgcgggctcacggcagcgccaccggctccagacaggcctgttcctcctcatccagccgccgcagcagcccggccagccggtccaacacctctggacgccgtgagacgttgtatttgaggccgagcatcatggccgaagagctctggtcgaccagtgcggcatagcgggccaaatcggccgggatcccggcctgctccagaaggcccaggccccggaaggtcatctggaaatgctcccgcaggcagcggtaccgccgtatatccagaacccggtccccggccgtcttcataccctcggcctccaaggccaacgaagcgaggcaggcgatcccgaactggttgtcacttccgtccatattccgggacgtgagatagtcgtgcaggatccgcctgtaccgttccggttcaaactggcagacgggattcggggcatacgccgtgaaaagcagacccagcagctttttctgagcgttcgccatactcgacacgaagtcgggataggcgacacggaacggcttataatgctcgccttccagatatccaatcgaaaggaaacatccctctccgtcatcgtagccgtaaatcagattgttatggataaaatggcctttttgataccggctcttgcccggtatgtaatactcatcaaaagaaccgagctgatacaacccctgatccagcatatctttcacaatcgccacaatgtcgaacgatggccgcgaaaagagggagggagacacgttgaagaaatgctccatcggcagaatctcttctgtcccaaaccgccatttgctgtatatatacgggctgaggacctggttgtctttcttccatatcaggttggtatattgcatggtcagccagggaagcagctgtggatcgttccccagcaggatgctcagccagaatgcatgatcctggtaggattggataggcgaattttgttccagcggcagctccacaactttacgagacaaaatgctcctccttttgtcctccgacgcagatttagatttattatagcatatactgaccgattcacaatatactttatgtgataaatagggatcagacgttcaagtgatataccgtctgaccggttcgaagcggacaaggcggcgtggtcatttttcgggtacgcaaaaggccgcctttaaaggcggcctttcttatgttgcagatccggatattcgatcacggcatcggcggtcattcccactgaatcgtgggctcggagccgtcctcgagcgcctcgtcgatgaggcggagcatctccaatgtactgcggaacgactgttgtttctgggattcgacccattgtatggtcccctgccaggtggcattgcggcggaactggacatggatgatgaaggtcgctttgtttttttcgctcatgtttccacacctttttccctttttgacgggtgagggtcgttttttatcgtaaaagcaacgataattgtcaaaacggcaggggaacgacagggtgtcgaaaagttcctccaggacaccgagcagttcccgatcgttgcgaaagggaatggatttgtcatagtatccgttatatacctcaccgcaagggatacggtcttcaaatgaggagacatgaaccgttaccaaggtcgacatggccgtcaccaacggcttggcagaaaccaccacggcagtccgtccccccttcaaacttcttccattataaaagtatccggtcacaggacggtcacatgaaggatgataggaggatttattgacgggccatgaccaaagctgtcaaaccggcagctttttggccagcgtgtccggacttgcgctgtaggccagggcattttcccgggatatgacccctgaagccgccagacgcaggagatccgcgtccatggcctgcattccctgggccccgccggcatacagcacgttgtcgatctgatagattttcgattcccggatcatggtgcggatggccggggtggcgaccatgatttcaaacgcggggacgaggtggccgtccaaggtggggatgagctgctgggagacgacggcctgcaagaccatggacaactgtacccggatctgctgctgctggttcggcgggaaaacgtcgatgatccggtcgatcgtcttagcggcaccgaccgtgtgcagggtggacaggacgagctgcccggtctccgccgccgtaatgacggtccggatggtctcgaaatcccgcatttcaccgaggaggatgacatccggggcctgacgcagcgcggcacgcagagccggctcatacccctcggtatcgtgggagatttcccgctggctgacgatgcagcggtcatgggtatggaggaattcgatcggatcctccagcgtgatgacatgcccctcgcgcgtgtgattgatccggtcgatcatacaggcgagggtggtggatttaccgctgccggccgccccggtgatcagaatgagccctttttgccgaccgcagagatccaggaccgcgggagggatgtggagcgcgtccgcgtccggcagggaaaaggagacgatccgcaggacggcggacaaggaactccgctgcttatacgcgctgcagcggaagcggccgagaccactgaccgaaaaggagaaatcgtcgtctccggaatttaagagcgcgtccaggctcctctggcggtccaattcatagatcgcccggatcagctcctcggtgtcgcctggggagagatgctccgtccccacatgggtgatgcgcccgttgattttaaacgccagcgggctgccggatacaatcaggatatccgaggctcccgccttcatggcatcctgcagcatgggcagcaagggggtgggcatggtcacggcctcctctttagtcgttgcccggccagacgggaaggggggcttccgaggccggttcctccgtgccgcggagaacgcggcgcaaaaccgtggtgcgcatggggttttcaagcggcaggatttcgagctgtgtgacgatctgccgctgcccgtccccgaccgggacagaaaattcaaggatcccgtcggcgagggacaccgacttgatctgggcgagctgtttccggtagagttcctcatacaccgcctgccggctggggagcgtatcggcggacagcgtttcggcttcgggaagggaggcgaactcccgcctggccttgaccagggcgtcgtcgattgcggcgagcgtatcttcgaccgcccgatcggccttataataggccaccgtgtggtccgccgcccgttcggtcaggcgaaggtcggcccgcgcggacagaaacgataggataccgaaggtagtcagtgccaagaccacaaaaatcatgaggatggaggaagctcccatcccgccgggacggcgtttgttcattgcggcacctcctcggcaaaggggacgaaacgggagaggggaaggcggcagcacggctccgtgtccgtcccgctgtagacgcagatctccccggtttcgaggagcccggctagggcatcgccgtcggtcaccagcacggtcacggtcaggccctcctcgaatacgcgggtgtagagggcggagagatcgtcccggatttcataggtccacccatcggaggaagcgaacagggcggtccccttgacgcggaactgctcggcggtatcctgagctctctcgactgcgtcgctcagccgggtgctttcccgttccttttcgtgcgccgcgacgaaaaggcgcagcgtaacggcggtggatagggaaaagaacagaatgaccacgatgagttccatgaggaacgccatcgaaccgcgctttttcatcgaattcctcctttcacccgccggggaatggccttattcacggcaaagagcgatatgcagggtatggggctggccgtcgcggccggccgaggtgacggccagcaggccgtcctcctcctcgatggaaaaggaagagagagcggtgacggtttcccccttttcgggagaaaagggggtggctgcctcggcgaaccattcccgcaggacgccgccggtgtaatagatacaagtttcaaagagatccccgtcaaactcctgtgtcaagaccagcacagacaagccatcccgggtttcgagagagacgcggtcggcggccctaaccttgttggccacgtaggaaagggacgcgcgcacatccccccgggcctccgtgtgctcgacggtgcgtttgtatacccgtgcgccgatgaggatgagcagcagggaaagcagggcgaataagccgtacagcaggacgacgaacagggtgtcggcggtgtgcttccggttcatcccgccccgcccccttccataaggaccgcagtggggggagaaccgccgccgcggcggacaatctggactgtgggccagatgttgtcgccgaagggctcgtagtccacgacataccggctgtgatcgatttgcaggccgtaatgctcttccagataagagaggctgtcgggataggccccctcgatagcgtagcagctcacgagggatttgcggacggcgcgttcaagcgcctgctgccgttcctcctccgcggtgcccgacatccggaaaaagccgaaaaggaaaagcagcagaacggccacggcgagcagcaggggacacagcaccctccagaaggtacgggtgcgccggaccggatagagatgcatgggatcaccagcctttcgcagtttgggcggaggatgcgggccttagccgatggcggagaggatgccgatgagaggcagcatgaccgaaagcaggatgctgccgatgatgacggagagcaggatgaccagggtgggttcgatgagcgccacgacacccgaaagggattcctctacatcggtctcgtattgggcggccatgtttttcatcacgtcgtcgagccggccggttttttcgccggtctggatcagacgcgcgtacagaccggaaaagaggcccagctcgagcagggcggcggaaaacgccttgccgcgggagactttgtcccggcagaggcggattttattccggacggtggggtcggccacgacctcttcagccagttccagcgcctccccgagatcgtatccgctggagaggagcatggacatgacggaggcgaagcggctcgaggcgatctgacggtaaaggcggcggaggaccggcaggcgggagctcaaagacatgagggcctgccgccctttggcggaaagcgagagcagcagcatggcgacaagcagcgcgagcaggacggcgaccaccaccagggcacagcggccgatcacgacgccggtggagaccatccccgtgttggcggacgcctcggccccgaggtcggcgaggacggaggagaagatgggcatcaccgcgaccaccaggacagcgatgacggccgccatgagaaggatgaggatgagcgggtagagcacggcgctgcgcacggccccccgcaggcgggcctcccgttcgtaatagaggctcagcgaatcgaggacttcctcgagcttaccggccgtttccccgatgcggatcatatgcaccatgtaagaggggaaaacgccggcctgccggaccgcttcatacagcgagccggtttccctggccgtatccgcaatccggcgcagaagctcccgcccggcgccggtgccttcctcggtcagggaggccagtccgtcccccagggggattcccgccttgagcagcaggcccgcttgggtacagaacagggcggtttctttcgccggtatccgtccggacgtccgggcggcggttttttggttgttcatagcacccttcctttcgcagcggccacggatcccgggcggcccgtgtatctggccggcggctttttcatcaatagacccgcagctcggtgtactggctgccgtcgccgatataatcttcaatgccctgtcccatcgaggcgccgaaagtggcgtccatcagcttccaggtcccgccgctgaaatagatcttgacagcgacccaacccttttccttggtgtagatgaggttccaggcatggctcagatcccccggagacaccgtcccgatgaccagcttggtcgggatgccctgcgcccgcagcatggcggtgaccagggcagcgtaatcgaaacaaattcccttgttggtgcgcagcgtgtcgtccacatcgggcagatagccggacgtcacggttttggctttgtcggtgtcgtattttatatggccggtgacataggtataaaccgcctcgattttggcgagatcgcccgatgcgccggcgcaaaggtcgaaggactttttgaccgccgcagaggcggcggaataggcgatatattggtttggatacagaaagggggagaaagagctggacagggagacgtccagagtcacggaatagagttcgctgtagctgcttccggtgatgttgcgcatcacccgcaccttgtagctgccgttgccggcctgcaggggaaagacctcatatctcccatcggtgttcagatcataattgtaggtgcgcccgggggtaataatctgcaccttgattttggatgcgctcccgctgtatttgaccataacgtatccgtcttcgatatgactggcgtcgattgtggcgtctccccccgcatacaccaccgtgcctgacgccgcgggttcgcggatatgaatcggtccggtatacggaggaggggaggtgggtggtgtggtggtgggaacagtcggctttttcgtgatggacggccggtcagaggaggcgccggcctgagaagagggatccggcggcgtctcggaggaggcgggagtgtccggcccggagggatcgtccggcgtttgggaggaaggcggctcggtttgctcggcggaagagccgccgctcggagagacagtagaaagcaaggaagacacatcgtcttccttgctcgatatacaggaagaaggatcggggtcctggactgcgcaggcgcacaggaaacatgcggaagcgagcagaaaaccgatgaggcggacaagagggttccgcatgccgtttcgcccctttcggaagatagcccggcggttatgtcccggggttgtcgtctagaggatccaccgcttccaagcggtattgaaccttgacggtttccatcgggtattcacgctgatatagacggatgacacggtcgaggaccttgcagccgttctcataagtggtctggccgagcatggtcacgagctgagtcgagctgtaaagggagacggcgtccccccggcggagattgtccacaacacaggattgcagcgccggcatgacccgcttgatggtgtccacgtccggaatctcgcctttggaatcggtgaccgtaatcagcccgatatggatggaggcgccggtgcggaccatgctgcgggcattgacccggtagatattcttgaatatcgcgtagtcgcagtagaaagcgcccggcaggcggctgacctccatgaggtcttccttaatcacgccgagatccatttccacgttgtgcatgctctgggcgattttccgatagagcttgacggtttccggattcatcgtcacgccgaattcgtcgtaaaattggcgggatatctgctggtaatgatcgacagccttccggctgcgtccatctttggcgtaagccagcatcagcaggcggtggacctcctcctcaaacgggctgtggacgatcgatgtttcgcagacgtggatcgcgtcggtgtaccgcttggccataagcagccctttggcgagatagcgcacgcaatggttgtactggctggtgtaataggcgcttttggaaactacccaggacaattcggacagggcgggcagaaaatccccgccgtattgctcaaacgctttatacgcatattccagccgcatctccaggtcctcggtttttttggcgtcgttccaataccgctcgaatatttcggtatcgatctcgcaggggatttccgggttccagagatagcagttgtgatcgtaacagatgaattccacatccgcccccgacagggtccgcagagcggtccgtgcccggtaaatgaggtttttgaggatatggaaagggtcgtcgtactcctcgtccggccagagatcctccatcatgcggtcgggagatatctccttgccgcggttggcgagaaggtattcgatgagtgcccacacctttttgctgcggccgatattcccagtcagaacccggtccccgtactggatggcaaaatcgccgaacatacggatctgaagggttgtagtcagagtgtcgatgggaatcacaccttctttccttttggacgttaactacataaagtatagcgtaaaatcacacggcttgcaacgggatttcttcaaaaaagggcgctgtgttttaaaatgaagtgtttttacctttttaatacctataaatacgcaaatccggtgaggaaatggggacgagaatcaccaaatgaaaaaattttttactaaaactggaaataaaactctttttgtgaccgggacgtgaccggggggctttataataacctcgtagatcgggaaggcccgacggacctcccggcggaaaccgtttgatgaaccaagagagaacacaaggagagtgtgtatacgtgacaaagacaaaaaaggtatggctcagtgttctttctctgcttatgacggtgtgcctgatatcgggcagcaccccggtttcaaccttgtatgccaaagcagaggaaaccggagtccagcagccgacggatccgggggatgggaccttcttcatccccaccggcgacgcggatccgctgctggaaaagaccgcgacgccggtcccgggtatggacggatattacgacatcaccctgaccctcaagccccccaagaccacccaggtcacgaccaccaaaaagaccgacatcgtgctggtcatcgataaatccgccagcatgaccaacggcaacaacattctcagcaatgtgaagaccgcggccaacggtctggtggacaacgtgctgacggacagcttgaaggatgcggtccgggtggcggtggttggcttcagcggccctaccagcaccaacgccaacgccaccgagagcaactcgctgacctactggggattcagtaacagtgccagcaccgtcaaggggcatatcaacgacatccgttccagcggcggcaccaatacagaggcgggactcaaaaaggcctatgacctgctgagcaccagcacggccgagcagaaattcgtggtgttcctttccgatggcggacccactttccggctgacgtctgtggcggaaaatgtgggccggggcaattatgtgtattatggcaccggcaccaacgacgacagcggatttaatgccacctgcgcccttgcctgggccgacgcgctgaaggcgccggtggggcagacagtgagccgcagcgtgacaggagacaacaataggactgtcaacatcgttcagaatcaagcgggcctcggcgccaaggtgttctcagtgggatacggcgtggacaccagtgactacgccagccccgacacggaggatgtccagtactatttcagcgccaaccaggccggtcagatcgccaatattttcaagctgatccagcagaccattgtcgattccatggcggcctccaatgtggtggtccgggacatcgtcaccgacgatttcgacattgtgacccccgccggagaggtggctgtggacggtcaggatatcccgtccggccagtccgtcaccatcaatggccggaccgtcacggttcccctgggggccatcacatcctctgaaactgaccggctgatcaccatcaccttccggatcaagctccgggaggaccggttcctggaggcagggacctacgtggtgcccaccaatacgaatgctcaggtcacctaccggcagaacgatgccgatctgcatcaggtgttcgaggtcccctccgtcaccatccaggtggacgccgataggtatgggatgagcaagactgccgcggtcaccgactgggatgcccggacgtatgacatcaccgtcaaggcctggtcggccgtcccgccccagaccatgtgggtggaccgcaccgattatgtggcggacggcagcgtgaccccctccgccgacaacgaaggcgagagccatctcgtctacatcgggtcgggagacaacgacccggtcagccaggatcccgctgattatgcgctgcggaaggtatcgagcgagactaccggagagatcacggacagttattgggcgtacgatgatccggagacgggacttgtccggtatacgggagagattcactggagaagaggattcctcgactatccggttgcagacaatccggatcccaacagcggtacgacctattatggaagaactgggacttttctcttcattttcccgatttacagccagctcacctggaaacaggatgcgacctacaccaccgcctacttctgggaggatcaggaggacgcgggagccgccgagcggacggtttacaagaccgtcaccacccaggtgccggtgacgcccgagggcaacaccccgctgaatgccgccacccaggtagtcgacgtggtggatgaccgttttgaaatcgtctcgaccagcccggcgggcgcggcggtagaaggcaacaaggtgacctggaccctggatgccctgaccggcaccgcggcaaagcctggcttcaccggcaccattacggtccgggccaaggcggattacgtgggcggcaacaatgttgccaccaatgtggaggcccagtcggggctgatcatcggggacaacaccctgaggcccttccccgaccagcccaccgtcaatgtcaaagctcagctctcgatcggggataccgagcgcaccatcttcctcggtgaggcggttcccaccgatacgtctgtcttggaggatatgggagcgtcggccgacggcctcacctacacctggacggatggtccgggggtagcggaggggcagctgccggcgggatatgtaccgggcggcgcggatccgttggtttacaccctgaccgcatccctcgccatggaggccccgacggacaaatctctggccaatacggccggccaatacaacgccaacccggttaccgacaccggactctataccgtcaatattcttaccggaagcctgaccatccggaaaaccctgagcgataagagcgatgcggatacatccaccgccttcgtgttccgggtggaccggttcgacgaagaggatcgcttggtcgagaccttctaccgcacggtgttcactggtgacgacaagaccggaagcatcaccgtgacagggcttcccaagggccggtatgaaattacggaacagaccggctggtcttggcggtatgacctgatcgacaaaaaccaggatgcgcagacactcggatgcgcagacggttatacggacgatgcgattacggctgtattcatcaatgaaaagaaaaacgataaatgggccggtgccaccgacagtgtggtcaacgtgttcgaaggaggtacagtatgaagattcagaagctcgccgtactgatcgcctccggtgtcctggtactgtgcgtgtgcggcgtgggtatgacttacgcgctcctcaagcatgtcaccgatgaaaaggtcaacgaattcgcgcccgggaccgtgtcgcaggacattgtcgagaacagtgacccgacgcccgactccagcaacacgattccctacgatgaggacggggccgtcaaacaggtcgaaatcaaaaacaccggcgatgtggacacctatgtgcgggtgatgctgattcccggctggaaggccaacggaacggcggctgccgccggggagctggccttcggtaccgccccctatcaaacggatggccagaagctgcagatgggcgacgtcacgctcctcctcgcggatgactgggctgatcgctggctctatgatgaggccaccggctatttctactgcaagacccgggtgagccccggaacgaccaccggcctgcttctcgagcgggtgacgatcgccgaaggcaaagcgaccgaggcggcgtgggacaatctggaggtccaggtgatatccgaatcaatccaggcagagggcggtgccctggccgaggcgtggacggatgtccggctggaaaacggcgccctggttctcaggtaggaggataaacggctttgatcaagaagatctgcagcattctttccaccgtattgatggtgctcatggtgctggtcgccgcagcgctgctggttccctatctgttcggctaccggccgatggcggtgctcagtgccagcatggaacccgcctatcccaccggcagcgtggtgtttgtcaaaaaagtggagcccgctgaaattgagatcggtgatcccatcaccttccacagagaggggcttgccgagccgattacccatcgggtcatcgcgatcgacaccgatgcccggatcttcacgacgaagggcgataacgtcagcggtgttacagatacggttccctttgacagcctgatcggccgttccagccagttcgccattcccctgatcggctatgtggcggtgaatatccgcacccttcccggcatcctgatcgcctgcgcggtcctgctggtggtggtgctcctcgccttcctgcccgatctgttcacgaaaccttcctctggcactccgccggaagcctcccctcttccggcgggtgcccttaccgaggaaaaaaccgattcgggagaatcggaaaaaatacaatccacacatacacaaccataaatttaggaggtcgcaatgatgaaaaagaagaatgtactgctcgtttccctggctttcgccctggtggctgtgatcgcgatcggcgccacgttcgccctgctgtccgattccaccggccctgtgaccaataccttcaccgtcgcggaaaacggcattcagattgaactgcgtgagcctcaattcgacggagtggacttcggcggcgggaaactggacccccagcccgcgcagctcggccaggtcctcgcccagaacattgtgcccggccgcgaaatcccgaaggaccccaccgttaaaaacaccggcgcccacgattgctggatcgcgatcaagctcgaatatacctggaacaacggcgacaccaaggttcctttctccaccctcgcggaccaggtctccttcgttaccgacgctaactgggttgccaaagacgataccaactcggtcttctatttcaacacgaaggtcgccgccaacggcaagaccgacgctctgtttgataccgtgcagatcaaagatgtgagcgctgtttatccgttcgacatcgttatcaccgcctatgccgtccaggccgagggcgttgcggatctggatgccgcgaaggtagcgctggacaacttgatgaacccgcaggcctgattgacggtcccgtttgccccggcggaaagccggcttgacgaaccgaaacagattatggaggagacattcacatgaaaaagaaaatcgccgtccttgttactgcggtcgccctcgttgctctggtggccatcggcgctaccttcgccctgtttaccgacagccacagcaccctgaacaccgtcacgatggggaatgtcaagatcacgctgaccgagccccagttcagtgaagacaccgacaacaccaacacaatcgcgaatgtagttccccggcaggtcatcgacaaggatcccaccatcgaaaacgtgggtaaaaacgatgcgtatgtccgtgtgctgctggcatatgaaggccttaccgagacccagtcccaggaagtcgaagcgctgctcgatatcgatggggaaaactggatcaagggcgaggacggctattactactatcaaaatatcctggctgccggcgccgatccgatcgtcctcttcaccaagctgaccgttccggactggggcaacgagatcaatgatacggagttcaaggtcaacatcacggccgaagctgtccagtcggattattttgatccctccgaagaggatggttccatcatcagctggggcgacgtccagcctgaataagcctgtctccgaacccggattgttacacgctttaggcgctatgctacagtaaaggatatgatgccatgcgcaagaatacgccgaacaaaatagccgcgctctgtttatctctgacgctgctgatggcaggcggtgtttcaggtgccgtctcggccggggccgcggacggggagccggatattaccatcacctatgatggaagcacccggatccaatcgagtcccgccgacgacttttttggcgatgcgggtaaaaacctgatgcccggctcgtcctttaccaagagcatggacatcgtcaaccagagcaacgataccctgctcgtctacctgcgcgccgaagtcggcgaagaggtgtatgctgaatatctgcagacacacccggaagaggctttatccgaagccgcctatgccgagcagctcataaaggagctcaccctgaccattaccgcgctcgatcggcagggaaatccggtcgaggtctactaccagggccccgcttccggggatccgcagcaccagcatcctacttccgattccgctggtttgaccgcccggtatcccaataccgagcacggcatcgtgattggacgtctctcggacaatgcggtggccagcctgacttttgaggtgggtgtgccgctgtccctgggcaacgaataccaggatacgatgtcggtggtcaagtgggttctcatctgtgacgccacgcctcctgaggaaattccggatgaatccacccccttgacgcctccgccgagctcgggggagaacatcgacgatgaggatgtccccctgattgatgggccgaagacgggtgttgattcctcggcatcccatatggttgccattgcagtggtggcgggagccgcactcctgcttttcctcctgcttctcctcaaaaaacgggaagataaaaagaaggcctccgccacgcagagcccttccgtatgatcccaaaacagacgccgcatctgatgcggcgtctgtttttatacttttgcgatgcatccctctcccggaggaatggggaaccgttgtcccctaatcatcgtaccggatggttcgggcaagacctcttctcccgttttctttattaggaaaaccgggagcttttgccgtgtggagaatatggctgcgtatttgacagtctgatctgtatgatggtgcttttgcgctgctcctccatacggcacacaattacacaggaagccggacggaagatcgacatatgaagctctcccgaatttcaaggccgtcggccggctttttctagaaaattcaacctggaagtggacgccgggaccaatacaaggaattctgatgccccaaaattttatgaaaagcgcccccggccgtatgaaacagccgggggttgtatacggtaagtcggcgggatacgggggtgtcccggatatagaggcggaccgaccgcgggattgtcaacggttgagcagatagaatgcgagattgagatatgcggcaaaaaggcaccacagtaagtagggcagcatgaggtaataggcggcgggccggatatacttgaatcccgtcatggtcagggtgacgagggcgatgaggaggagcagccagaaaaacgagaacaggcgccattccagccggaaaaagaagacgggccacaggacgtttaccaataattgcagcagatacatccgcaggggcgcgcctcgatcgatatcgtcggtgttgaagactaggtaggccgcgaaggccatgagtgcatacagaaccgtccagaccaagggaaagacaaaagccgggggagtgaggggaggctttatgaggcgctcaaaccccgccgttccgctgacaaaaccgctgagcaggccggcgcccagggtgagaatttcaaaaaacgcgaaggcgcggaaatcaaatttgcgcttagagacggtgtgcatacggcagcttcctttctgttccggctactctatagtatgcccgccaccgcccgattatgaatcttcttccggggttgccagggactggatgctgctgtatccggattgacaggaccggatgggaggtgtacactgcttccatatcctgtttgcgtcaaaagggggattcccaatgcggctgtgtattgtgaaagctccatgcaaagtctgaggacggatttgcatggagcggaacggacgcccgaaaagcagccggcgtcccgccgtccaataggactttgcatcccagacgattttccggatatccggaacgataaggagcaaagttcgaatgaaacatccatttcgcgcgccggccccggccggtatgcgcccttttctgcttttatggtccacccagtccctgtcggctctgggcagttctatgaccagctttgcgctcattgtctggtcctatcagcagcagggttccgccctgaccacgtctttgctgtcggtatgttcctacgcaccctatgtggcgatgagcctgtttgccggcgccctttgcgaccggcttgacaaaaaacggactatgctggtgtgcgacaccctggccgccgtcacgaccctgtgcgtatacggccttctccgtgcgggacggctggccgtatggcacctctatttgctgagcgccctgaatgggctgatgaataccgttcagcagcccgcttccgacgtcaccgtcacgctcctcgccccccgggataagttccagcgggtcagcgggctccagtccttctcgaacgcgctggtgacggttctgaccccggccgcagcctcggcggtgctggcgttcggcgggctggacgtggtgatcctcatcgatctcgccacctttgcgtccgcctttttcagcctggcgctgttcattcatgtcccgtccgtgccgcggggtgagccggaggaaaagggccggatgtggcgggattgtctcggcgggatgcgatacctgcggcaaaaccggggcatactggatttgatcctgtttctcgcggcgatcaacctgaccgcgtccctgtataacgcggcgctgcccgcaatgctgctttcacggcagggcggcgggcaggccgccttgggcctggtcaacacctgcaccggcctcgctacggtagcgggcagcgtgctcgttaccctcgcgcccgcgccgaagagccgggtgaaggtgatctgcaacacgctactgctttccatgggaattgaaaacgtgctgttggccgtcggccgtaccctgccggtgtggtgcgtcggtggggtgctcggatggctcctcatcccggtgatgaacaccaatctgaatgcgctgctgcgctcgcacatcccgctggagatgcaggggcgggtctttgcggctcggaacaccctgcagtttttcaccatcccggtgggatatctcctgggcggcgtgctggtcgaccgggtgttcgagcccctgatggccgtccagttccccggcagcccgttgctcttcctgttcggcgagggcaagggctcgggcgccgcgatgctgtttttgctgctggcggtcacaggggaggcgacctgtctcattttccggcgggaccggcatatctgggcgctggaaaagaaaaagccctcagacccttcgtgaagccgggcatgcccgcacggatcatatgaaacaaacagcccgcgagttttactcgcgggctgtttggcgatttccagtcacaatgttttggccagttccttgagataggcccggaatccgtcgcccacctcgggatgatccagcgccacctcgcagatggcctgcaggatccccagcttgttgcccatgtcgtaccgtttgccggtgaaatcgacccccgtcatcccatccctccgggccagggtcatcatggcgtctgtcaactggatttccccgcccgctccgggctgggtccggtcgaggatgtcgaaaatctccggcgggagcacgcaccggccgagaatggaaaacagggagaggatcttgtcgggagaaggcttttccaccatgtcggtgacgcggtagaggttgtcccgcaggggatcgactttcagggagctgtaccggacaatctgttcgggggtgacctccttgatgccgacgacaccgaggccatactcttcatatgcccggcagagctggccgc

SEQ ID NO: 3053 - DNA, 32759 bp, Unknown
  16S sequences of unknown bacteria
gggcggcgctgcgcgaacgcgcggcaaaccaacccaaagatatttccgacgaagtcgccgcgaccgtcagcgaatacgggcccgatgaggaaacggaggagattttgaaagaggaaaacgcagaagagaaagccgaagagtcgctcgcgggcagggaactcgtgacgcggtatcgccgcagtttccgctcgcggctcattcagaacgaaaacattcaggaattttacagtcagttgaaaaacaacattttgggatatgcgggcgtgaagtgccgcatgagtttccattatgaatctttccgcgtcggcaaaagcctgatcgccaaattcaacgtgtcgggcaagacgctttgcctgtatctcgccctcgcgccgagcctgtatgaaaacggaaaataccgttttgaggacgtatccgcgaaaaagacgtacgcgctcgtgccgatgaagttgaaaattacttccgggcgcgccatgaattacgccaaagaattgatcaaacaattggcaaccaggtacgatctggcgaatgtaggcagcatatacatggagtatcgctatgcctatgcctcggacgattctctgatcgccaaagggctgatcaaaccgtatacggtcgccgtgcgggcaaagtagaaaagtcactttttaaaaaggagcgcggaagcgctccttttttgtgaacgaacttgacaaacgcgtgcattcgtgatacgatatatattgagaaaatatgtcgaaaaaagtcgcattttgcggcaagtgggagaaatatcatgtctgaatacgtgcttggaccgagcgaggggacaccgccgcccgcaggtccgcacaatatgccgccgccgcgcgttttcggttggcagcatttactgtatcttgtcgtcgtcatcgccgtcggcgccgcgatctttctgctcgtacgtaaaaaatacgctaaaaacgatagggcgttatcattgattttcagagtgtgcggcgtgattctattgtttttcgttacaatcaaccgtgtcagtgaaatatttcggttgcacggctggtactacatctttcccaactccttttgcgggctgggttcgttcgtgctcgcttttgcgcttatattcggaaaaaaagacaatatcgtcctgcattttatagcgtatctgactatgttcggcgggatcgtaaatctcatttatccctattacgtggggcagcaccgtctgtttttttatccaagcacgatctcggggcttttgcatcatacgatgtgtgtatttatattcgttcttatggtttatacaggctatatgaaacccgacataaagaaatggtacgcgattccattggggctcagtacgtttatgaccgtgggcgtatttgaactgagtatgtttttaccgctcgatcccatgtacgacgccatgaatatcatcgtcgcgatcgtgcccgatactattctcacctggtggttcgtggggttgggtttcgtgcttgcttatgctgtttttatggtcgcgtggcattttgccaacaaggcgcggaacgcgcgcaaacaagaggcggccgcttcgacgctggaacgcgcggctgacaaaaaaatgtaaaattttccagataaagcaggtaaaatgttgtatttgcaacagtatgtttgcgggtttgatgataaaataagtacgtaaaaaggggagacggaaaaccgtttccgaaatgaaataagaataagagaggttatcattatgaaaagatgtgctatttgcggtgaagtcgtagaagacgacgtgatggtctgccctgtatgcaaggcgacgaaattcgttcccatcgacgaaagcgccgagatcaaatttgcgtgcgtgcacgaagtgggcgttgccaaggggctggacgaagaagtcgtcaagggattgagagctaatttcgagggcgaatgcaccgaagtgggcatgtaccttgccatggcgagagttgccgagagagagggctatcccgaaatagcggaagcctataagagatacgctttcgaagaggcggagcacgcatccaaattcgcagaacttttgggcgagtgcatcacggattcgaccaaaaagaatctggaacttcgcgtcgcggcggaaacgggcgcctgcgaaggcaaactgatgatcgccaagcgcgccaaagagttgggctacgacgcgatccacgacaccgtgcacgaaatggcaaaggacgaagcccgtcacggcgccggcttcaacggtcttttgaaaagatatttcaagtaaatcgtaacaataaacagataaaaacctccgcggcgaatggcgcggaggttttatttttatctgttttgcggatactgttataaattattgtccgtcgggcccgtcgttgtcctcgtctttttcggtgtaggaaacgtcgtagcggatattttcgtttttagaggtcagcgccttgataaattcgttgttccactcgggtttgacgacgatgaccgtaaacgtttcgtttttgaaataaacgaccaatttgttcgttttggtaaataaatgcaccgacgtgatctcttcgattttgaaggtgctcttgatcaccccgaaacggagcacgatctctttgtcggtgatgcggtagaaagagcggatgagcagactgacgaataccactaagagaagcgcgcatacgatgagcatgaccacgtgctgcagaccgagggtaaaactcggaaaaccgaaacgtataatgcgataaatcgtccagcccgcgccgcccaatgcgagcgcgatcgcgagaacagaaaggatgaccgccgttctggaaaatttgaatttaaagtctttcataatttacctcggtcacattgtaacacaaacgacggcaaaaatcaacagtaccaaagcaccgaggtcaagtttttcccttcgtgatataatttattcttatatataggaaagggcaatttgcttgttttattattttaaaaggtgtaaaataggttaggcgaaagaaaggagcgttatcaatcgtgcaacaattcaattcacaactacttatagattttaccgcgttaggtgaaaaaatattcccgaagttcattttcggcgaaggcttgtttgccgtcaacgacagcgtgatctcgggctttatcgtcgttgcggtcattttactggcggcgcttatcatgcgcctgacgatcatccgcaaatggaaaacgacgcccacgggcgggcagatgtttttggaatggctcgtctgcacgttcgataaacaggcggaagattctacggaaaattacgcgtcgttcatgggaccgtacacgttcggtgcggcggcgtatatctgctgcggggttctcgtcgaactattcggacttcgccccgccatggcggacgtaggcgcctgcctgtcgctcgccctctgtacttttttgtttatccatacgctcggtttcgtgaagaagaaacacaggcgtttgctgcattatctcaatcccatcaacatcatcacggatatcgccgtgcccgtttccatgaccgtccggttattcggcagtattttaagcggtatggtgatcatggaactcgtatatatagtcgtcgaggcgatctggttcgtggggcttccgctcattattcccgccctcgtttcgccgctgttcacgctgttccacgcgtttatacaggcgtacgtgttcgcctcgctcacgttgatgttcgtgcaggaagcgatcgaagagggaccgaaaaagcaaaagaaaaagaagaaaaagcgcggcgaagagatcgcggcgtaacaaagacaatattctcgcgtttaagagcgagtggcataaatgaagggctgagccctgactttgaaaacgcggttttcagagtaaacttcggaggtatgcaaaaatggaattattggtaacgatgcttatgaactttttggcgagcgacggcgcggcgttgggcgcggcgatcggcgcgggcattgcggcatttacgggcgtaggcgcaggtatcggtatgggcatcgccacgggcaaagccgtagaagcgacggcgcgtcagcccgaagcggtcggcaagatcagaacgatgctccttctggggctcgcgtttgcggaaaccaccgcgatctacggattattgatcagtatactgttgattttcgtaggcgtggcatagacaaaataattacgtaaaaggtgtgaaatgtcgcaaatgatccctctcaatctcgttttggcgagtatattagatacgttcggtatttccgtaacgagcattctgcttcatttattgaatctggtagtgcttaccgtcggattgtattttcttttgttcaagcccgtcaaaaggatggtgcgcgagcggcaggaaaaagtaaaaaagatcgaacaggaaaacagcgaactcaacgcggaagtgaaaaaactgaaagacaataccgaggaggtattgaccgaggcgaaaaaggaagccgcggatatacacgaaaaggccgtgcgcgtagccaatcaaaaggcggacgacattatcggcgaggctaaaatcaaggcgaaagggctcgtggagcgcacggaaaaggaactggacgaagagcgcaaaaaattgcagcaggatatcgaaaaggaaattaccgacgtatcctttgtggtcgcggaaaaagtacttgcgcgcgacatcaccaaagaggataacaagcgcatgatcgaagagtgcctcgaagagtggagcaaaaaataacatgtccaagagcgaacaggtcgcaaaagtgaccgtaacgatcaagcccgacgacgaaacgatgaaaaagattgccgatttcgtcaagcggcacaactgttacagcgtcgattacatcatcgatgaaaacataatcggcggaattatcattcagataggggacgttatatacgacggttccgtaaggggcaggctggaaaatatcaagcaagcgttgtaacgtccgtacaaggatattatgatcgacgtaaacgaaatagccaaaggcatcaaagaaaaaatcgccaaagtacaggagtcgcacgacgaacgctcgacggggcgcatcgtctattcgggagacgggatcatcaggatctcgggcatctcggacgtaaagtacaacgaacttctcgacatcaagggcggctatcacgcgcttgcgctcaacctggaacaagatctggtgggcgcggtgcttttttcgggcgaagataaggtgcggttcggcgactatgcctattctacgggcaggaccgtggatatgcaggtgggcgaagaactcatcggcagagtcgtcaatcccctcggagaggcgctcgacgggctgggagaactgcacacgggcaagtcccgccccgtggaatatcccgcgccctccatcatggaccgcggcaaagtgaacaaaccattgcagacgggcatcctcgccatcgacagcatgatccccatcggaagagggcagagggaactgatcatcggcgacaggcagacgggcaagaccgccatcgccgtggacgccatcctgaatcagaagggcgaaaacgtgatctgtatctatgtttccatagggcagaaagcgtcctcgcttgcaaagacgctcaacaccctgcagaacgcgggcgccatggaatacacctgcgtggtcggctccacggcggacgacgccgcgcccctgcaatacatcgcgccgtacagcggctgcgcccttgccgaatacttcatgtatcaggggaaggacgttctgatcgtgtacgacgatcttacgaaacacgccgtcgcataccgcgaaatgagcctgttgttgcagcgccccgcgggacgcgaggcgtaccccggcgacgtattttatctgcattcgcgcctgttggaacgctcggcgaaactgagcgaagaaaagggaggcggctcgatcaccgcgcttcccatcgtggaaacgctggcgggagatatctccgcgtatattccgacgaacgtcatttccattacagacggacagatctatctggaaagcgaactgttcaacagcggcgtgcgccccgcggtcaacgtgggcctttccgtttcgcgcgtgggcggcagcgcgcagcgccctgcaatacgctctgtttcggggcaactccgcatcaatctcgcgcaatacagggaactcgccattttctcgcagttcggctccgatctggacaccgaaacgcagaaaattttaagccgcggcgccaaactgacggatactctcaaacagaggcagtatctcaattacagcgtgcgcgaaatgttcgtactccttctggtttcgcagagcgacgttatcgacgccgttcccgaaaagaaggtgacggcatacaacgaaaatcttctcgacttcatccgcgtcaacaggccggagatcctctcggatatcgaccccgaccaaaaaccgggcgacgaactcaaagagcgcattttggaagttgcgcgcgaatgtttgagttacgtcggcatcgcggttcgcaaggagagcacggaggcggaaaatggctgataccgcagagatcaagcatcgcatcaaggggatcaacgatacgcatcagatcacgaaggcgatggagttgatctccgtggcgaagatgcacaagacgatggcaaagcacgccgccaacgccccttatttcgatacggtgcgctatgcgatcaaagatatcctgcgccacagcgcggatattcacaataaatatatcgaccaccgtcccgattcgcgcacggcgtatatcgtcatcgcgggcgacaagggattggcaggctcgtacaatgcgaacgtgctcaatctcgcgtgggagcatatgcaaaagcgtcccgtgcattacgtcatcaccatcgggcagatggcgcgcgcttttttcgagagcaagaaacagagcgtcgatctggaattcacgcacgccgtgaccaatcccaccatgcacgacgcgcgcggcgttatgcgcgacattctcgatctgtacgacaagaatctgatggacgaggtcatcgtcgcgttcaccaaaatgcagtccacagtcgtgcagacgccccaactcatccgccttcttcccattatggaacaggatatcgaggtggaaaacgccccgtcgtacggcggtcaactcgaatacgacccttcccccaaggaagtgctggacgtactcgtgccgcagtatctggtcggcgtcatctattccacgctcattcacgcgtcggcaagcgaacacgccgcgcgtatgctcgcgatgtccaacgccaacaaaaacgcggaaaagatgctcgacacgctcaatctcgaatacaaccgttcccgacagagcgccatcacgactgaacttttggatctggcgtcgggaaggtttgcctcgaagagataatgcggcaaattaggcaaacacaggagattttatggtaaattcgggcaagatcaatcagattatcgggcctgtcgtcgacgttcggttcgacggcgccatgccccccgtatatgaaaaattgcaaatagaagagggcggcaccgttctggaagtgctcgcgcacgtcaagaaaggcgtggtgcgctgcatcgccatgagcgcgacagaagggctttcccgcggtatgcgcgtgatcgactgcggcacgcagatcgacgtgcccgtgggcgaaggcgttttgggccgcgtgatgaacgtgctcggcgagcccatcgacaacaagggcgagatagacgccaagacgcattggaacattcaccgcaaaccgcccgctttttacgatcagaacccttccaccgaagtgttcgaaacgggcatcaaagtcatcgacctgatcgctccctattccaagggcggcaagatcgggctgttcggcggcgcgggcgtgggcaagaccgtgctcatcatggaactgatccacaacatcagcaaagaacacggcggctattccatcttcacgggcgtgggcgaacgctcccgcgaaggcaacgacatgatctcggatatggaagagtcgggcgtcattaaaaataccgccttggtctacgggcagatgaacgaaccgcccggaagccgtatgcgcaccgcgttcacggggctgacgctggcggaatatttccgcgacgtcaaccgtcaggacgttttgcttttcatcgacaacatttaccgctacattcaggcgggcagcgaagtttcggcgctcttgggcagaatgccttccgcggtcggctatcagcccacgctggcgacggaaatggggcttttagaggagcgcatcgcctccaccaagcgtggctcgatcacctccattcaggcggtgtacgtgcccgcggacgatatcaccgatcccgcgcccgccgccatattcgcgcatctcgacgcgacgacggtgctttcccgaaaggtcgtggaacaggggatttatcccgcggtggatcctctggaatccaattcgcgcattctcgatccgcagatcgtcggttcgcgccattacgaggtcgcgaacaaagtcatcgcgacgctgcaaagatataaggaattgcaggatatcatcgccattctcggcatggacgaattgtccgaagaggataaaaattccgttttccgcgcaaggaaaattcagaaattcatgtctcagcccttcttcgtttccaaaatttatacgggactggaaggccgctacgtgccgctggaagccacgatcaagagttttgaaaccattctggcgggcgaagtggacgacttgcccgaaaacgcctttttcaacgtgggcgatatcgacgaagtcagaaagaaggcgcgcgaattgcagccttaaagaaaattatgaataagttttttctggaaatcattacgcccgagcgcacgttttacagcggacgggtcgaatcgatcacggtcagcgccgtgggggggctgtgcacgatcatggcgatgcaccagcccaccgttctcgccaccgagccggggatcttgaagatcaccgcggacggaaagacgcgcgaggcgtttatcagcgagggttttatcgaggtgcgccccgacgaaaccgtcgtcttttcgcaggcggtggaatggcccgaagagatcaacgagcagcgcgcgcgggaggctgcggagcgcgccgaggagatgatacggcgcaacaggagcgcttcggaatatcggctcaaccgcatcgcgctgcagcgcgcgttttcgcgcctgcgcgtaaaaaacgatcatatgaaagattagaaaattttggaggacggcgtatttttgcgccgtcctttcttcttctatttgacaaaaaacgcgtatcgtactataatgaaagcaattacttttacaaagaacaggagttatacggtatgatcaaactcatcaggggcgggtgctattacatggacggcgcgctcgtcaaggaaaatcaggcgtttctgacggcggagcagaaagcgaaggcgcaaaaggggacgatgacttacaagatcctccgcgcgcacaacgagggcgacgaagaaaatctgaagatcaagttcgacgctatcgcctcgcacgatatcacctacgtcgggatcattcagacggcgaaggcgagcggtctggaaaaatttccgctctcgtacactctgaccaactgccataactccctctgcgcggtggggggtaccatcaacgaggacgaccacgtcttcggcctttccgcggcgaaaaagtacggcgcgaacttcgtgcccccgcaccttgcggtcattcaccaatatatgcgcgaaacggaggccaaagtcggccgcatgatcctcggctccgattcgcatacgcgttacggcgcgctcggcaccatggcggtgggcgagggcggtcccgaactcgtcaaacagatcttgggcaagacctatgatatcaagcgccccgaaacggtggcggtgtacctgcgcggcaatctcagaaagggcgtcggcccgcaggacgtggcgatcgcgctgtgcggcgccgtgttcaagaacggtttcgtcaaaaataaaatcctcgaattcgtcggccccggcatcaaaaacctatccatggattaccgcaacggtatcgacgtgatgaccaccgagaccgcctgcctctcttccgtctgggaaacggacgaaaagacgcgcgaatattacaaagtccacgggcgcgaggaagattacaaggaacttaaggcggaaaatcccgcctattatgattacggcattacgatcaatctttcgaccgtagagccgatgatcgcgctgccgttccaccccagcaacgcgtacacgatccgcgaacttctggcgcacccttacgagatcttgtccgaagtcgaacaggcggggcgcaaattgaagggcgacgaaagttttacgctcaccgataagatcgtcgacggcaagatttacgtcaatcagggcatcatcgcgggctgcgcgggcggtatgtacgaaaatatcgcggaagcgtacgaaatactcaaaggcaagtccacgggcacgggcgagttttcgctgtccgtgtatccttccagccagcccgtgttcaagagtctggtggataacggctatatcggcgggcttatggagagcggcgccgtggtcaaaactgcgttctgcggtccctgtttcggcgctggagacgtgcccgcgaacaacgggctgtccatccgtcacaccacccgcaacttcgagagccgcgagggcagcaaacccgcgagcggacagttggcggcggtcgcgctcatggacgcgcgttccatcgcggctacggcggcgaacggcggtttcctcacttccgcgctcgacgtcgactacactaaaaaaatcaaaaaatattctttcgatgcggaaatttatcgaaaccgcgtttaccgcggcgcgggcgacgcgcacaccgaaacgccgcttaaatacggcccgaacatagcggactggcccgaaatgatcccgctcggcaagaacgttctcataaaagcggtgagcgttttggaagatcccgttaccaccaccgacgaactcatcccttcgggcgaaacttcctcataccgttccaatcccctgaaactcgcggaattcgcgctttcaagaaaagatcccgcctatgtcggccgcgcgaaagaggtcaaagcggcggaagaggcgcgccgcgcggaaggctcgcttcccgaagaggtgctgaaagaggtcggtcctttgcagatcaaagagggcacgatttacggcagttgcgtcgtggcggtcaaacccggcgacggttcggcgcgcgaacaggcggcgagttgtcagagggtgctcggcggcatcgccaatatcgccaaagagtacgcgaccaagcgttatcgcagcaacctcattaactggggcatgctgcccttcgtcgccgataaactcaatttcaaagtgggcgattatatttacattgagaacatagacgaactcatccgaaacggcgcggaggaaattcccgcaaaacatctgagcggaaagagcgtgaaggatatcacgctgcgcgtgggcggcctcacggatgacgaaaagaatatcattttgaagggctgtctgatcaatttcaacgccgcgaaatagggcggaggcttataatatgtaccgattggagcagtataaaaacatcatagatctgacgatccgtccgcgcgagccgctcattttgagcgagcgggaaaaggacgggatatgcgatgaaatgctctccgtgttgctcgaagagcgcaacgagatcgcggcgttcagttatccgtacaaggtcaaacgggatctcatctggggctatctcaaccagcgtctgcccaatcccgtgagcgcgcgttttctggaaatccaggataaactgttctggtcggaaacgctggaaaacggcatcgtcgacgttgcggacattccctgccgcgaccggatcgcgctgtggcagggcgatatcacccgtctgaacgcggacgcggtggtgaacgccgccaacaatcggttgctcggctgtttcattccccaccacaagtgtatcgacaacgtcatccactcgcgggcgggcgtgcaagtgcgtctggactgttccaagatcatgggcgcgcagggcgaaaaggagccttccggctgcgccaagatcacgcgcgcgtataatctgccttccaaatatatcatccataccgtagggccgatggtcgggcgcaaagtgaccgacgaggacaggcgcgtgttgcggggatgctatatttccagtctgaacctcgcaaaggaaatgcgtcttgaaagcatcgctttctgctgtatctccacgggaattttcgggtttccgaacgacgaggcggcggccgtcgccgtgggtgcggtcaaacagtggctcatggaaaacgattacccgatccgcgttatcttcgacgtgtttctggacaaagaccttgccatctatcgcgaaattttagacaacgtataggaaaagacacggcgtcagccgtgtcttttattccgcctgaatttgatacagagcgggtctttcgggcttcgcaggcgaaaactgcgccttgtcgatgtgcatgagattcgccgtgccgcagagggccgccgcgcagagcgcgcataacaaaaaccgtttcatgcccgcagtatttgcatagataccgaaaagtatgcgcgtatctcttgctttttcgcgcggaaaggtttataataaaaacaagacagatgccgaagggcaaatgccttttaaaaatatttgcaacctgcgccgaagggtacgcccgacgggaaaggggagaatcggatttgtttgaaacgagtcggggcactctcttttttccgcgcgcgggaaaagggagtttttttatgtccgaaaaccgcgttgcggcggtcagtatcgtcgtggaaaagaaagagagcaccgaaaaactcaacgccgttctgcacgaattcggggaatacatcatcggcagaatggggataccttataaacccaagggcatttccgtcctgtccgtcgtgctcgacgcgccgacggagatcgtcaatgcgctcacgggcaaactcggcatgctcgacggcgtgtccgcaaaaactttgttttcgaaatattgatttcattttaaggagtatatccatgaaaaaattattgacttttcttttgtccgttctgctgctcgtaagcggcgcgttcgcgctcgtcgcctgcggacgcgaaaaagtaatggtctatttccccgacggcacgcccgggctggcgctcgcgcaggcgatcaccgagggagtaagcgaaacgaacgttacgtttaaattcgagcccgtacccgctaccgaaatcgcgggcgtcgtagccaacggcgaagcggatctcgcgatcatgcccacgaccgccgccgccacgctgtatggaaaaaagaacgtcaagatccaactgatgagcaccaatgtgttcggcaacctctacgttgtgggatatggcgaaaaccgcgccgaagatcttcacgggttggtcggcaaagtggtctattataccacgggcaccaccgtggatatgttccgctacatcatcgatcagaccgaggggcttgaatacgccgaaatgggcaacacgtcggacgtggatcccgaaaagatcaatttacagcaggcgacggaaggctcggaaatcatcgcgtttatggcggatgccaaaaagaataacaaagaatgttacggcgttctgggcgaaccgcaggtgacggcgtgcaaagccaaagtggaaggcagcgattttatcgtcgatttccaggaagaatggaaaaaactgacgggtgaagagggctatccgcaggcttctctggtggtgaaaagcgaatttgcggaaaatcacgccgacgttgccgaagcattcgcgaacagtcttgccggcaatgccgcgtggctggaaaacgccgacaatatcgcgagattcaaacaggcgctgaaagacggcgattatacatcgtctttgatcaccgcgcccattactgcggagaccgtcgccaactgtcatctcggttttcaaaaatcctccgatatcaaacagtcggtcaaagattacgtgaaaatactcaataaacaggatctggacgacggatttttctatacctattccgcataatcgtccgaggtaaaaacttatgaaaccgaaagtcaaaaaaatcatcggaaatatctgttatccgctcgccgtcgtgcttttgattttcggcgtttgggcggccgcggcgtacgcgaagggcgtcacgctgatccttcccacgcccgcgcaggcttttcacgagttgttcgcttacgtgcagacttcggttttctggcgcgctctcgcaaattctttgtggcgttccttttacagttttctcatttcctttgcgctggggctcgcgttcgcgctcctttcgcggttttccgaagcggcggacaggctcgtccgcccgctgatggcgatcgtgcgcgcggtacccacgatggcgatcatctttatccttgtcatctggttttcgcgtacgctcgcgcccgtggtcatcgcggtcatcgtcatctgtcccacgctgtattccgcgtttctttccgccattttgtccgtcgatccgaaactgcacgagatgagcaaagtgtacggggtaaaaaagcgggatatgctgttgaaactgtacgtgccgaacgtggcgcccgcgctctttgaaggcgcggcgggcgggttttctctcaatatcaaactcattatcgcggcggaggcgctcgcgagcacgcggttcagtctgggcgggctgatgcagaacgccaagatcaatctcgaaatggaaaaactgtttgccgtcaccgtagcggcgatcgtgctttccgtactctgcgagtggatcatacgtctgatcgggagggcaatcgtccgatggaaatgaaagatatcgtcctttgcggcgtaagcaaaaattacggcgaaacggccgtgtacgaaaatttcgatctcaccatccgcgcgggagagatcacctgtcttctgggcgcgtcgggctgcggcaaaacgacgcttttgaatatgctggcggggcttttgccatatacgggcgaaatcaggggcgtgcccgggcgcgtgtcgtatatttttcaggaagagcggcttttgcccaacctcaccgtgcggcagaatatcgattacgttttgggaaagcgttcgcaaaagaccgaagagatgctcgcccttgtggaactttcggacaaggcggacgtatatccttccgatctttcgggcgggcaggcgcagcgcgtttccatcgcgcgggcttttgcctatccgtcggaacttctcttgatggacgaaccgttttcctctctcgatacggcgctgaagatccgtctgacggaagttttctgcaaattgtgggaacgcgacaggcgaacggtcgtctttgtcacgcacgacgtggaggaagcgtatacgctcgcgcaccgcgccgttctcatacgcgcgggcaaagcggcggcggattttacctgcggcgaaaagataccgcgtccgtacggcgaaccttcgccgttcaaacaaaatattttgcaggcgatgctgcaaggctgagagcgggacttcccgctcttttttctttgcgcgcatagaattttgccgtttcgtcaatactgcgggtatggaaacacataacgctcccgcgcgcgtgcggcgcgatctggtcgcacgcgacgtcaaaaacatggtctttgtatttgcgctcgtctcttttttgggctggtgtacggaaatgctcgcctgctatcccttttcgggctggcaggacaggggctttctcacactgccgttctgcaccatttacggcacggccgcgctgttttattattacgcgttcggcttgccgcaagaaccgcgctttttcaaactgcgcgtctttcagggcaacggggcggcagcctttctgcgctacgcctattattttttcgtcaccgcgtttctggcggctgccctcgaatacgtcaccgcgctctttttcgattccgccttttccgtgcgcctgtggtattacgagcgctatgcgttcaatctttcgggttacgtcagcctcggcttttcgctgatatggggcgcgctgtccaccgtgttcatgcggttcgggttcgtgcccatgctgcgtttcgccgcgctcatgccttcgcgcgcgatcactgccgtcgtcgccgtcattatcgttgcattattggcggattatgccttcaattatatatatttggcgattcacggctatcgttttatgcttttttgattgtctaacggcttgaaaggtgctataataggtgcgatcgggaaaagggagggcggcttttgaaaactctgttcgtttcggatctggacggaacgctgcttacgagcgcggaaaatatttcgccgtacagtcttgaaaaactgaacgcgatgatcgacggcggtatgccgttcacctacgccaccgcccgctctttgaattccgcggcgaaagccgtgtgggggcttcggcagaatctgcccgtcattctgtacaacggcgccgtcatcatggagccgtcgggcggcagtatgctttacaataaccccttcaacgcgggtcagcgggaatacatacgctcgctccttcaaaagtacggcctttccccgctcgtctactcttttcagaaggggcgcgaactggtctcatgggagaggggacgcgaaacggagggaatgctgcgctatctcgcgcgccgccgcggcgacgcgcggctgcatcccgtggacagcgaaagcgcgctctatgagggcgatattttctattttacctgtatcgacgaaaaggcgcggctcgacggcttacagcagtcggtgcagacaagtctggatttgaagacgatcttcgagcaggaaacctaccgcaccgactggtggtgcgagatcatgcccgccgctacgtctaagggcaacgcggcgcgcgcgctcaaagagatcgcgggcgcggagcggctcgtcgtgttcggcgacggcgtcaacgacttttcgcttttcgaggcggcggacgagagttacgccgtgcagaacgccgacgataggctcaaagcgatggcgagcggcgtcatcgggttttccgaggaggacgcggtggcaaaatttttatcaacgtacgaaaaataaaattgtgaggtatgccttatgaaaaaagaaaagaaaaagagcactttctggaaagacttcaaagcgttcatctcgcgcggaaacatcgtcgacttagcggtcgcggtcgtcgtcggcgccgcgtttacggcgatcgtcaacagcgtcgtgaacgatgtgatcaagccgctgatcgcgctgctcgtcaacggcgatatgagcgaacttgtcgtcgtgctgcgcgccgcggtcatgaacgaggcgggcgaaatcgtcaaagaggcgatcacgctcaactacggcaatctgatcatggcgatcttgactttcctcatcgacgcgttcgtcatctttactgccatccgcatcgtgcgcaacgcgcagaagaaactcaaagagggcaccgaacttctcaaagaaaaactcgtcaaagaggaggaagacaccgctgtcgcagcggaagcggcacccgctgcggagtccgttcccgaacccgcgcctgcgcccgcgcccgtcgaagagaaactttcccccgacgcggtggcgctgctcgccgagatccgcgaccttttgaaagcggaaaaaaaccaaacggaaaataaataatttcccgcctttgataaagtcaagtgtttggcggcccgattgttaaaatttatcaccgaaaaaattcaaaataggggcgttaaacagtttttcaaaagaaaagtttatgatataatttatatatcgtttacaaatgctatgaggtaaagaaatatgtattcgcagattatttccgtcgggtatcgtaatttcccgtttgccctgtgcgttccgttcggaaagtgcaaaggcaaaatgtacccttatagcgccgaaacgggaatagtgcactcttgtgcccgaaatgcaaacagaattttcagatgaaaaaaacaggttccaagcgcagggcagaatgtgccgcgtttgcgagcctgttttttgatttttccctcaggtgaacacgaagatcccgctgcggaatatgctgaccaccgcgtaaacgttcaatacgatgaacagaggcaaaaggatcatcagaagaatgttgtcggtccggaatttggaaaacagcattgtcagaaacgcgccgagcgcgccgcctaagagagcggcgagcagcagttttccgtcgcggtatttgggcttgtccaacgcgccttccgccgcttttttttgctttcgcacgaacagaagggcaaaaaagttgatcgcggcaagatacacggcaaacaaaatgtagagcataaccattctcctttttaggggagtatgtgcaaaaatcgattatttcatacttggaggacagtagtatggcaaaagttgcgatattgatgggcagcaaatcggatttccccgtggtcagacccgcggcggaagccttgaaaaaattcggggtggaaacggaagtgcgcgtcatttccgcgcaccgcacgcccgacgaagcgcacgcgtttgccgaaaacgccgagaaaaacggcgtggaagttatcgtctgcgcggcgggaaaagcggcgcatctgggcggcgtcatcgcggcttacaccacgctccccgtcatcgggcttcccgtcaagacggatatgatgggcgggttggacagccttttgtccatcgtgcagatgccctcgggcattcccgtggctacggtaggcgtgaacggcggcgaaaacgcggggcttctggcgctcgagatcctcggcgtcaaatatcccgacatcgccagaaaactcaaagaattcaaggcgtccatggcgaataagatcaacgcggacgacaaggctttgcaggaagaactgaaaaatctttaaatcgttatcaattttcggaggatacataaaatggaaaaacgcgcgcaactctatgaaggaaaggccaaaaaggtctatgcaaccgacaatgccgacgtggtcatcgtcgactacaaggacgacgcgaccgctttcaacggcctcaaaaaagggaccatcgcgggtaagggcgtcatcaataacaagatgagcaacatgatgttcaagatcatggagagcaaggggatccccacccatctcgtagaggaactttccgaccgcgagaccgccgtcaaaaaggtggagatcgtgcctttggaagtcatcatccgcaataccgccgcgggcagtttctccaaacgcctcggcgtgcccgagggcaaaaaactccccgtcaccgttctggaattcagttataagaacgacgatctgggcgatcctttgatcaacgactatcacgcgctcgccatggaactcgccacacccgaagagatcgagaccatcaaaaacatggcgttcaaggtcaacgaggtcatgaaggagtttttcaagacgctcaatatcgatctgatcgatttcaagctggaattcggccgtttccacgggcagatcattcttgcggacgagatctcgcccgacacctgccgtttctgggatatgaccacgggtgaaaaactcgataaagaccgtttcagaagggatatgggcggcgtggaagacgcttacaaagaagtgttcgcccgccttacgggcaagtaattcgcggaggatcggcggatgtatttgagggacgggaaaaatccgttcgacagtatgaacgaagagtgcggcgtgttcggcgtgtacagtgcggagacgcgcgacgtcgcgcataccgtttactacgggctgtatgctttgcagcatcgggggcaggagagcggcggcatcgccgtcgcctatgccaataagatccaatactacaagggcatggggttgattcccgagatctttgcaaacggcaacctggacacgctgcccgaaggcgatatcgccatcgggcacgtgcgctattccaccacgggcgcgagccttttactgaacgcgcagcccatcgtattcacgggcaagtgcggcaaaatggcgctcgcgcacaacggaaacttaaccaacaccaaacaacttcgggaagaactcatcaacgacaacgccgtgtttcagacgaccatcgactccgaggtcatggcgctgctcatcaacaagaacagttacggcgatatcgtcaagggcgtgctcgccgcctgcaaccgtttcaagggatcctttgcgctcgtcgtcatgacggcggacaaactgatcgccgtgcgcgatccttacgggatccgcccgctcgtgatgggcaagaatctcgacgacgtcgtcatcgcgagcgaaacgtgcgcgctcgacgccgtgggcgccaattatgtgcgcgacgtcaggccgggcgaagttctggtcatcgattcctcgggcgagcattcgtattttctggaaggcgcgggcagaaagtgcgcctcctgtatcttcgaatacgtgtatttcgcgcgccccgacagcgttctggacggttgcagcgtgtacgaatcgagaaaagaggcagggcggctgctcgccaaatataaccccgtggacgcggatatcgtcagcggcgtacccgattcggcggtggtcgccgcgaggggctattcagaagcgacgggcattccctatgtggaaacgctcgccaaaaaccgctacgtgggcaggacgttcattcagcccgaccagtcgatgcgcgaaaacagcgtcagcgtcaagatgaacgcgctgcgcgccaacgtacagggcaagcgattgatcctcatcgacgattccatcgtgcgcggcacgaccagcaagaagatcgtgaagatgctgcgcgacgcgggcgcgaaagaagtacatatgatgatctgttcgcccgtcatcaagcacccgtgctatctgggcatcgatatgcagtcctattcgcaactgatcggcgcgaataagagcgtcgaggagatcgcggcgtatatcggcgcggattcgctgcggtatctgacggtggaacaactcaaagaaacggtaaagagcgcgaacgtacagttctgcacgggctgtttcgataaaaactatccttatccgatggacgattacgaggcggataaacataaattcgaataagcgaaggagaaaacgacatggcaatttcctataaagacagcggcgtagacgtcgagagaggctacaaggcggtcgaactgatgaaaaaacacgtaaaatccacctacgatgcgaacgtattgggcgatatcggttcgttcggcggattttattcgattacgggcgagaagatggaagagcccgtgctcgtggcgggcacggacggcgtgggtacaaaactcaagtacgccttcctcgcggataaacacgatactatcggcatcgacgcggtggcgatgtgcgtgaacgacatcgtctgccagggcgcgaagccgcttttcttcctcgattatttcgccacgggcaaactttcgcccgaaacggtggcgaccgtggtttcgggcattgcggaaggttgccgccaatccggctgcgcgctcatcggcggagaaacggcggaaatgcccggattttatcccgacggcgagtacgatatcgcgggctttgccgtgggcatcgtcgataaaaagaaagtcatcaacgggcagagcatcgagccgggcgacgcgctcatcggtatcgcgtccagcggcgtgcactccaacggttattcgctggtgcgcaaactgttcggcgacgaaaacaaagaggagttgacaaagtacgacgagcgcctcggcgacacgcccctcaacgtacttttgacgcctacgaaaatttacgtgaaaagcattttggatctcatttccaaagtacgcgtcaaggggatcgcgcacgtcacgggcggcggatttttcgaaaatattccccgcattttccccgaaggcatcggctgcgagatcgataaaaattcttacgaagtccctcccgtattccgcgtcatgcaggagcgcgcgggcatcaccgacgcgcagatctacaataccttcaatatgggcgtcggcatggtcgtctgcgtcgcgcaaaaggatgcgcaggaaaccgtcaaacttttaagcgcgagcggcgaaaaggcgttcgtgctcggcaagacggtcgcgggaaaaggagttacgctgctgtgaaaaaaatagcggtgttcgcgagcggttcgggcagcgattttcagtcggtcatcgacgaaaacgagcgcgagcctttctgcgcaatttcccttctcgtggcgtcgaaggagggcatctacgccttagaacgcgccaaagcgcacaatatcgaggcgatcgtccgcagcaaaaaggatttcccctccaacgaggaaatgttcgaagatatcatccgcgaactcaacgcgcggaatatcgactttgtggtgctggcgggctatctcaacatgatcgcggaaaatttcgtaaaggcgtttcccgacagaattattaacattcatccctcgcttatcccttccttttgcggcaaagggtattacgggctgaacgtgcaccgtgcggcgctcgaatacggcgttaaaatttctgggtgcaccgtgcatttcgtggacgaacattacgacagcggcgccattatattgcagcgctgtgtgcccgttctggaagacgacacgcccgaaatgttgcaggcgcgcgttttggaggaagagcaccgcgcccttcccgaggcggtgcggctcttaacgacgggaaaagtacgaaaagagggacgaaaggtcatcatacggaggtaaagaaagtggagagcgtatataagatcggcaatatcggagatttgatcaaggacaacagttatgtgggcaggggcgtcgtgatcggcgagagcgaaaacggcaaaaacgcggtgtttgcctatttcatcatggggcgcagcgaaaacagccgcaaccgcattttcaaggacaggggggaagaagtcaccatttatccctttgacgagagcaaagtggaggatccttcgctcatcatttattcgcccgtgcgccgcgcgggaaacagcgtcatcgtgaccaacggcgaccagacggatacggtgtacgattttctgatgaagggaaaaacgtttgaagaggcgctggaaacgcgctgcttcgaacccgacgcgcccaatttcaccccgcgtatcagcggcgtcctcgatttcaaggacaagggctttacctataaaatgagcattttaaagagcgcggacgagaagggaagcgcctgcaaccgctataccttttcttacagtccgctcgcgggcgtgggacattttatccacacctacaactgcgacggcaatccgattcccacctttacgggcgagcccgagcgcgtgaagatccccgacgatatcgaggagtttttctcggatctttggaacaatctgaacgaacagaacaaaatttcgctgtacgtgcgctataccgaccttgcaagcggcaagacgcaggcgaagatgatcaataaaaacaagtaaggagaaaagggcgatgaaagaattcgaacttaaatacgggtgcaatcccaatcagaaacctgcgaaaatctttatggcggacgggagcgatcttcccatcgagatcctgaacgggcggcccggctacatcaattttctggacgcgttcaacagttggcagttggtgaaagaaatcgaagaaaacgtcgggcaatgcgcggcgacttctttcaaacacgtgagccccaccagcgcggcgatcggaaaaaaattgtccgaaccgctgaaaaagtcctgctttgtagacgatgtcgaagggctggacgattcgcctctggcgtgcgcttacgcccgtgcccgcggcaccgaccgcatgtcctccttcggcgactgggtggcgctctccgacgagtgcgacgaagtgaccgcgaagatcatcgcccgcgaagtttccgacggagtcatcgcgccttcctattcccccaaagcgctggaaattttaaaagccaagcgcaaaggctcctacaatatcgtgaaaatcgacaaagattacaggcccgatcccgtcgagcgcaaacaggtattcggcgtgacgttcgaacaggggcgaaacgagtttaaaatcgacaaatcgctcctttccgatatcgtgacgaagaataaagaccttcccgaagaaaaggcggtcgatctgatcatcgccctcatcaccctcaaatatacgcagtccaattccgtgtgttttgcggcggacgggcaggcgatcggcgtgggcgcgggacagcagtcgcgcattcattgcacccgccttgcgggcagcaaagcagatctgtggcatttgcgccagcacgaaaaagtgctttccctgcaattcgcggacggcgtggggcggcccgataaaaacaatattatcgatatctatctctccgacgaagcggaagacgtgctcggcgacggcgtctggcaaaagtttttcaaagtgcgccccgaacccttcaccgcggaagaaaagaaagcctatctttccacgatcagcggcgtttctttgggcagcgacgcgttctttcccttctcggacaacatcgagcgcgcgagaaagagcggcgtttcctacatcgctcagccgggcggttcggtgcgcgacgatctcgtcatcgacgcgtgcgacaagtacggcatggtgatggcgttcaccaaaatgcgcctgttccatcactgatctctataaggagtgtctatgaacgttttgatcatcggaaatggcggaagagagcatgcgatcgcgcaggctctcaaaaaaagtccgcgcgtcgaaaaattatactgcatgaagggcaatgcgggcatcgcggagatcgcaaccttggtggacgtcgattattgcgacgtgaaagccgtgggcgattgggtggatgcgcatcccgagatcggctataccgtcattgcgcccgacgatccgctcgctctggggcttgcggacgagttggaaagccgcggacacagagtgttcgggccgaacaagcgcgctgccgaaatcgaatcgagcaaggcgtttgccaaggcgctcatgaaaaaatacggcattcccaccgcggcttacgaaactttcgaagattacaacgcggcgctcgcctacgtgcgcgcgggcaaattccccgtcgttttgaaagcggacgggctggcgctcggaaagggcgtgctcatctgcgaaaacctgcatgaagcggaggaaggcttgaaacagatcatgctcgacaaggcgttcggcgccgcgggcaatacgatcgtgatcgaagaatttttgcgcggcaaagaattcgagccgggcgaagaggtctccgtgctcacctttaccgacggcaaggccatcgttcccatggtcgccagttgcgaccacaagcgcgcctacgacggcgacaaggggctgaacacgggcggcatgggcacgttcacgccctgtcccttttacgacgcggcggcggaaaaagaagtcatggaaaacatccttctccccacgatgcgcgcgatgaacgcggaggggcggccgttcaaaggcgttctctacttcggtctgatgcgaacggacgaaggctataaagtggtcgaatacaacgcccgtttcggcgatcccgaaacgcaggtggttctgcccatgttaaagaccgaccttctcgatattttcgaggcggtgaccgacgagcggctgtccgaactgaaaatagaatgggaagagggcgcttgcgtgtgcgtggtgctcgcgagcggcggctatcccgaaaaatacgaaaagggcaaacaaatcgagatcggcgcgctagacgaaggaattctgctcgcccatgcgggcacgaaacgcgaaaacggcgttttaaaaaccaacggcggccgcgttctgggcgtgtgcgccaaaggaaacactgtggaagaggcgcgcgaaaaggcataccgcaacgtggaaaagatttccttcgagggcatgcactaccgcagggatatcggcgtgaaatacaacaaaaaagggtaaacgaagaaagatgatatacagaatttttgtggagaaaaaagaaaatctgcaagcgaaaaagacgcgcgcagacctggacgcgcagctcggcatcgcggtggaggatttccgcgagatcctccgttacgacgtggagggactctcgcaagaggaactgaaagaggcgatcgtcaacgtattttccgagccgcccgtcgataacgtatatcttgaaaatatggattgcggcgaggattacaaagtgttcgccgtcagttatctgaacgggcagtatgaccagagggcggacagcgccgcccagtgcgtgcaacttttaacgcgcaaggcgcgcccgttggtgcgctgcgcgcgcgtgtacgccgtcaagggcgtgaccgacgcggaacttgcgcgtatcaaaaaacatctcatcaaccccgtggagagcgaagaagtttccctcgacaagcccgaaacgctgcgccgcgccaaaatgcagacgcaggacgtcaaggagatcgcgggctttatcgacatgagcgtgaacgagatcgcgaactatcacacaaaatgcggtttcgccatgagtgtggaagatcttgttttcgtgcgcgattatttcaaaaaggaaggccgcaatcccaccgaaacggaagtcaaggtcatcgatacgtactggtcggaccattgccgccacacgactttcgcgacggagatcgagcgcgtggatattcattcggacaatccgcatatccgtaaagcctacgatttgtaccgcgatctgttcgaagaattcaacgcgaaacgcgaagataaatacccgtgcctgatggacatcgccaccatcgcggtgaaaaaactgaaaaaagagggacggctcgataatctggatgtttccgacgagatcaacgcctgctcgatctgcatcgatgcggagatcgacggcaaaaccgaaaaatatctcgtcatgttcaagaacgaaacgcataaccaccctacggaaatagagccgttcggcggcgcggcgacctgtctcggcggcgccatccgcgaccccttatcggggcgcacgtacgtgtatcaggcgatgcgcgtgacgggcgccgcggatcccaccgagagcatcgacaagacgctcaaaggcaaacttccccagcgcgtcatcacccgcacggcggcgggcggtttttcctcctacggcaaccagatcgggcttgccacgggcatcgtggacgaagtctatcacagcggctataaggcgaaacgtctggaaacgggctttgtcgtgggcggcgcgcggcgcgatatggtctaccgcgaaaaacccgcaacgggcgatatcgtcgttttattgggcggcgaaacgggacgcgacggctgcggcggcgcgacgggctcttccaaagcgcacgacgcgcgttcggtagagcagtgcggcgcggaagtgcagaagggcaaccctctcaccgaacgcaaattgcagcgcctgtttttagatcccgaagtcacgcgcaagatcaaaaagtgcaacgatttcggcgcgggcggcgtttccgtcgccatcggcgaacttgccgacgggctcgtgatcgacctcgacaaagtgcccttgaaatacgaagggctgtcgggcacggaactcgccatctccgaatcgcaggagcgcatggcggtggtcatcgccgaaaaggacaaagaagagtttatccgcctcgcggcgaaagaaaatctgacagccacacccgtcgccgtcgtcacggacgacaggcgcatgaaaatgctgttcaagggccgcgccatcgtggacatttcccgcgattttctcgataccaacggcgtaaagcaaatcatatccgccgagatcgacgacaacgcgacgcattatttcgatatccgtcaaaaagatttccgcgagggcgtgttaaagacgcttgccgatctgaacgtatgctccaagaaggggctttcggaaatgttcgattcgaccatcggcgcgcgcacggtctatatgccttacggtggcagatatcagctgacgcccgccatttccatggcggcgaagatctgcggcggcgaaacggacgttgccaccgtggcggcgtacggctactcgcccgaactgatgagcacttcgccctttacgggcgcgatctacagcatcgtgacttcggtggcgaaactcatcgcgagcggctgcgattacgacgagatccgcctcacgttccaggaatttttcatgcggctcaaccgcgatcccaagcgctggggcgtgcctttgagcgcgctgttgggcgcgctgtacgcgcagatacagttgggcttgggcgccatcggcggcaaggacagcatgagcggcaccttcgaaaatatcgacgttccgcccacgctcatttccttcgcgctcgcgcccgccaaggcgagcgggctcattaccaacgtgatcggaaaggcgggaatgaaactgtactggatccccatgcacaaggatttttccaaaattcccgactttgccgaactcgccgcaacttataaagaagtcacagccaatatccgcagcggcaatatccaattcgccacggtcgcggaaaacggcggcatcgcgtcggcgatcgtaaaatcctgcctcggcaacggattcggattcgttttcgaaggcgactgcgactgtattttgagcgaacattacggcgagatgatcgtggctctggaagatcccgaagcgttccgcggcacgaagatctacctcggcgaaacgtcggagcgcgacttcgtttacgataaggaaaaagtgacttcggaagaggcgcgcgcggctttttgcggcacgctggaaggcgtattccccaacaccgccaaggcggagggcagggcgcgcgactgcgatttcgactgcaagggcaaacgctatacgaatattgcgacgaaaaccgcaaaaccccgcgtctttatccccgtgttccccggcaccaactgcgagttagacaccgcgcgtaaattcgatcttgcgggcgcggaaagcgaaattttcgtcgtcaaaaaccgcacgagcgcggatatcgaggagagcgtgcaggcgatcgcgaaagccatttcccgcagcaatatcgtcgccttccccggcggcttttcgggcggcgacgagcccgacggcagcggcaaattcatcgcgaccacgttccgcaatccgttcatcgccgaacagatacaaaaattgctctccgagcgcgacggactgatcttaggcatctgcaacgggttccaggcgctcattaaattggggcttgtgccttacggcgagatccgtcccctgacgagcggcagtccgactttgacctacaacaccatttcccgccacgtttccacgctggtcgatatccgtgtggcgtccgataaatcgccgtggctgtccgcgtgcaaggtgggcgacgtgttcaccgttcccgtatcccacggcgagggccgcatcgtcgcgcctctcaaggaactggaacgcatgcgcgaaaacgggcagatcgccacgcagtactgcgacttgaacggcgcgcccaccatggaatatccctataactgcaacggctcggcatgggcgatcgagggcatcacctcgcccgacggcagggtgttcggcaaaatgggacacaccgagcgcacgggcgaaaacctctataaaaactgcggcggcaacttcgacatgaaactgttcgaaagcggcgtcaaatatttcaaatagtaaaaagagcggcgttactgccgctctttttgttaaaatatgataaacaaatagttgcttgctgtcatgtacaattcgcggttccccgtttaaaataaaagcaaaaagggggggactcgatgaaaaaaatatgcgcgctggctgcaacgctcgttctgtttgccgcgattttcgtcggcaatgcgcccgtcgaggccgcggcgtatgcgggattcgtggaaacgaatacatatctatccaaattgagcatggcgccgtcaattatcgcagaattgcgaaccgaagggcaggcggaaagttatgccgaactcgacccgaaaatgcgcccctcgaacgccgtcgtaacggtggacgacgaactcaacgtactggacgccggcgggaaagagatcggggatttttcgaccgtattcgaaacgctctcttcggaagggattctgaccgtcgtgcggctgaaaaaccgcgtgcaggcggacgcgctgtccgcgtggctgatcgaaacggacgagttcgacctcgcagcgatgtcgtccgatcccgccgtcgtgaaatatctgaaaaccaaagaaaaagatatacggggcattgccgattattccgcaaagacggcgcaggatctggatgccgccgccttggtcaaagaggcaaacgagaattactgcaacgcggtgctcttatcgcagggcgcggcgactgcggaaacggtggcgtttttccaggcgcgtttcaaagccgtgtggctcgccgccgattcggcggaggagttcaatttttaccgctgcgtttccagcggcgcctacggcatactttcggacggcgagccggaaactctgtatcattattacgacaattacaatatcaactccattccgcgcgcctatctcaatatcgcgcaccgcggcatgccttacggttatcccgaaaacactttggagggctgcatcgccgcctatgaggcgggcgcggacgccgtggagatcgatatgaaggtttccaaagacggcgaaattttcatactgcacgattccacgctcgagcgcacgaccgacggacaggggatcgcggaacatatgacgctggaacagttgcgtcaatataaagtgaccaaagactacaacggcgcggaaacgggcatggcgtacgatattcccacgctcgacgagtttttcgaatatttcaaaaagatcgacgactgcctcatcgtgtgcgagatcaagacgacggatcaaaatatcgtgcaactcttttccgacaaagtgaaggaatacggcatgtacggaaaagtcgtggcgatcgctttcggcatggatatgctggggctcatgaaggaaacggacgcgggcattcccaccgcctatctcaataaaatttcgcaggatgcggcggggccgcagttgcgcgcgctctgcgtcaacaacaccgccgtagacgcgcaatgcgatccgacgtatttctgggaaagaaatttaaaaaaccgcggattcgtcaacttttcctggacgtacgacgcgaacagcgttttaaacgccgtgcagatgggcgtgacgggcatcaccaacaacgtgcctgcggcagtcggcggctatcagaaacggattttgccgcgcgagggttacaccgtcgcaagcgcggcggcgctcgaaggcgcgtcatttcccgcggacgtggaattctgcgaccgcacgctggaagaaaaacaatgtgaagttttccgctatgaggtttcgggaaacgaggcgacggtgatcctcaaacacaaggcgaacaatttcgtcgtgtacagcgaaccagtgcgcgtgcggatccaaggcgcgcaggagcctgaaccgacccccgggccgaaacccgaacccgagccctcgaaaaacgggtgcggatcgcatcttgcggcgggagcggccgcgggcggtgcggctctgatcgtccttgcggcggtactgatccgcagtaaaagaacatgatcccactgaaattgccccctttgcaacggaaatactgcaaaggggattatttttgtaaaaataaactttacaaaatcgctatcttgtggtaaaataaatacatactactaattgtagggaggggatgacggcatgaaatgtatgtattgcggctataccgaaagcaaagtgatcgacagccgctcgaccgacgagggcagaacgatccgcagaaggcgcgaatgcatgcagtgcggcaagcgctttacgacgtatgaaaccatagaaacgacgcccgtgctcgtcgtaaaaaacgggggcaaccgccaggcgttcgatcccaacaagatcaaaaacggtatcatcaaagcgtgcgaaaagcgccccgtttccatgtacaagatcgaaaaactggtagaggatatcaaaaagcagatctataattctctcgaacaggagatcacttccaaacagatcggcgaaatggtgatggaaggactgcggcagatcgacgaggtcgcctacgtgcgctacgcgtccgtgtaccgctcgtttacggatatctcttcttttatgagcgaacttgaaacgctgatgcaggaaggcaagatcaaaaagaccgaccgtaaagacgaggagtaaaaaaggccctgacgggcttttttttatataaaatgcgatgaaaaaaattgtgaacgtcggttccgccgtcttaggcgacggaacaataaagatccagtctatgactaccacgccgacgtgcgacgcggaaaagaccgccgcgcagatcggaagactcgccgcggcgggctgcgagatcgtgcgcgtcgccgtgcgcgacgaagcggacgcgcgcgccattcggacgatccgcgataaaatatcgctgccgctcgtggcggacatccacttttcggcaaaactcgcggtgctcgccgtagagaacggcgcggacaaagtccgcgtcaatcccggcaatatcggcggcgaaaatcagttgagatcggtcgcggattgtctgcgcgcccatcacgttcccgtgcgcgtaggcgccaatacgggaagccttgaaaaggaacattatcaaaaatacggaaagagcgcgaaagcgctcgtcgaaagcgcgctcgggaatgtcgccgcgtttgaaa

SEQ ID NO: 3054 - DNA, 13792 bp, Unknown
  16S sequences of unknown bacteria
tctctatacgtaaacagttatttaaaaatgtgaaatgattgaggtgatactctatgtacatagacacacacacgcatctgcaccaccgtcgctttgataaagaccggaagcaggtactggagcagatggaggctgtcggtatccaggtgtttcttgaggtggcgatggatctggaatcaaatgcgattatgcgggagaagctgagggaagcgccgatgcaggtaagatttacggcgggggtagagaaattgccggaaaaaccggatgaggtattacaacagattgctgcgtatctgaaagatgaaaatacggtagcggtcgggagaggtcggcctggattattgccgggcggatcagacagaaattcaggcgctacagcgagtgtggttccatcgctttatcgagttagctaggacagagaagctaccgcttgtgctgcatatccgggatgcacatgaggatgcactgcagattttgcgggagcacgggagtgagcactgtggcgtggtacattgttttcagggcagctgggcggaagcagagcagtatttgaagctggggctgtatatcgggcttggcggattgattacaagagaagataaggaactggaggcagtcgcccggaagcttccaccggagcgcatcctgctcgagacagatagcccctatgtgacaccaaagccgaagaagggaagaaatacgcctgctaatattccggagatcgctgaacggttggcagacataaggaagacttcggtagaagaaattattatggtaacggcagagaatgcgaagcgattgtttggaatgtagaggtagaacatgacaaatgattattttcggaaaggttcatggaaatcgaagtgaaaatcaggattggaaagcgagagtgagatagatgagggttttggtaattccggatgtacatctgaagcctcagatgtttcggcaggcggcagcctttatgagagcggggaaagccaagcgggcggtatgtctgatggatatcccggatgactgggacagagaatacgatattgcatgctatgaagaaacctatgatgaggcaatccggtttgctgtggagtttccggataccgcatggtgctatggcaaccatgatctgagttacttctggcattgtccggagagcggatacagctcggtggcatctgaaacagtgcagagaaagctgctggagctgcggcggaaggttccggaagacaatccgatttgttatgtacagaagatagatcatgtactgttttctcacggaggcgtgttgaactattttgtcgaggaatatgttccaaagtcgaaatatcatgatgtagatgcagtagtgaaagaaattaacaagcttggtcggaccgaaatgtggaatgatatgtcaccgatctggctgcgcccgcagcattccggtatgagattatataagccacggaagatattgcaggtggtgggacatacgccgatggatgagatcacacgggaaaagaatctgatcagtacggatgtattttccacgtaccgggacggcagggcaattggaactcaggagtttttattgctggatacagagacgtgggagtatattggaatcaaaagcttataaagagtaaaacggattgcgaatagctgattgacttaagcaatgtcataatttgcaaatgtaatgacacgatttgtttcattttaacccattccatattaaactactggaaagggggaattgaaatgaatgaaaaacgtaaaaagcagtatcgggagcttggcctgatgattgcctattaccggaaattacgcggcatcacacagatccagcttgccgaatatattaatgtcagccgtacacacatcagcaatcttgaggcgccgaacatgcctacgtccatttcattggatcggctgtttgatatagcagatgcactggaagttcccattagttgcttttttgagtttcgtgaaaaatagaatactgtgttcatgggcatgcggcgaaggtggattgcgaatatccgctttaccacaggccatggagcgacgagaatggaagaggaatggcatggattcacacctcttctattttttatacatatattggatgtaccatagcggtttatatatcggataaatgaggtaataatatagaaaatatcgagtccagcttttcttcttcggttgtgttttttctataattatgctatgatacgatgcagaaacctaaggatgcgcaggaggagaaagatggaactggaaagagaggagacgacggtctctaagaattttatagagcagattattgagaaggacctcgcagaaggacattgcaagacggtgtgtacccgttttccgccggagccgaatggatatcttcatatcggtcatgcgaagtccattcttttgaactacggactggcaaaggagtataacggaaagtttaatctgcgttttgatgatacgaacccgacaaaggaaaaatcagagttcgtagagtccatcattgcggatgtaaagtggcttggtgcagattttgaggatcggctgttctttgcgtccaactatttcgaccagatgtatgaggcagcgatcaagctgatcaagaaaggaaaggcatttgtctgtgatctttctgcggatgagatccgggagtatcgcggcacactgacggagccgggtaaggagagcccgtaccgcaaccgttcgatcgaggagaatctggagctgttcgagaatatgaagaacggcatgtatgaggacgggacgaaggtgcttcgcgcaaagattgatatggcttctccgaatatgaacatgcgtgatccggtcatttatcgtgtggcacggattcaccatcacaataccggtgacaagtggtgtatttacccgatgtacgactttgcacacccgatcgaggatgcgattgagggcgtgacgcactccatctgtacgctggagttcgaggatcaccgtccgctctatgactgggtcgttcgggagctggagtatccgatgccgccgaagcagatcgagtttgcaaaaatgtacctgaccaacgtggtgaccggtaagcgttacattaagcgtctggtcgaggatggtatcgtagatggctgggatgatccgcggctcgtttcgatcgcagcgcttcgccgccgtggtttcacgccggagtcaatccagaagtttgtagagctctgcggtgtcagcaagagcaacagttctgtcgattatgcgatgctggagtattgtatccgtgaagatctgaagctgaagcgcccgcgtatgatggcggtgctggatccggtgaagctgatcattgacaactatccggaggatcagatggaagagcttgatgtggagatgaatctggagaatccggagcttggaatgaagaaggtaccgtttggccgagagctgtatatcgaccgcgaggactttatggagaatccgccgaagaagtatttccgtctcttcccgggcaatgaggtacgtctgatgggagcatactttgtaaaatgtgtggacttcaagaaggatgcagacggaaatgtgacggagatccactgcacctacgatccggagacaaagtgcggaagcggctttacgggacggaaggtgaaaggaacgatccactgggtagcagcaaagactgcggttccggtcgaggtacgtctgtatgagaatattatcgacgaggagaagggcgtatacaatgcggatggctcactgaacctgaatccgaattcacttacggttctgaagaactgctacgtggagcctgcgctgaaggatgcgaagccatatgacagcttccagtttgtacgtcagggcttcttctgtgtagatgcgaaggattcgaaggaagatgcacttgtatttaaccgcatcgtatctctgaagagttccttcaagctgccgaagaatgactaatgccaaagaggatccgggatgaatgaactgaccatcagtctggacgggacatcatctgttccactgtatgaacagatttataaatatatcaagtcagatattcaaaatggagggctgccttttcagagaaggctgccctctaccagaaagctggcaaaatatctgcaggtcagccggacgacggtggacctggcctatgaacagctcgtgtcggaggggtatattgaagccattccgtgcaggggctattttgtgtgtaatctggaaggactgtatcgcttaaagacaaagcagccgcaaaaggagacaccggccaggcaggagcaggagcggtatctgtatgatttctcgccctacggggttgatctccacagctttccgcaaaacgcatggaggaagctttcaaaggaagtgcttctggaagaggaacgctccttgtttcagcttggcgacccgcagggggagctgcagctgcggtgcagcattgccgcttatctgcaccaggcacgggctgtagaggctgatccggagcagatcgtggtcggagcgggaaatgattttctgctgcttttgctgtgcagtttgtttgggacgggccagacgatcgcaatggagagcccgacgtacaagaaggcatacgacctgttccgtaatctttcgaatcaggtgcggatcgtcgagatggatgagttggggatgcgggtagacctgctggagcagacggatgccagggtcgcgtatgtcatgccatcgcatcagtttccgcttgggaaggtcatgccggtcggtcggcggatgcagctgctcgcatgggcggcggcaaaagaaggccggtatatcatcgaggatgactatgacagtgaattccggtacaaggggaagccgattccggcgctgcagggctatgatcgtgcagagcgggtcatttacatcggtacattttcgaagtcgatcgcgccggcgatccgcgtcagctatctggtgctgccaaagtcactgctggcgctgtaccgggagcgtgggcgggtcatttccagtacggtctcgcgtgtggatcagcgtattatcgcaggctttctggatggcggctattatgagcggcatctgaataaaatgcgtgccgtctacaaggcgcgccatgacgtgcttctggaggagctgaaggcgttccgcatgatctgcagggtgagcggggagcatgcgggggtacatcttctgctgacgtttaccgatgggagagacgaggcagaggcgatccgtcaggcagcacagcagggtgtacgggtctatggtctgtcgcgctattatgtcggtgatgcgaccgggaaggcatccgcgacggtgattctcggatatgcgaatctgactgaggaagcgatccgggaagccgtggagcggttgcggagggcatggctggataaggccggagaataagagagatatatgatgaaaacagcattttttgatggaattaccgagtttatttttgtggagaatcagccgcagaaggcagacgtgatcttccttccgggtggtgcatatccggaggcggcactttatgcggcgaagctgtatcaggaatgttatgcgccgctggtgctgccgtccggaaaatacagtatcatgaaggggtgctttgaactgtcgccacaagaagctgaaaagacgccgtatgccgcagagggctgccggacagagtgggaatatctgtcgcggattctacagcacagcggtgtgccgcgcagggcgatcttgcgggaggaccgtgcgacgtacacgtatgaaaatgcgatttattccagggcagcactggatgcggcggggatcacagtgaaaaaggcgattctttgctgccaggcgtttcatgcgagacgggcacttatgtactatcaggagcagtttccggagactgagattctggtgtgtcccatcgtgacacggggaatttcaggaacgacctggatgaagacgaaggcaggaattgacatcgtgctcggagaagtggagcgatgcggtggacaatttcatgagattttgaggaggtatgcggatgattaagcttgttgtgacggacattgacggcacattgctgccggagggaaccgatcatctgaatccggagctgtttgaagtgatccgggcgttgaagaaaaatggaattcagtttgcggttggaagcggacgccagtatatgagcatgcgctatctgtttcagccggtgcttgacgatgtgatttttatcgcggagaatggttcgaacgtgatgtgtcagggaaaaaatctctcgagcagttttatggatccaaagcaggcaaaagcagtggtacggtacctgcggaccttagatggctgtacgacggtgctctccgtaccggagtgcatgtatgtggaacagaaaaatgagcaggtgattgcactgctggaaaatggttatcacaatgaggtgcgtatcgttccggatctgttgcctttgtgtgagcatacgaataagctgtgtgtctactgcaatgccggaagtggagtctacgagaaggcactgacggaacgatttggcaaagacctgaatacgatggtatccggtgacaaatgggttgactttatgaatcgcagtgcagacaaaggaaatgcgctccgggaagtgcagcagatgctcggtgtgacaccggaggagacaatggcattcggggataattgcaatgacatcgggatgctgcagcgtgcaggcgagagctatgcagtcgcaaatgcacacccggaggtgaaaaagacagtgaaatacatcgctccggccaatacggaggatggcgtactgcagacggtgaaggagcggctgcttggtggaataaaataaattcaaaggagaaaattatggtttataagaaagaatacctggaagcatttttaaaaaatcagtctcagctgtttgatgagccggtggcagagacactggaggaagcggatgcatttctggatgactgcatggcggtcgtcgcagacagctttaaggatgtcaaagactattttgaggaaaacggaatggatacggcaggcctcacaaaagcggagctgctcgaagaatctgaggtgtttgcgcttccggatggaaaatacctgattgtcgagggataggtgtgatggaaaatttgattttcagcctgaatgccacggttccggtctttttgatgatggtgatcggtatggtgctgcgcagaatcggatgggtcgatgaggactttgcatcaaaggcgaataaattcgtattccggcttccgctgccgttccttttgttttcggatctggcgacggtggattttacagaggtctgggatctgaaatttgtcctgttctgcttcctggcgacactggcgagtattgcgatctcggcgggcgtgtcacagctgttttcggatcggtcgatccgaggagaattcatacaggtctcgtatcgaagcagcgctgcacttcttggtattgcgctgatccagaatatttatggcagcgcagggatggccccgctgatgattcttgcgagcgtaccgctttacaatgtgatggcggtgaccgtcctgtccctgtatcggacgggtgatccggagagcagcagtgcgatgatgaagcgtaccttaaagggaatcgcgacaaatccgatcattcttggcatcgtatttggtatggcatggtcagtgcttcggcttccgctgccgcgcattctcgataaaacggtcagcagtatcggagcgatggcgacgccgctcggactcattgcgatgggcgcgacctttgaccttcataaggcacttggcaaggtgaagccggcggtgctggcttcctttatcaagttgatcgggttctgtgcagtctttctgccgatcgcggcggcgcttggctttcgtcaggagaaactgatcgcgatcctgatcatgctcggctctgcgacgactgtgagctgttatgtcatggcgaaaaatatggggcatgaggggacactgacctccagtgtcgtcatgatcacgacgcttgggagcggatttacgatcacagcgtggctgtatgtgctgcgttcgcttgggatggtgtaaagaataaaaatccgacatacgggaatacttctgtcaggagaacggacagaaaggagcccatatgtcggattttttaaagcaacaaaaacaaaaggaatacaatgagtatgtcaaacaggtgacacccacgcatagccttgccgcaaatatggcaaaggcatttctgaccgggggtgtgatttgcgtcgtgggacaggggattttgaatgcctgcaaaggactggggatggatcaggaggcggccggaagctggacatcgatgctgctcgtgctgctcagcgtccttctgaccggatggaacctgtaccagaagctggcaaaattcggcggggccggaacacttgtcccgatcaccggatttgcgaattctgtcgcggccccggcgatcgagtataagaaggaaggacaggtgttcggaatcggctgcaagatttttacgattgcaggaccggtcatcctgtacggaattttctcaagctgggtgcttggagtaatatactgggtattacagacctgtattccaaaataatattgatgagattggggtcaaaaggtgttttgagccatatgatacacggattgcttcgcatttcatgctctcgcaatcctaaaacacctcaaatccgctgaatgttcagctcatgcagcttcagcccggaatgtgagaaaaataccttcagataatgtgtcgttccgcgtacctccttgtcacgggataaggtgaccggagccgtgcttcctccgtgataggagtaggtgtggagcacggtgccgtcgaggttcagcgtgacggccatctgagcatgctcagatgcttcggtggaagcagacagagagaagcgataggtgccttcctgctcaaacgtcagggcaagtacgaagaatgtaccggcatcggtcgggtattcggcaagtggaatgacggtatcagtgcctatcttgtgtgcagtcatgcttccgagatcctcagaagaaaattcagccgggcggtttttctgctcaaccggagtatcgcatctggtgagcgcggcaaatgccggggattccatcaggaaccgacagatattttccgcactgcgggtcagctcggcacgcgtcagtctgccgtctgcgagtgcgtcggtcaggttatcctcgtaagcagtggtatctggtgtcaccataaagacatcattctgggcgcgtaccatagctgcaatattctgcggactcggagcttctccctcctcgttcatctttgcccaccagtcggtcatgaccatgccggtgtatccccactcattgcggagaatcgaagtgttcaggtcatagtttccggcggtccagatgccgttgaccgggttgtagctcgtcataatggagcggacatagccggaacggacacagagctcaaacggcttcaggtagatctcacgcagagcacgctcggagacaacgctgtctgccgtgtggcggctcatttcctgattgttgcagcagaaatgctttaaggtgccgctgaccccggcatgatacatgccttcggcctgtgcgaccgccatcattccggtgagatacgggtcttcggagtggtattcgaagtttcgtccgttcagcggattgcggtgaatattgatgccgggtccgagcagtgtgtcgatgtggttgctgtgcagctccataccttcaaaagtgaaaagctcttttacaagcgcaagattgaaggtgctcgcaagcaacgtaccattcggaaggctgaaagcggtcgcgccgcagtccatgcggattccggaaggaccgtcagagcagcagccggccgggatgccgaagtgctgcagatgctctgtgatgccgccaaatgcagcagcggttccaggggtgacctttggactgcacataccctcgccatgtacgatatgcttcaggtcctcatctgtaagctgtgcaagaaaatgggcatagtccgcgtgtccatcctttacatcggaaagctgtatgccggtatcgccggtataaggcagacaggccggaagggatgcagcgcgcttgtccatcggattgatcgtgcgtgtcgggacagggacgtaagaaaccctgtacggatggtcggttccgaagccggcagaagcagtatccggcattgcggcaaccggcttcatacgcgaaaactcctttaccggagccatgcattctgtcaatgcttcggttacgagcgtttcggcaatgaaaaagcttccgaccggtgccgcgcttcgcacatcgcatccggcatacagcgtataagtaccggcttcaagcacgaaacaggacttgtgaccggtgactccgctgtcatcataggaggcaagtgcggactttggtatggtaagctcgagcgtttctgtgcacccgggctgcagtgtcccggtctttgcaaaggcacagagcacgcgggatggttttccgagcagtccctgcggcgcttcggcgtagacctgaacgacttcttttccggcagtggtaccggtatttgtgatggcggcggtgaccgtcagatgatccggagcttctgacattgcatgctgtgcagaaaaggtcgtgtaggacagtccaaacccgaacggatagcgcacccggtcttttgcaaaagtctcaaaatagcggtagccgacgtagatatcctcggcgtagaagttctccttagtcgaaccgaaattccggctggatggataatcggagtaatcaaaggcgattgtatcagtcagtcttccggacggagagaggccgcaaaggatgtcggcggcgccgcagccgccctccatgccgccctgccatacatagaggacggaagacggctggtagtcgtcaacccagctcatatccatgatatttccgacattcagtacgacgacagtgcgggagaaagcggcacatactattttcagcattttccgttctgcctgtgtcagatagtagctgccctcctgcaatgtgttgtcacggtcttcgccggcggtgcgtccgagaatgatcagcgccagatccgaatgtgctgcggcatctgccacaaatgcatccgaaagcggcatctcttcctgacaccacggttcggttccccagccgtttccgcggtcgaacgggtgctcctttgtccagcgcctgtattcggtcagcaccggctcatagatctgaatttccttatgctcccgcagcccgtccagaatcgaatggacgtaagggacatttaccatgcctccggagcctgtgccgctcttgtagtagtccagctgaatgcggccaaagaccgataccgtctcgccggggcggatcggtaatgcctgtttttcgttgcgaagcaggacacagccctcagcggcggcatttcgcgcggcgcggctgtattccttccagtccagtatattgttcataaaatcctcctcatacattttgttgaaaattaagatttgtcatctatgtatagacagtttgacaaacaaatagcgaagccaggatgtgtcaaattattcagatacgcttttattcagatatatcctcgtccgactccaccggaacctgcgtgcggatcgggattccgtttacttcgacggaatcgtcagccgggattacgaagtatggacgtccgttcagcatgcgcgtttcgatcaggtcagcccggtccggctttacctgaatcacgatatccggtgttttgatttcaaatttgcgcatgtttacgacattggagacgaggattggcgtttctttttctccgccggtcgcctgctcaaattcctcatcgaaatgttcgagtgcttcgtcagctgctccgttgtcgtagagcagtcgcttgacatcatctttttccagaatgatcggctccggatcatccttgcgctcctcgagcagtgtatttaaggtctcgtggatcgccttgacgctctcataggtacagtcggtgagcagtgtgtcagcgacgagtgtattgaaggtctccttctgggaggaggcgctcatcggaagctcacagccaaagagctggcgggcaaaatccggatggagctcattggcatttttcgagtagtagagcaggttgtggatatcggtgttgcggtctgtaaaggccggaaacaggaatccgctcaccggcatttccacgaaccagtcgcgaatgcgttcgctgatgctgttcgtctcctcatggtaggacagtcccggctttgtcagctttaccggacagattgcacagaggacgaagttgtagacgtcttcggaggcatcgaccatttcaagattatcactgccttttttcggaatgtcataagcgccgtggacgaggatgatgaagtagttttccgggtatgggaaaagctcgatgatcttgtcatagagctcgtcgagcagttcgtcgtccttcagctcactgtcacgaagcttaagcagaaattcctgcgtgccgccctctgcttcttcagcgagcggaaattccatcgtgagcagattctttccgacggtgccggagagggattttttcagaatatcaaaatatttgaacatttcttcatccgagagggagagaaatgcttccttcatgttcatttttttgttcttttcgccgtctacatagcagccgcagatccgggtgaacgggcagcgatccggtgtgaagaggcgtttgatttcagcaatttcttttttattcataggtggatcctttcgtttatcgcaggtttgaaaacctgacggagtattctcatgttttgcaggtcaataagtcatgctttttcatgcaagcatgaaacgcatgaccttttgccccttgtatcatcattatataacaatcgcaggaattaagtactgcgcaatcccatagagcacaagcagatgcaccggatagaaccagtagaagaagtatttcatctgccgtccgcgcgtcccgttatacaggaaaatcggaatcgcggcgatcggtgcgggcatttcccaggctacggagacggcacagccgatacactgcacgaagcgctcacggcgcagcaggtaaaggactgcgatcaggaacacacccttgtaattgtaatcggtgtcgatccagaaggcggtgtacatcccggcgatgagtacgagcggccacagccagtgcagaaggcggtgcgatgattccaggaaaaagcgcaagccgatgagcacgaggagaccgatgagtaaggtgaagtagacattctgcttttccggaaaataccagcttccctttaaggcaaggtcaaatgggatttcggagatcagagaaaataaaaaaagccgtctggcatagcgccatacattgcgtgtatggagaaaaccttccacgatcagaaaacagaagatcggaaatgcaatccggccgacggaacgggagattttgtaaatttcactccagagccggctctggctgacactggatgagatcacaggcgattgccagagtgtgcggatgatggtcgcgcccgcatgatcgatcagcatggaaagaattgcgatcagctttaacgtgctcccggagatgccgggaaaaagagaagcattggtctgttgcataccattacaggcacagcgagatgagcatgctcgcaggtgccggactcctttctgtacgggcttgttttgcatagcttatgcccctttgaacaggatacgcattttcacaggtgttgtcaagaagagaagaggagggggagtttgcagatattgcggaaatacaaagtgaaaaagtccatattacaagttgaacgcagataagcattcccccgcttcaagtgcgcggagcactaagcggcgggtgagggggg

SEQ ID NO: 3055 - DNA, 32759 bp, Unknown
  16S sequences of unknown bacteria
ttttcaatctctcagtcagctaacgctgacagctctctttaccaaagagagccggagtcgcagtctgctctgattgttgttttataccggaaaatttgtttagactatttgccaaacagtaagcggtttcgtaatattgtaacaacaaaaagactgcttgccgcctttcggcggtttgcagccttagttataaaatgtatttgacaaagccaaatttattcaaaatgagccataccggcaaaccaattatccggaataagtctgcttatgtatcccgcaaccgcaagtcttacataaatatcaacaatgccgcttgccacattttgcaaaaggctttccaaatccggggtaaggggcaaaattgccaaaaggaaataaacccccaaaagcggtaaaaataccctgaaaaatgtacccagagcaaagccgatgtaatccaaaatgccgccgttcatatacgccatagagcctttaaaatagtaggccgtagggtagtttggatttgtaacatacaaataccaaataggtataaacataagcattacaatggagccgcctaaaataacaatcagggaaataaccgcagtgaaaagcgagaacgcaaacaatgttgcgatggcatttattaaaaagttaaaggcaaacataacaagcattattgaaatagctttgcttattgtgtctttgtatgtaaaaatcaaatatgtatcatgtatatccggtgtgcctctgttgtatgcacgcaggtaaaaacaagccatgctccgctgtaaaaatgtatctacaactgatgaaacaagggcagaaaatataccgttgttaatatcgattaacaaatatgaaataatgctgtatgccgcagcaaccgcaacaaaagtctgccagttgcttttaaaaatttgcatacttctctctctgatccgattgttcataatcattcctcctttttttctcattttatcattatccgaagcggatttcaatacagtcataaaattttaacaaaattataataatatcccgttgaatttaaccgtaacagttgataaaattcataaaagaatgtataattaactgtgtatttattttagctaaaacggagaaatatgaagaattataacatttccggcagtattgtggtttataacaaaccggaggacgccgtaaaaacagtagaaagcgtaattgcaaataccggcgataatttttcgctttatgtgattgacaataacagccgggacaaaatcaacgatattttaaggggacgctttaatcggaactatattgatttagatgaaaatataggcttcggcaaggcacacaacaaggttttgccccttgtaaattcaaagtatcattttgtgataaacccggatattttgataaacaaagacacaatagatgccttgtgtgactttatggacagccatccggaggctgccattgcctgccctaaggttttaaatccggacggcagtgtgcaatatatagccaaaaataggccgtctttaatggcgctggtttcccgccgtgtccatattaaatgccttaaaaaaattgaggacgattaccttatgcgaaacgccgaccaaaacaccgcctttgaagttgacttttgcacaggttgcttttttgtgataagaaccgatgtgtttaagaaaataggcggttttgacccggattactttctgtatttcgaggatgccgacataaccatgaaggcaaagcaagagggcaaggcttactatgccccctgtggaacggtgacgcatttctggcacagggagacacggcacagcaaaaaacaattttttatacagcttaaatctatgttcatctactttaaaaaatggggatttaagtttaaatagctactaaataggagataaaaatgaaaggtataattttagcaggcggacggggaacaagactttatccccttacaatggtaacatctaagcagcttttgccggtttacgacaagcctatgatttactatccgctttcaactcttatgcttgcaggcattaaggatattcttataatttccaccccacgggacacaccgagatttgaggctcttttgggagacggctcccacttcggcataaatcttacatacaaggttcagccttcaccagacggccttgcacaggcctttattttgggtgaggaatttatcggcgatgaagcctgtgccatgattttgggggataacatcttctacggcaacggcttttcacagattttgaaagatgccgcaaaaaattccgaaaagggcagggctacggttttcggctatcatgtggaagacccacagcgctttggcatcgttgagtttgacaaggacggcaaggttatttccgttgaagaaaaacctgaaaatccaaagagcaactacgcaattacaggtctttatttctacgataaggatgttgttgaatatgcaaagcaggttaagccctctgcaaggggagagcttgaaatcacaactctcaatgacatctatctgcaaaaaggcagacttgatgtaaagcttttgggcaggggctttgcatggcttgacacaggcacaatggacagccttgtggacgctgcggattttgtccgtatggttgaaaaaagacagggaattaaaatttccgcccctgaggaaattgcatataaaaacggctggataaccaaagaagaacttttggaaagcgccaaaaagtacggcaaatccccttacggtcaacacctttaccgtgttgcagaggacgctgtcagatattaaggagtttgggtatgaaaattttagttaccggtgcaaaaggaatgctgggcagacaggttgtagaggatcttgaaagaggctataccgaaataggccgggttccggaagaagtgaaaaatgccgaggtaatcggcacggattcacagacattggacatcaccgataaaaataaaacaaatttgtttgtgggagaagtaagcccggatgtaatcataaactgtgccgcttacacaaatgttgacggctgcgaaaccgacggtgaaagcgcctacaaggttaacgccttgggggtgagaaatttggcaatggcggcggaaaaagtaggggcaaagctcattcatatttccaccgattatgttttcagcggtacgggcaatacccctaaaagagagtacgacaccgttcggccggcgtcggtttacggcaagacaaagtacgagggtgaagtttttgcaaggcagtattgcaagagactgtttattgtgcgtacatcttggctttacggttatcggggcaaaaactttgtaaaaaccatgctgtggcttgccaaggaaaaaggcggtgcgtcggttgtaaatgaccagataggcaaccctacaaatgcggcggatttatcacatcatcttataaaactctgcgcaagcgaggaatacggcgtttaccattgcacaggcaagggcgagtgttcttggtttgaatttgcaagagaaattgtcagacttgggggatttgaccctgaacttatacagccctgtaccacaggggaatacgccgaaaagttttcggttcccaccaaaaggccggagtattcttcccttgacaatatgatgttgagaatgaccgtaggggacgaaatgcgcccctggcagctggctcttgaaagctattttaaaaatcggaaataaacagtaaacggagattatatatgaaaaaatatcttgtaaccggcggcgccggatttatcggttcaaactttgttatgtacatgcttaaaaagcatgaggatattcagatagtaaaccttgataagcttacatatgccggcaacctggaaaacttaaagtcaatagagggcgacgaaagacatatttttgtgcagggtgatatctgtgacagagagtttgtaacggctctttttgacaagtatgattttgactatgttattaactttgccgccgaaagccatgttgacagaagtattactaaccctgaaatttttgttgaaacaaatgtcatgggtacggtaaaccttttgcagtgtgcaaaaaatgcctggtatgacggacaaagcaaggtatggaaagccggcaaaaaatatttgcaggtttccaccgatgaggtttacggcgcattgggcaaggagggctactttacggaaacaacaccccttaaccctcacagcccttattccgcatcaaaggcaagtgccgatatgtatgtacaggctttcagagatacttacggtatgccggtgaacatcacaagatgttccaacaactacggcccctatcagttcccggaaaagcttattcctcttatgataaacaacgcaaaaagccacaagcggctgcctgtttacggagacggaatgcagattcgtgactggctttatgttgaggatcactgcaaggctattgatatggtttgcacaggtggtaagttgggtgaagtttacaatgtaggcggacacaacgaaaagccgaatatctttattgttaagacaattatttctcagcttcacgacagacttaaagaccggggtatatccgaggaacttatcaagcatgttgaggacagactgggtcacgacagaagatacggtatcgacccggaaaagataaagagagacctgggctggtacccggaaacaccgtttgaaaagggaatagttctcactattgactggtaccttgccaatgaagaatggatgaaaaatgtaacctccggcgactaccagaaatactatcgggaaatgtacaaaaacaaacagtaaaattaagtgataaaataagctcccctgccggggagctttctttttaataaatatcaaattttatcggcttcaagctttttgtagagctttgctttgatttcgtcgctgcaaaatgccgcatcaactgcgttgagtgtgcattggcgcagctgccgatccgtaacgccgatacatttaagcatgtagtgttcgttgcaaatatttgttcttgaaaacatcatgttgtcgctgtttaaagtaacctttgcacctgccgcaataagctgtcttatagggtgtgcggcgtagtttctgccggcgccgcagttggaagttacgcaaacttcaagaggaatctgtttgtcaacaacctctttaagccattcttctttctgtacgcagtttacaccgtggccgattctccatgcacccatctttattgccataggcatatgagcgccttcgcccatttcgcctgcgtggattgtgtaaggaataccgtattctctgcacttttcaaagagaggtgcgtagagcataaagtcgccgttgttttcatagccggcaaggtccatacctacaagacctttgcccaaaaattcacggctccgttcaatggcttcaaagttcaagtccatatttgcaaaggcattttcgcccttgtgcataaggcagttgataagacctatgtcaatgttcgggaaatccttttttgctctttccatacccttgataagagcccggattgaatctttctggctgagacctctgagcatatgctgctgtgaggcatagcggatttccgcatagtacagaccaagctcatcaagctgttttataaggttgtatatggattcttccaggtcctcggctgtctgcattacggcgcaggtgagatcgaattttttaaagccctcttcggtgtggtgtattgtaggggcgtgaatcatattataatattcttcaaatgtggtttcccgtggaataacatctctttcgatggactttttatatgcccatggtaagtcgagagagccgtctaagtgaagatgaagttctattcttgcgtttttcataaaattctccttttaaaacaacctgaaatttaaaacatgacactactatatcattatatgtagtcttttgtaaagccccaaaattctttttaattttaaagttttgttataaaaatacggagaggttaaagcctctccgcagaatgttatattattttgcaaattgcttgataatgcctattaccacatttacgcatttttccatattttcttcggttatgcactcatatctgccgtgagcgttcataccgcctgtgcccaggttagggcaaggcaagcccatatagcaaagtcttgcgccgtctgtgccgcctcttacggcctcgcttacaggttcgccgccaagctctcttattgcgttttcggcgtaggttacaacctcaaagtgaggcaaaattttctctttcatgttgcggtactgttcgctcatggtcagaacacatctgccctcgccgtatttggcgttgataaattccgcaatcaatttcattgtagcctgtttttcctcaatcttctcggcatcatggtcacgaagaatgtattcaaggcgtgtgtgctcggtgctgcctatggtttcgataaggtgatagaagccttcaaatccacaggtgtattccggcttttctgcctttggcaaaagattgttaaattcaaatgccatatactggctgtttatcatcttgttttttgcggagcccgggtggattgagtaaccgtaaaaatccacgaaagcctgtactgcgttaaagttttcgtaggaaattccgttccagtcaccgccgtcaacggtgtaagccagatctgcgccgaaaccgtctacgtcaaatttatcaacgccgtggccgatttcttcatccggtgtgaatgcgattgcgatttttccgtgggggattttttcctctataactctttccacagcctgcataatttcggcaataccggctttgtcatcggcacccagaagagttgtgccgtcggttgtgataagtttttgacctttcagctcttttaaagccgggaagtcccgtacagagagaacatggccggagcctttgagcagaacatctccgccgtcgtaattttcgataatctggggtttaacgccaaagccgttaaattccggtgcggtgtccatgtgagagataaagcccacaggctgtttgccctcgtatcccggtgtggcaggcaaaatgccgtaaattgtgccgtctttgatatgtacgttttcaagcccaagggcattcatctcctcttcaagacatttggcaacattaagctgaatgtcgcttgaaggaatttttccgcttttcgggtcggagggtgaatcaatttgaatgtactttaaaaatcttgacagtgtactcataactataaaaccatcctttttatcggcaatttcatgccgtattttaatttattgtttccataataccataaacttgtgacaaataacagcgcaaaagggggaattgttacaaaatattcgcaaaaattgttataattttttaaacaaacatatattttactttaattatgggaaaaaatatgttaaaataaagcagttaaactgaaaataatgatagtatcatttttaaggagaatatatatgcggagtatttttcggggcaaaacccttttgatcacaggcggtacaggttctttcggccacacggttttgaaacactttttaactaccgatataggcgaaatcaggattttttcaagagatgaaaaaaagcaggacgatatgcgccatgaattgcaggcacagtaccctgcggaaagccaaaaggttaagttttatatcggcgatgtgagagatataaacagcgttgacgtggctatgaccggcgttgactatatttttcatgcggctgcgttaaagcaggtaccctcttgcgaatttttccctattgaagctgttaaaacaaatgttctcggcaccgagaatgtgcttaccagcgccattaaccatggggtgcaccgtgtggtttgtctttctaccgacaaggccgcttacccgataaacgcaatgggtatttcaaaggcaatgatggaaaaggttatcgttgcaaaatccagacaggttgaccctgaaaaaaccacaatttgttgtacaagatacggcaatgttatgtgttcaagaggcagtgttatcccccttttccgtgaacagattgccgcaggtaaccctataacaatcaccgacccggatatgacaagatttttaatgaaccttgacgaggccgttgaccttgttgtgttcgcctttacaaacggacaggcaggggatctctttgttcagaagtcacctgcatgtacaatcggcgacttggcaaaggccacacagcggctgttcggcgatacaggcacaaagattataggcccacgccacggcgaaaaactttacgaaactcttttgacagaagaggaaagtgccaaggcgatagatatgggcggttattaccgtgtgccggcagataaccgtgacttgaactatgataagtactttattgagggcaacacagaaaagcctacgctgcaccagtacaccagccacaacaccgaaagacttgatattcggggtactattgcaaagatgaaaacaaccgattacatcaaagaagaacttgcgaaaatcaagacagaacaataattttatcggggtaatatatgaatattttagttaccggggcaaatggttttgtgggtaaaaacctgtgccgggctttggaaaatataaaggaaaacaaggacagaacccacccgggtttgcaaatagacgaaatttacaaatatgatttatccactccggcggaaaagttggaggaattttgccaaaaggccgactttgtctttaatcttgcaggggttaacagaccgaaaaacaacgatgaatttatgcggggcaatttcggctttgcaagcaccttgcttgaaactcttaaaaaatacggcaataaggcaccggttatgatatcttcttccatacaggccacattgataggcaggtatgcaaattccgactacggcaagtcaaaattgcggggagaagaacttgtgtttgactacggcaggaaaaacggcgtaaaggttcttgtttacagatttgccaaccttttcggcaagtggtgcagacccaactacaacagcgccgttgcgacattctgcaacaactacgcaaatgatttgcctatacaggtaaatgatgcctccacacagttggaacttgtgtatatcgacgatttaattgatgaaatgataatggctttacagggcggcgagcatcactgtgaatttgacggcaccgaggccgtggcaaaagaggacggcagatattgctatgtgcctgtttctcacaatgttacattgggagaaattgtctctcttttagacgagtttaaggcacagcccaaaaccttgcttatgcctaaaatccccgcaggctcctttgccaaaaagctgtattccacatatctttcatacctgccaaaagaaaaggcaatattcgatttgaagatgaacagcgacgacagaggctcatttactgaacttatgaaaaccgcagactgcggacaattttccgtaaatatatccaaaccgggtataacaaaagggcaacattggcacaacacaaagtgggaatattttattgtggttgccggccacggtcttattcaggagagaaaaatcggtcttgacgaaaatggccggccttacccggttatcgaatttgaagtaaccggcgacaaaatacaggcggtgcggatgcttccgggctatacccacaacataataaatctttcggacagtgaaaatcttgttacggtaatgtgggctaacgagagctttgacccctctaagccggacacattctttacagaggtataaaaatggcaaaacttaaacttatgacgattatcggcacaaggccggagattatccgcctttccgccgttataaaaaaatgcgacgaatattttgaccaaattttggttcacaccggtcaaaactatgactatgaactgaatcaggtcttctttgacgatctgggcttgcgtgagccgaatttttatcttgatgcggtaggcggcgacctgggcgaaacaataggcaacatcattgccaaaagctatcggcttatggtaaaggaacagccggacgccctgcttattttaggggacaccaactcctgcctttccgccataagcgcaaagagattgcacattcctattttccatatggaggccggcaacagatgctttgacgagtgcctgccggaggagacaaacagaagaattgtcgaccatatcgcagatgtgaatatgtgctattccgaacacgcaagaagatatttaaacagcgagggcaccgcaaaggagagaacatatgttacaggctctcccatggcagaagttcttcatcggaatttggaaaaaatagaaagctcggatattctcacaagattgggtcttgaaaaaggcagatatattttgctgtccgcccacagggaagaaaacatagacaccgagaagaattttacaagccttatgaacgccgtaaacgccatggcggaaaaatacaatatgcctattttgtactcttgccatccaagaagcgcaaagtatatcgaaaaacgaggttttgtttttgacccgagagttaaacagcacaagcccttgggcttccacgattacaataatttgcagatgaacgcctttgcggtggtttccgacagcggcacgctgcctgaggaatcgagcttctttttgtcggtaggtcacccgttcccggcggtttgcatacgcacatccaccgaaaggccggaggccttggacaagggtaactttatccttgcgggcataaccgaagaacaggttttacaggctgtggacaccgcagttgaaatgaacaaaaacggcgactggggcatacctgtgccgaattacacagatgaaaatgtttcggtaaaagttgtaaaacttatacagagctacaccggcgttgtaaacaaaatggtgtggagaaaatattgattttaggaaatttgttttgaaaaagaaaattttgattatcagccaacatttttggccggaaaactttcgcataagcgatatagccacaggatttgcggaaaatgacatagatgcagatgtaatctgcggcatacccaattaccctaacggcatagtgccggagggctatgggtttttcaaaaacaaaaagcaaaattacaacggcgtaaatgtttatcgcacatgggaaataaccaggaaaggcaattccaatatcagaatcttcttaaactatatttcctatccgttcttcggcttttttaaggttttgggttttttaggcaaaaaatatgacgctgtgttctgctatgaaaccagcccggtttatatgatttttcccgggattgtctattcaaaattgaaaaaagtgccgctgaccacatacgttctcgacctttggccggaaaatttgtactcggtgctgaatattcaaaataaatttttccgtaaaatcgcaagttccaccagtcggtggcattacaaaaaatgcgacaaactcattgcaatgtccccctcattaaaggaaaagctaaaagaggtaacaggcaaaagcgaggataaaattgcggttataccccaatactgtgaggaattttacgaacaggatattgaggacgagccattaaaagaaaagtacaagggatttttcaaaatcgtgtacgccggcaacataagcccggcgcagaatttacagtgcgccgttgacagcgccgccatgcttaaaagggacggcataaaagacattaagtttattattgtgggagacggtatgtcaaaggcggatatcgaaaaatatgccgatgaaaagggcgtccgtgaatattttgactttttgggctcaaagccggttacggatatgccgatttatcacactttggcagatgctcttcttgcaccacttgcaaaaagcgatgatatcggccttaccattccacggaaagtcacaagttatatggcaggcggaaagcctgttttaacctgtatggacggcgagggcagtctggttatacaaaaggccaaggcaggtcttaccgcagcggcgggggacagccgaacattgtacgaaaatataaaaaaattaaaagccatgccacggcgggaaagagaacaacttggggcaaatgcccgcagttatcactttgcaaaccacagccgaaaaaaagttttggcacagcttattgattttatcttaaattaaaggagtttcccctttgaaagttttggtaataattccctgctacaatgagcaggaaagtattgaaagagtaatcgaaaatttaaaggcaaacgcaccctttgcagactaccttatagtaaacgattgctccacagataaaacactcagaattttacaggcaaacggtatgaactatatcaataatcctgtaaacctgggaataggcggcggcgttcaagccggatatttatacgccagagaaaacggatatgatgtagccgtgcaaatggacggtgacggtcagcatgaccctaagtatcttgaaaaggtatgcgccccggttatagacggcacatatgatatgtgcataggctcaagatttattgaaaaagagggctttcagtcttcttttatgcgccgtttgggtataaacattatatcctttatgataaaactgtttacaggcaaaaagatttacgatgtaacaagcggttatcgtgcctgcaataaagagctcatcaacttttttgcagataactatgcagacgactacccggaaccggaagccataataacatctgttttaagcggctttaaagtgggagaagtgccggttgttatggtggaacgccagggcggaacatcaagcatacgcagtttaaaaagcgcctattacatgataaaggtttgccttgccttgatggttgaccgtataaaagtgagaaaggcaggtaagtgattatgctaagcgaaatgcgtttgcaataccttttgattataggcactgttgtgcttttcgggttgattatcggccttatcagaagagataaaattgaggtaaaatatgcgattatttggctggcattcagtcttgtaatgatattgttttctctctttccacagattgtttttatactgggcgatatcacaagggtaattaaccctgtaaactttgtatttcttacacaaataatatttattctattgattttgctgtcggtttcggcggtaatttcgggtttttcaaaaaaaataaaaaggctggcacagtctaatgcccttttggaaaagagagttcgtcggcttgaagaaaaaattgaggaactcacaaaagaaagcaaataaaaacggctaaggtggtagtaatttaaaatgcggtttaattcggtacattttttaatatttttcccaatcgttgtattgggatactttgtcgtacctaaaaaaattaaaaatttatggcttttaatcgcaagttactacttttatatgtcatggaagccggtctatgctctgcttatatttttcagcacgctaagcacgtatttgcggggcttggcaatagataaaagcaaaagtaaagccggtgcaaaggctgttttgacggtaaatattataataaatattgccatattgttctattttaaatattttaacttttttattgaaataatcatatctcttgtgccggggctgcaactgcaacagaataacaacctccttgcggttgttggcatatctttttacacattccagtctcttgggtattcgatagatgtgtatcgcaaaaaggtgccggcggaaaaaaactttttgacctatgcactttttgtgtctttttttccacagcttgttgcagggcctatcgagcgcagtgaaaatcttttaccgcagcttaaaaagacatataaatttgattatggccgtgttaccgacggccttgtgcttatggcttggggcttttttaaaaaaatggtcattgccgacggatgcggcaaaatcgttgatattgtgtttaacaatatttcctcttatggcggcttgcagtttatgatagccgctgtgctgtttgcttttcagatttacggtgatttttccggatattccgatatagccataggtgcggctaatgtaatcggtatcaaacttatgaaaaactttgaccacccgtattttgcacaaaaccctgtggatttttggcgcaggtggcacatttcattatccggttggtttatggactatatatatattccgctgggcggatcacgcaagggtaagctgcgtacggcctttaacttaatggttacatttttagtaagcggcttatggcatggggcaaatttaacttatgtggtctggggtggaatcaacggcctttacaacataatttaccgctttatgccaaagcccaagaataaaattaagcggcttgcacccttgaaaattttaggtacatttttacttgtggatttttcttggatatttttccgtgcggcaaatctttccgatgccatgtacatagtaaaaagtcttggcggggtaattcccggtttgcttacaaaaggcgcattgactgcccggcttgaaagtgtatctttcttttcaaataacggtgttgcccttgtttgttgtttattgtttatgctggctgtggaaatgtgggaaaataaatcttcaatagttaaaaagataaataatgtcaaatggcctgttcgttgggtgttttactatgcggttgtgttgttgattttgttttttggcaatttcggccaaagccggtttatatatttccaattttgaggtttgaactaaggtgaaatttttaaagttaattgcaaaattatcgctttttctcccgatttttggggcgatggtgtttgcgtcatatcgtgttgacccatccggtttattttggggtcggggttttgaaagattagccagcgagtatatgctaaacggagagtatgttgccggttacgaacgccttgacggccgaaagctgaacgaaacatacgccatgaacagggaagattgcccggatgtacttgttttgggatcttccagggttatgcttattgacgaaagttatgtgaaacccggaatgacattttacaatatgggtaatgtgggggcggatatatgcgatttatacggcagttattggtcctttgccaagttgggcaaagagcctaagacaatactcataggtatagatccgtggttgttcttggattgcgccagtgcccttgacgaccgcagcgataaagagttgtacaacgaatttatagccgaagaattaggctataccaataatcagtacgaaaagaaaagcccttatgaaaaatatttggcattgttggagccaagttatttccaggccagtgtaaaacttgctttaaacggttccggtgatgtaaagccggaaatcgtgcctaaaagcgagatttacaatcaaaacgaggtcgtaaaatgccctgacggctcgattatctatgacaaaaaattcaacagtcttacgcctgagcaggtaaaagccgttgcggaggagagctctgtgtacggtatacccaaggtttgcgaatacgacacaataagccgggatacggtggaaaaatttgaaagatttattcaatacctacaaaataagggtattaaaattattttctttttgtcgccctttcactcatcatatatagattatttaaataatgcaggtgaaagatatcggtctgtttgggaaacagaggatattgtccgcaatttgggcgaaaagtacggcattgaggtgtacggcagttatgacggaaaaaactgtgatatatccgacagatattttatggatggaatacatatgaacaaaaacggcttgcgaaaagttttgccgttgattgaatgataaaaggagataaaaaatatgccacagattattgttaaaggtgttaaatcacgggaaatgccgaaaatggccgtggagtgttccgcaaaattggcggatatatgccaatgcccacaggactggtttgtttttgaccatatcaattccgatttttatgatatgaatgggaaaacagagcattggccggttgttcaggtttggtggtttgaacgcccacaggaaatgcaggacgaagttgccaagtgccttaacaactatgtaaaggccataggttaccggggcagtcaaataagtttccatattttcgggtattcttcatattatgaggatggagaacactattaaaaaatcaaaagtccgccgaaaggcggactttaattatacattattttataaatgcgcttgcaattttgtaaattataaatgcccatataaaaacaataggcagagcgtagaaaaatttttcgtttccgccggattttactatcccgtcgctttgctccaaacactgtgaaaaaatttctttcggcacaagtttaaccgaaagccaaatcaaaaacggcaaaataagtaaatcgtccaaatatcccaaaacaggtacaaaatccggtattaaatcaatgggtgaaagggcgtaacccaccgccataaggcaggcaagttttgcgtataacggggtgtcatcgtgcctcatggctataaaaagagcgcctatatttttatttatgttccgggctttatcttttatatttgacattatgtgtcctcgtttacagttattttgctacattttatcacaagctcaggcacttttccacattttatcgctattttgttgaaaattttatttttatgccgtataattgccttaaaaaggagaggcgtgccgttatggaaaagaaagacaacgaatatttaagagaaaaacttttaaagatgggcgaaaataccacattaagagagatacaagaatatattgacgaaatggtaaatatccgaggttggcaaaacgaaaccccacaggacgcaatgttgctgttgacggaggaaataggggaacttgcaaaagaggttcgcaagtcttgtacccatattcaaaatgatgtgaataaaaacagaaccgacgatttaaacggtgaggcggcagatgtatttttgatggttcttgcactgtgccgcaccttggatattgatttgttgcaggcttttaaagaaaaagaacttataaactgcaacagaaaatggggttagaatactattgttttataaagcaaaaataccacgccgtagcgtggtatttttaactatctgtattcgattttactttcaataggttcaaaattcggtatgctgttgcagtagtcgctcttttttatccaggcgtattcgtagtccacacgctcatcatcaaataccgtcatgtggtccggggcaatgtttttaaatgatactaattttttacctgtaattacaaaatagtaatcaccccgccgaccgtatatgcctataaaatgaccttcgtcattgtacaaatctatttctttaagtgacttatcagctgtgttaaaaacataatatttactttcataagtattatcgttatatgtgtaaataaaaaggttgtcgtctaccggtttggctaccaaacttactctggttacttcatcgccaaatgaaacaagacttgttgttgtatcttcggttatactgtattctttaatgcttttatcatcgcatacaacatatagtttatcattcatagtcattgtataaccttcatcggttattttgtaaaattcggatgtggaaatattcaaaccataaatacatatgttaggtttgccatctatcttttcaacacacttgataaccaacacatcatcataagcagatattatccctgcataagtaacggtggtaaattcataaaaaggggaaagtatacctgttttttcgtcataagtatataaccagtatctgtaagaaatatcgttgtcattatatgtaaatattgttgtggcaaaatacaatttgtcatttcccgcagcgaatgcaccaccttcgttaaaaatcatattagcaggtagttctatactgtttaccattccgccggttaattctcgttgctccaaaaaagacggaaattctaactcttctgaggattttgcctgtctgccacatcctaatacatacagatatttatccgatttcattatgctcaaaccacatgaacttgattttatatagcttgggtcggattcattatcgtgttttgaacccaagtccgatgataaaaatacacgctgttttgattgcaaatcattaaataaaatatttgcatcgccggatgcccattgtattatttcataacagccggtaggggcattggcataattctgggaatacagcccggacggagaggacagtgtccttaaattcatattgttttggtcaacatcattgccgccggttaccgaacacgaattaaaaagcaaaccaaacattgccaaacaggataacagaatggttttgtgcaaaaattttatcataaatacctccttatatcggtttttaaactgtaaattatctttattttacaataccattttagtaagaaaaaaacaatatgacaaaacacacaaatattttttacaaaaatctaaataaaaaatctttacgccttgacctaaatatgtttagagtatataatataaataatatcaattatcgcttttttgggaggaaaagatgaataactcagaaaaaacaatggaaaaaattatagccctgtgtaaagacagaggttttgtatatccgggcagtgaaatttacggcggccttgccaacacttgggactacggccctttgggtgttgaatttaaaaacaatgtcaaagccgcttggagaaagaaatttatccaggaaagcccatacaatgtaggccttgacgccgctattcttatgaacccggaaacttgggttgcctcaggccatgtaggcggtttctcagatccgcttatggactgtaaggattgtaagtcacgccaccgtgcagacaagctgattgaagaaacaggcgttgagtgcgcaggttggtcaaacaaacagatgtatgactacatcgttgaacaccacattaaatgccctgtttgcggcggcgaaaactttaccgaaatccgtcagtttaaccttatgtttaaaacataccagggtgtaacagaggattcaaagaacgaaatttatctccgtccggaaacagcccagggtattttcgtaaacttctctaacattcagagaacaacaagaagaaagttgcctttcggcgtaggccagataggtaagagtttcagaaacgaaatcacaccgggtaactttacattcagaacaagagaatttgagcagatggagcttgaattctttatcaagccgggcacaaatatggaatggttcaattattggcgtgcatactgccgtgacttccttttgagccttggtatgaaagaagaaaatatgcgtttgcgtgaccactcaaaagaggaactttctcactactcatcagccacaacggatattgagtatttgttcccattcggttggggcgaactttggggcattgccgacagaggcaacttcgaccttacacagcattcaaatcactgcggtaagcctatcgaatactttgaccctgagacaaacgaaaaatatattcctcatgttattgaaccgtcacttggtgcagaccgtgttgctcttgcacttcttgtggaggcctatgacgaagaaaagatagacgacaaggacactcgtgttgttttgcacctgcaccctgcacttgctccttacaaggctgcaattttgccgttgtctaagaaactttccgacaaggcaacagaagtttatcacgctttgcagaaagactttatggttgactttgacgatgcaggttcaatcggcaagcgttaccgccgtcaggataacatcggtacacctatctgtatcacatacgatttcgacagtgaaacagacggctgtgtaaccgttcgtgaccgtgacacaatggaacaggaaagaattaagattgaagatttgaaagattatatcgcaaagaaaattgaattctaattttacttttgtataacagtcaaatatgcaataaaaacgaggcacattgtgtctcgtttttttaataataaaatacagaaaaaagatttaattttcacaaaaattatataaattttgccataaaatccttttaaaaccttgtttattcacatttttataactgttatggtttataataatcacctaatgttcacatagaaaagaaatagagaaaatatatgaagaaaatattaagacttgttttttcaaaaagatttttagtagcgataactgcggttattcagcttgccattatgtacattctttgtacaaaattatacggtttaggcggcggaatttatattgctgttacgtttatcggcttgctttgtatgctgtatcttttggaaaacgacaatataaaccctacgtacaagttgttttggatgcttataatgctttttttgccggtgtccggcgtagcgttgtatcttttgtacggcagaaccatacttatcggtgcttataagtcaaatttaatttcaagttttgacaggtacaaaaaagaattaaagccgaacaaagaagtttgcgacgagataaccgccatggacaaggaccttggcaaacaggcaacatatctgcaacaaattgcctgtgcgccgccttttaaagatacccgggcaaagtattattctatgggtgcggatttattccacgattatttgcaggacattaaaaaggcgaaaaaaagtatatttatacaatactttataatcgacgaaggctttttgtgggatcaaattcttgaaattctcaaagaaaaggtaaaaaacggcgttgatgtccgcatcatttatgatgctttcggctgtatgataacattgccggcagactatgataaaattcttgaaagctacggcataaaagcctgtatttttaacgatttgaaattcagccgtcatttaggcgattaccttatgtttaatcatcgtgaccacaggaaaatcacggttatagattctaacataggctacggcggtggtgtaaaccttgcggatgaatacgcaaatattattgagagattcggcgtttggaaagataccggtttccgcttggagggtcaaggggtttggagcatgacctgtacatttttacaaaactgggaagcttgcagcggaaaaacaacaaattatgattgctttcacccgacggtttcaatgccgtcggacaccatagttcagcactatcatgatgtgcctatggacaggtacaatataagcgaaaatgtatatttgactataataaacaatgcaaataattatgtgtatatggctacgccatacctggttatagataacgaaattttaactgctttgaccctggcggcggaaagcggaatagatgtgcgccttatagtaccgggcataccggacaagtggtatgtttattatgtaacccaaagttactacaaggtgcttatggaggcaggagttaaaatctacgagtacacaccgggctttattcacgccaaaatgtttgtaagcgatgacaatgtggcggttgtcggcagtgcaaatatggactatcgttcattgcacctgcattttgaaaactgttgcagtttttacggcggtaaaattgtgggggatgtaaaatctgattttcaggatatgttttcttactgccacttggtaaccgaagaagatgtaaacagcgtaaaattgtataagagggtaatgcaaattgccctgcgtattttaggtcctatgatgtaaaataataataaatttaaaaattccggccttttaggtcggattttttgtgggataatttcggttgttttaaatatacattttgttataaaataatattttttgtctaattgtagaatttttaaaggggtttatttgaaaaatttagataaaaagtgacggatgaattgcattggattgaaataaatcgaaaaaactttacttttcttgtgaataagggtataattttgaaccgtggcgaatagctgctattgaatttataggagagaaaaatgaatactaaaaagaaattttacggtacatggattatcgtttccgccttttttataatgggcggtgccgtcggcgttgcatggaactgtaactcgctgtttgttaaggccatttgcgaggatacgggttttgcccgttcacaggttgtttttcttacaacaatctgctccgccgttacaatgattatgagccttttcataagcaaaatttataaggcagtaagcccgattaaagtcatgcgcattgcggcaataattttgccgatagcatattgtgcaatcagtttttgcaaacggttgcctcagttttaccgggtacaggttgttgttgctctgtgcatattttttaccgcaaatattccgctgtcaattataatcggcaactggtacaaaacaggccttggaactgctcttggaatttcctttatgggttctggacttgtgggcatggtttttaactcacttgtaggccgtcttttgcctatttacggttggcgctttacataccgtattcttgcggtgagcattgcggttctggttataccttttgttttgtttgtacttaaagaaacaccggaagctatggggcttaaagctatgggcgccggcgaaagcgcaacaggtgaggcggttaaagaagaagtttggggtcctaccgccgcagaagcaatgaagtcatcctcatttattctggtttgtattgccatgtttatgtgtatggttgcccttaattcacaaattcaagctgtttctccccgtcttaccgacttgggttacagtgttgccacagcgtcaaatatctctgctttgggtcttggctctttggcaataggtaaaattttgcttggcaaaatgtacgataaaatgacggttagaaatgctacctgtttggctgttttcttgggctgtcttgcgattttaggcgaggccttggcaaagtacccggctatggttgcacttatcgtaatcggtgagggtatcagctgtgcaatgggtacggtaggtatgcctgtttttgtaaaaggtttgtacggcaaccgtgactacaatgccatttacggcaaaattatggccatcggtaacgcaggcggtgtgctgggtccgttattcttaaacgcaatgtatgacaaaactggaagttacgatattgccctttgggtttgttttgcttttgacgttatcgcccttgtaatttttgcaaagattttaggcaaaaagaaagattgattttagatttattatagaaaatacgcaccctgaaaattcggggtgcgtaattttttgtgcgattttatcttataaagtgggttcttatcggcgcttctttttccggcaaaccgtatttttctttgccgagctctatgctcttcataaggaatgtcatattccttgccaatatgcgcattacctgtaagccctcttcgtcctgttccgcctggccgggggtcataccgtgaatactgttccaataccggcttgaagccaccggcataccgcttatggtaaagtatttgtttaattcgtcaaatgttgccgaacagcctccacgccttgcacacacaacacttgcgccgactttcatggtcttgtcaaaatgggtgctgtaaaaaagtctgtcaaggcaggcaataagtgttgcgtttgctgaggcataataaaccggggtagccacaacaaggccgtcggcggcctcaaatttcggggcaagctcgtttacaatatcattaaaaacgcacttgccggttttgccgcaactgttgcaggctatgcaaccacgcacatctttgttgccgatttgcacagtttcaacttccacattcaatgatttaaaaaccttttccatctcggccacggcgatagatgtgttgccctctttgcggggactgccgttaataattaaaactttcataattttaccctccctatataacctgattttattatatattttaaatgtgataaagtcaatttgttcggtttgcggcaaatcatttctcataaaaggtaaaatttcacaaataaaaataagaaggctttatcccgcatttcggtataaagccttctgttttagccaaaaatttctttgtagatcgcctgtcccgcaggtgttgtggctatgccgcccatagcggtttcacgcagttgaggaggcaacattttgcccaccttaaacatactgtccacaacctggtcaaagggaatgtgagcaacctgacctgccaatgccatatctgccgaaataagagcgtttacggcaccggaggcatttctctgtgcgcagggcagtgcaacaaggcctgcaaccgggtcgcatacaagccccattatatttatcatggcaaagcctgccgcatcaaggcacttgtcatcgtccgcccccatcatataggctgccgccgctgcggccatgctccgtgcaacaccgcactctgcctggcatccgccgtcggcacctgccactgtggcgtttttggtgtaaattgcacctaccgcagaggctgtaatcaaaccttcaagggttttctgtcttgaaatattctttgcctggctcaatcctaaaagtaccgccggcacaataccgcagctgcctgccgtagggctggcgcaaattttacccatagaggcatttacctcgctgcatgagtaagcgagagacataacatagtttatataccggccgctgatattttccttttttgaatagtcgtactgtgtttttgccacgccgtctataaggccgcccttggtggcttgctttgcgtttaacgccttttgcgccgagtgaaacataatttccaatctgtcgtcaaaacggctgagaatatcttcatatgaagaagatgtaagtttcatttcgttttcaacggctatttgccaaatgcgcttattttgctctttgcactggctcataagttcgcttgcgtctttgtacatcttttaatccccctttatatttataacggttgcagaaataacgttgttaattcttgtaagaccttttataacatggtcgggaattatatcgtcgcactctattacacaatatgccaaatcgccacggcttgtccttgaaaccttcataacgccgatgtttatgtcattaaaggcaagcaatgtacttacatcgctgacaacgccctttacatcgtgctgctgaacaataaccgtaggacttgtggcgtttacctcacaagttaagccgtttatgctggttatcaaaattctgccgcctccaaggctggcgccctctacaaaatagcgctcgtcaccgtttataaatgtgattcttgcggtattttcatatggtgagggtatatcgtctaccgggtagaattcaaaccggatattttgttctttggcaatctcaaagctgtgggcaaggttttcatcgtcctccttcattcccaaagcaccggcaacaagggcaaaatccgtaaaatgccctctgtatgtctttgcaaaagaaccgccgagaccgaactcaaccttgttaaagtctttgccgtatataagtcgggcggttcttgcaagctttgccgcaccccgtgtgtgtgacgacgacggcccaatcataaccggcccaacaacatcaaaaagactgatgttcatagcgcacctccgataatggtttatatatataatattttaccatataattttgtataatcaaatatgcgaaataacaaaataaaatttaattttacatacacattgccgatattgtgcatgtattggaaaacaatgtaaaatttatgtaaaatataggtgattatacattgatattgcttaaattttacttgtgatttacaaacaaatatattaaaatatatttcgaatggtaacatgccataaaatatgaaatacaaacgggggaactttacaggctatgcctattgaaaagaaaaaagaatttctaattaactgcgcctattatggcatttggactgccgttattttttttgcggtaaggtttgcttttaaatatcttttgccttttatagtggcgtattttgttgcacttatgcttcacaagcctataaaatttataagcgaaaaaaccaagatagcctataaaatttcttcaataatatgtataggttgtttttacgcagttgcggtgacggcaatttttatgatggggtatcagctgcggattttagtgaagaatgtattttttattcttcctcaattttacacggaaacttttttgcctatggttgaaaattgggtgagccgactttaccagcggtttgcctttgcggatcctcaatggcagccggctattgatcggctggcggaaagcgcagacaccgccttacagaatatttccgtgacggttatatccaagctgtcctccgtaacaacgagtttaccgtctgtttttgcaggaattatcatagctgtggttgcatccttttttatctctcgggactatgagaatataattgcttttgtaaaaagcaagatgccttcaaaactcaagggagttgcaggtggtgtggcggaaagcggtgtttccaccgctaaggcgtatctaaggtcttatgcccttataatgttcataacattctgcgaattgtctgtgggatttttacttttgagagtaaaaatgggcattgtaattgcttttgccacagcagtgtttgatattttgccggtgttggggctgggggctattctgtggccttggcggatatactcctttgccgttggcaacacagccttcggtgcggggctggttataatgtactgtataatcaccgttgtccgcaatataatcgaacctaaaattgtatccggccgtgtgggattgccaccggtggttacattggcggctatgttctgcggccttaaactgatgggtgttaccggtatgatcttgcttccggttgtaattgtaatagtaaaacaactttcaagtcagggtataattaaaatcaacttttaatcttagaggagaaacaaaatgggtataagcgaaatgctgtcgctttgcggcggtttggctctgtttttgtatggtatgcatatgatgagctccggccttgaggcggcggcaggagacagaatgaagcaaatgcttgaaaagctgacttccaatacgattatgggtgttgtgatcggtacggttatcaccgcacttatacagtcgtcgtcagctacaacggttatgcttgtgggctttgtaaattccggcattatggatttgtcacaaactgtgggcataatcatgggtgccaatataggcgccaccatgaacggcgtgcttttagccgttggtataggcgatattgcaccggctttcgcctttatcggcgtttgccttatacagtttacaaaagacgaaaagaaaaatcatataggcgaaattatagccggtttgggcatactgtttatcggtatgaatatgatgagcagttctatgtccgcactgcgtaattcacctacatttatcggatttttgtcctcttgcagcaacccgattttggctattttggtgggtactgttttcaccgcactcatacaatcttcatctgcctcggttggtattttgcaggctttggcagtaagcggcgttgtggatttgcacaccggcatctatcttatgttcggttttacaatcggcacatgtatcaccgccgccattgcgtctatcggcacaaccgcaaatgcaaagagaacaacggttatacactttttattcaatgttataggtacggttatatttgtaattttctgccagacgatgccggtggtggattggattataagattgacgccaaactcacctgcctcgcaggttgcaaacgcccatgttatattcaaggttgttacaactttgatactgcttccattctcaaaacagcttgtaaatttgtctgtgattttaatcaaagacaaaaaagaggacaagcgtcccactcttatggagcgtgcaaagctcactgccggttacagcatgggtacaagcgcaattatcatacggaatattcgtgacgaaataaactatatgtatgacattgcaaagaaaaatgttgaactcagttatgatgcggttataaacaattcttcggagaatatgaaggttattcgggaaaatgaggatcatcttgacgagcttaacgcctctatttccgaatacatatcgaatgttctgtcgatacctatgtctcggcaggactccgatattatcacaggatatttcagaatagtgggcaatatcgagagaataggcgaccatgcagacaactttgcgggatattcacgcttctttatttcaagggggcttacaatgtccgatgccgcagttgacgaggtgcgccatatgaagagccttactgttgataccatggaatttttagagggtgacaggagagaggacgccggcacaatgcttataaatgtttccagaggggaacaggatatagacgatatgaccgacgagtacagaaaccgccagatggacagaatgagagacggtgtatgcactgcggaagtaagtgttatttactccgaaatgcttaccgactttgagagaataggcgaccatttgttgaatatcgcagaggatttttcaaaaatgtatcctgcaaaaaaagcataattttgtgcaattttaaattacagcgccggttttataccggcgttttgttatttttaacaaagtgacatcttatcgttgacaaaagtcgtcggcaggtgtacaattcaatcataaatttaatacacttcacaaaagcgttgataagaaatagtatgtattattccgatttgcagagaggccccggttggtgtaaggggttatgagggtagtgcggaacacatctttgagctatcagctgaacagaaaaccaagtaggcgagatcgggggttgcccgttacagcaatagagtatgttagtacttacagaggtcagtgccgcaaggcattggcgaacagaggtggaaccacggattttaccgtcctctcgatgcggaaagcgtcgagaggactttttgtttccgtcaagaaataaatcaaggccgttgaagtgttaaatcattattttacaaggagaaaaattatgaaaaaagtatttgcattgattttaacagcggcattggccattacagcagtaggttgccggaaaagtgacgacagcgaaagccggcggacaaacagactggaagaaataaaagagagaggtgttttgactgttgccacagagccgtattttgcacctaacgagtttatagacccgacaaaaacaggggacgaaatgtatgtgggctcggatatagaatttgccaagtatatcggcgaaaaactgggtgttgaggttaaaatagtacctcttgagtttaccgaggtgctcacatcggtacaacagggaaaatatgatattgcaatctccgcactttcctatacggcagacagggcagagggaatgaacctttcaaaatcttactacaaatcagaggacagcaagggttacggtatggtagtgagaaagtcagacgccgacaaatacacaacggcggaaagctacgcagacgcaacgctgattgttcaaaagggttcaatgcaggaaacatttataaaagagcaaattccttcttacaaagaacttaaatatcttgcatctatgacagatacattccttgcggtttccgagggcaaggcagaccgggcagcttgttcgatagatatggcggaactttttatccgggcaaacccggatcttgatttggctgttgcacaggactttaagtttacaatcgacccggacaaagacggcgttgttgttgcaatggcaaagggcgaggacgaattgacagaccggattaacgatataatcgacgaatttagggaaacaggcctttataaacagtggaacgacgaatacaaggcctatgcgaaaaaattgggtatagagtaattaaaagggatattttttaaagatgttacaggatattataaaaatttggcggaaatacgattatgtgtttattgagggcattaaatggactctcattctaagtgttataactattttcttcggcactgttttgggcacgataatcgctttcatgaaaatgagcaacaacaaagttttgagatttatagccgatgtttacaacggcgtaatcagaggcactcctatacttttgcagctgtactttttctggctgtggctgcctaagatattgcctatccggctgacagacaggcaggcagttaccgtaggccttatagtaaacggggcgtcgtttatatcggaagttatccgcagcggcatacaggcagtggacataggccaaacagaggcagccaagagcttgggtatacgcaaaagctatactatgcgatatataattctgccccaggctataaaaaatattctgccggcattgggcaacgaatttatttcaatgcttaaacagacatctttgggctctacattttttatcggcgaaataatgtcaagctggcgtgcggtgcaaacggcaacatacaaaccgataccgtcacttatcataataggtattatctatcttattttgacatatttacttacatttttgcttggaatttttgaaaggaagttaaaggaaagtgattgacaataacagcgaagttttgataaaagttgaaaatctccacaaggatttcggcggcttacaggtgcttaaaggcatagattttcaggtcagaaaaggagaggtggtttcaatcataggtccttccggcggcggtaaaagcacatttttacgctgtttaaaccttttggaggagcctactcagggaaaaatttggtttgccggggaggagataaccgcaccgggggttgatgtaaaccgccacagacaaaaaatgggtatggttttccagcactttaatgtgttcaacaatctgaatgttttagacaatatcacccttgcaccgaaacttgaaaagaaagttccgaaaaacgaggccgagaaaagagcaatggagcttttaaaaaccgtaggtttggaggataaacggcggcagttcccacgcaagctgtccggcggacaaaaacagcgccttgccattgtgcgagctttggcaatggacccggatgttatactttttgacgagcccacttccgcccttgacccggagatggtaaaaggggttttaaatgtaatcaaggatttggcgaaaagcggtatgacaatagttatagtaacccacgaaatggcatttgccagggaagttagcgacagagttgtgtttatcgacggcggcgtaatagccgaggagggcacacctaaacaggtttttgaaaacccgcaaaatccaagaacaaaagaatttttaagccaagtgctgtgaaaaggcgatgtaaaacaaaagatttcttgtttactttgcaaaatcggtctgcgaaagcaggccgaattttttatataaattattaaaacacaagacaaatgccggggtttatggtattataaaaatataaagttgcaagaggtgtaaaagtgaatttaccacaggatttttgtcttaaaatgcaaaatttgctgaaagacgagtatgatgattttataaaaggctacgataacgaaaattatttttccctgcgcataaatactttaaaagcggacagtgatgatgaaaaaataaaaaaacttttctgtgaggaaaaggttcggtgggcggaaaacggatattattacagcgggcggcaaaaacccggcaagcacccttaccaccacgcaggggcatactatatccaagaagccagcgcaatggctcccgtggcccgggcggaaattcaaaaaggggacagggtattggatttgtgcgccgcacccggcggaaaaagcacaggggcagcggcatatcttgagggcacaggtttgcttgtatccaatgaaatagtgccgggcagagctaaaattctgtcgggaaacattgagcgtatgggggtaaaaaatgccgttgttacaaacgaaagcccacgggatttagagagatattttcctcatttttttgataagataatagttgacgcaccctgttccggcgagggaatgttccgcaaggacaaagccgccgcagaccagtggagccgggaacaggtgaatgtgtgcgccaaccgccagagtttgattttggaaagtgcggaaaaaatgcttgcccccgggggaaaaataatatattctacctgtacattttccccggaggaaaacgagcagcagatagaaaattttttgaaaaaacacccggaatttaccgttgttaagccgaagatatatggatatttcacccccggcaggccggactgggcagacggaaatccacaactggaaaacacaatgagactgttcccccacaagttaaaaggcgagggacactatgtggcagtgttgcaaaaacaagggggagaagccggcaaaatcaaatatgcaaagcccataaaggacaaaaagattttggaagtttggcaaaaatttgcaaaagaaacccttatcaatacacagttcgataatttttatttgtttgggaataccttgtattctctgccggacaatactccggatttttcaaaaataaaggttttaagagccggcttacagctgggagaaattaaaaaaggcaggtttgagccatcccacagcttggcaatggcattaaagccggagcaggttaaaaactttgaaaatcttccacgggacagccaaaactgtttgaactatttacttgggcaggaaatacccaccgacaacccggcaagaggctaccgacttatctgcgttgacggcttttctgtgggctggggcaagtgcgacggcaccgttataaaaaatcattatcctaagggattgagaataaaaagtttgga

SEQ ID NO: 3056 - DNA, 14864 bp, Unknown
  16S sequences of unknown bacteria
agggggggacctccttcgtgtcctccggcatggccacggggacgaccagtgcgccctcggattcctccgccaggcccaagcgcttcatctgctcgatcatcggcgggatataggactgggcgtcgctctcgccgagccagatatcaaagctgacattgaggttcccataattcttcttgaggtccgccacagacacgcgcattatgtgcgcccacagagcccggcagccccggtcgccctgctgcagcttcgccgtcgccgcatgggcttcggcggcaaaggccgcatcctgcttactcttggccgaggcggtgggatagatttcctccagctcagagatggtgaagggggcctctgccgggtagtccccggtgaagctctcgtcaaaatacggcagctctggctggcggcagcgcagctctgcaatgatcaggcccatctgcaggccccagtcgcccatgtggatatcgccggtgacgtcattgccaaagtaacgatagatgcgcttaagactctcgccaatgatcgcactgcgcaggtgcccaacatgcagcggctttgccacattggggccgccgtagtccatcacgaccttgcggggcacagcctccggtgccaatccaaagcggggcgcagcctgcatctcgcgcaggtaatcccgcaggtaggcgccggacagcttcagattgataaacccaggcatgcaggcgtccacagaagaaaacatctcgctgcccgcaagcgcctgggccaccgcctgggcgatcttgatgggtgcggctttatactgtttggcggcaggcaggctgccgttacactgaaattcgcaaagatccggccggttcgagacggtgacctttccataggccgcatcaaacccagcggcggcaaaggccgcggagacctcggccgaaatcagatcgactagtttcgtcatagcttctgctctcctttgtgctgttccatcggtattatcgttatcataccaaaaagcaccccttttgtacagcgaaaattcagaaaaaccaccggacgctccagcttgccagcaaaaaccccgtcagatccgcaagaagcgccgccgggatggcataacgggtcttgtgcaccccagccgcgccgaaataaacgcagatcgtataaaacgtcgtctccgtcgagccgagcatcacggcagcagtcaagccgatgggggaatccgggccgtactgggcgatgagctctgcgccaacggccagggccgcgctgccggaaatgggccggatcagcacgaggcccagcgtctggggcgggatgcccgtccaggcaagcaccgggccgagaaaccgctccagcagctgcaccgcgccggcggcctggagcatctgcaccgccgtcaacaggacgataagcgccggggcaatgtgcgccagcatccgtaggccgtccgccgcgccctgcaccatcaggccatagctgtcggcccgcttgcgcaggctgtagcagctggctcctagtaacagcagcgggacgacggcatctgtcagcgccgccatcgggcaaacagccccaccgccagcagcccgacggtgacagagcccagagatgtgagccaaacagcgggcaaaatggcaaagggccgggccgccccggcagacgcacgcaaggcagcgaccgtcgtcggaagcagctggatggacgcggtattcagcacgatcaggcggcacatctcgtccgacgctgccgcgcccccagacagccggtgcatccgctgcacagcggcgatccccaacggcgtggccgcattgcccaggcccaggagattggccgtgaaattcccactgatcttctccagcgcctgcgcatcccgggcagcggcgggaaacagacgccccagcagcggtcgcagcaacgccgccagcttcgctgaaagtccgctgccctccagcactgccgccagcccagcccacagacacagggggcccgctagggaaaggcagagctgtgcgccccgctccgcccctgccatcgccgcggcagagactgctcccagttgcccggagattgccgccgctagcactgccagcagcagcatcccactccagatccacgccatcgccatatcgcatcccccctgtcctaccctatgccccgccccggcggggcatgcatttttcgttgacaagccgccgcggcgcgattatactaaaagataggaatttacttgggattttcccggaaagcgtgattttatgaagaagttgttccgtgcaatgctgagtgagctgcagcagggccgcaatgttgtgctgtgcagcatcatcgcctcttccgggtcgaccccccgggggacgggtgcaaagatggccgtgtttgaagatggctccacattggggaccgttggcggcggcgccgtcgaataccacaccgagctgctggcccgcgagatccacaagacccgtcactcccagtccaagggctttttgctgacgaaaaatgatgtggcggacatcggcatgatctgcggcggcgccgtgacggtctacttccagttcctggacgctgcaaagccggagacgacggcgctcatctcccatattctgaccctgctgcagaccaatgccaactcctggctgattctggccatgcgggacggctgcatctggtccatgggcacctatgatgagaaaaacggcttgcagtacactgatgcattgaccctggagcagctgcagccgatgctgcaaaatcgcgccgtattgcagcaggggccgctgagcttctatattgagcccctggtcgtcgccgggacggtctatgtcttcggcggcgggcatgtctcccaggagctggtgccggtcttgagccatgtggatttccgcgtcgtcgtctttgaagagcggccagaattctgcacgaaagagcgcttcccgacagcggttgataccgtccttggcgacttcgcgaacatcggggagaaaatcgagatcaagccctgcgattatgttgtcatcatgacccggggccatatggccgacaggacggtcctcgcccaggcgctgaaggcgcatccggcttacgtcggcgtgatcggcagccggaagaagattgcaaagacaaacgagctcatgtgggaagccgggctgacaaaggaagacactgaccgagtccacgcccccatcggccttgccatcggcgcagagaccccggcggagatcgctatcagcgttgcaggcgaactgatcgccttccgagccgggctggaagcttgaacgtctttctgaccgggccccggcagatcgggaaatccacagcagtgcggcgctatctggcaggctgcggcctgcactatggcggctttttcaccgtctgggggccagatgaccgcctgcatctgctgcgcgccgccgacccgggtgcgaagatgacagcagcaacagccgttgcccgccgcgcaaatagccgggtccaggctgaggcggcggcctttgaccacctaggctgccaggcactggaagcaccggcgcagctgctggttctggatgagcttggctttttggagcgggacgccgcggccttccgccgccgcatccagcaggtgctggatgggcccacgccggtcctcggcgtcgtgcggcaagtcggcagcctgtttttacccgcgctgcaggccagggcggacacggtcgttctgaccgtcaccctggaaaaccgggacgccatcccggcgttgctttgccaatatctgccaaacggcgcaccacagcaatagcaaaacgcagaggccaacgtttggtctctgcgttttttggcgcttacagcaccttgacttcaatatgataggagatcgtccccagcggttcgttttcgacatcaacggcgtagtccaggtcgaacgcgccgccgtcccagcctaggtccagctccagcttccgggtcgcgactcggaccagcagcgcgccctcgccgatatcatacagcgattcgctggcgccgccgggagtaaactccaggtccatctccaccgctccggtgcggaccagggcaatgcggccctcgcgcaggcggaatgttgtcgtcgtgccctccatgccggtcaactcgctctcctcatagtggacatcaaagcccccctcgacgcggcagagcttccctgccgtcttcagctctacctgctccggctcctcaccataggtcgtatgggtgccagagatggagaggatcacatcccgggtctgttgttccagctctgtcttcacgcgtcggcctccatggcgcacaccagcagctggtcgatcagctccgtgcaggcaatgccgctggcctcaaagagcttcgggtacatggagatcgacgtgaagcccgggatcgtattgatttcgttgaatacgacctcgtcgccctggtaggtgacaaagaaatctacccggctcagcccctggcagccgatggcctgatagacccgcaccgccgtctcccggacctgctcggctgcctcgtcgctgatgcaggcagggatcagggtcctggattgctcggaaagatattttgcgtcgtaactgtaaaactctgccccggcgtcgatctcgccgcagacggatgccaccggcgtatcattgcccagcacagcgacctcgacctcgtggccatcgataaactcctcaaccagcaccttgcggtcaaaccgcagggcctcgaccagcgccgcctgcagcgccgcccggtcctttgccttggagacgccgacagaagagcccgtcccggcgggcttgacaaatacggggtaggcaaaatgggcctccaaccggtcgagcagctcctccgggtgatgggcaaaggcggcatctgtcaccagttcccagcccgcctggcggaccccggcgcggtcggccaccagcttggtcatgctcttatccatggcgatggccgaggctgccacatggggcccgacataggcgatccccgccagctgcagcaggccctggaccgaaccgtcctcgccgttttccccgtggagcaccgggaagacgacgtcgatatgctggcgcacaacactgtcgccctcgaagatcaaaaggccttggccccggaccggcgaaatcgccgcggggcggttgtccggatggtcctgccaggtctgggcgggcagctcgcggtaatccgtcccggcatagtagagccactgcccggcccgggtgatgcccactggtacgacatgatatttttcccgatcgatattgttcaaaatgcactctgcagagcgaagcgaaacctcatgctccggtgacatgccgccaaacaggatgcaaactgtctgctgtttcataaaaagttcctctttccacggaaagttttattttctctatcatatgcgatttgccccgggaaaacaagataaattttcacagaatcgtttttttagtagaatttagcgctggattcgtgtataatacaatagtaggcgaaacgagatgcaagggccgggcattttgtttcgtgattgttttccctgctgccgcaaggcccgctggcagcaatgcgaaaggaggccagtacaatgcaggtaaaccttacgacgaaagaattccggcggctgctggacctggtctatattggcaactgggtcctcaattccatccgcggctcagaccgcttctcggattatgatcaggtcgaaagcaagctgttcggcctgtgccgcggcacccctttggatgagctggccgaggtctgggacggcaatgtggtccccagccgtgcatttaacgacggcggcattcaagaggccattgtaaattatgaggacgccgtcttcttcgacgtgctggctgaggagctggcgcgccgggatatgggctacccccagatcacccgcgagaactacgacgatctggttggccggatggaggactatctggaagagttcgaagcccacggcacggataacatcgtcatcgaagccattgacgcttcttaatcaccctgaaaaacagcgccccgcccccggcagggcgctctctttctacgaaaagccaaaaacgaccgatgcatgggctccatgcaccgatcgtttttctgtttaaaggattgtaagctcagagctttgcaacatccgcatctgtcaggacgggaatgccggcgtcctgcaggacctgctctgcctgggcgttatcctgcacccggaacacgacgtaggcgtggcccttatcggcagcggtgaaggcatagagatattccatattgatttccttggccgccaggacctccaggaccttggccaggccgcccggctcgtccgtcagggcgacggcgatgacgtctgtcacctttgcgatggcttccgtctctcgcaggagcgcagcggcccgctcggtgtcgttcacaatcaggcgcaggatgccaaaatcctgcgtatcggcgatggacatcgcccgcaggtcgattccctgcttggccagaaacgacgtgatgtcggagagggcgccttttttattgtccacaaagacagacagctgtttgattgccataagtacttcctccttcgttctgccggaacggctcagtcgtgcagcttgcgcttgtcgatgacgcgcactgccttaccttcgctgcgggtgatggatttcggcgccaccaggtggaccttcggaccgatgcccagcatggcgcggatggcagcctccagggccttctcccgggcggcgtgggccttgacggtatcgtcaaactgctcaggggccatctcgacattgatatccagggtatccgagttgttgacccggtctaccaggatctgatagttggagctgtagccctccttgagcaggaccgtctcgatctgggacgggaagacattgacgcctcggatgatcatcatatcatcgctgcggcccatgggcttgtgcatccggacgtgggtccggccgcaggtgcatttttcccgggtcaacatgcagatatcccgcgtacggtagcggatgacggggaaggcttctttgtccaggctcgtaaagaccaactcgcctttgctgccctcgggcaagacctcgccggtgtccgggtcgatgatttcggcaatgaaatggtcctcattgatgtgcatccccgcctgggcctcacactcgaaggcgacgccggggccgcagatctcggtcaggccgtaaatatcataggccttgatgcccagggagttctggatatcctgacgcatctcctccgtccagggctctgcgccgaagataccggccttgaggtagttatcctccggcttatagcccttttccttcagcgtctcgccgatataggcggcgtaggacggggtgcagcagaggatcgtcgatttaagatccatcataaactggatctgccggtcggtgctgccggaggacatcggcagggtcagacagccgaccttatgggagccgccattgagcccggcaccgccggtgaacagaccatagccataggagatatggaccacatcctccttcgagccgcctgcagcgacaatggcgcgggcacaacactcttcccacatatcaatatcatcctgggtataatacgcaatgacgcgcttgcccgtcgtgccggaggtggactggatgcgcacacagtcggacagggggcaggccagcataccataggggtacgtctcccgcaggtctgccttggagaggaacggcagcttgtgcagatcctccacaccgtggatatcctctggcttgaccccggctttgtccatcaagtcccggtagtagggcacatcagcatagacatgctgcaccgccttaaccagcttttccgattgcagcgcccggatctgctcctccggcattgtttcgatctcaggttgataatagtgtttttcgctcataggattacctctttatactgttctatctttacgcttcctctaacgcctgctttgcaggaacgacggtttttttattatagcacgtaaacatggtttctgcatcctttgggcaggatttttgtgtcagcaaactgacgataggtaccagaattaggccgccaatcatagcaaatacgccagaatacagggaattggcaaagacaaagcccaggaaaccgccggaaatgctgatccagccgacagatttgcacagctgcacgaccatcaggccagcaccgaagacgaagcacgcggcgacggacgcccgggtcgtctttttccagtacaggccgtagaggaacggtgccaggaaggccccggccagcgcgccccaggagacgcccatcatctgcgcgataaagacgacgtccgaccagatcgtatccttcaagatcgcgatcaccgcggacagggcgatgaagaacaccaccagcagccgcatgaccaggattttccgtttctcgctcatgccgcccttccgcaggggcgcaacgacatccagcgtcagcgtcgaggaagaggtcagcaccagcgacgacagggtagacatagaggccgccagcaccagcacgatgacgatggcaatgatgaccggggagagggtgctgagcatcgtcgggataatggcgtcaaagcccttggccgcaacctcatcctgcgtcataaacagccgcccgaagccgcccaggaagtagcagccgcctgccacgataatggcaaagaatgtggagataatcgtgccctttttaatggcgttctcatttttaatggcatagaatttgccgaccatctggggcaggccccaggtgccaaggcttgtcagcatcacgacgaagaacaagaacaccgggttcggccccaggaaggaggcgtattcccagccgccccggctgccctcagccagcgcctgcatagaggccatcaggccgccgttggtgtgaagcaccgccgcgatgaccgcgcagatgccgcccagcatgataaggccctggataaaatcgttgatggccgtggccatatagccgccgaagatgacataaacacccgtcagcactgccatgaccaggatgcagacccagtaggggatctcaaacgcgctgttgaacaggctggacaggccattatacagtgaggccgtgtacggaatcaggaagacaaagacaatggccgaggccgcgaccttgagcttctccgagccatagcgcttgccgaagaaatccggcattgtcttggagtccagcgcttgggtcatgatgcgagtccggcgtcccagaacgctccaggcgagcagggagccgataaaggcgttgcccaagccgatccaggtggacgctacgccgaaattccagccaaactgcccggcatagccgacgaagatgacggcggagaaatacgatgtgccataggcaaaggctgtcagccacgggccgacggagcggccgcccagaacaaagccatcgacatttgacgtgtgcttccggcaatagacgccgacgccgatcatcagggcaaagaagcagaccagcaacgtcacagttaaaatcttagcagtcataggggttcctctctattctctcttacgcggtcaatgggtcgtctctgtttcaaccagccgcgcgccgcagtagcgctcccgcagcttgggtttttcgatcttgcccgtcgggttccgggggacggtcgtgaagatgatcttccgcgggcgcttgtagcggggcagctccaggcagaattgattgatctcgtcctccgtacaggtgacgccctccttcaattcgataatcgccgctgcgatctcgccctgccgcttatccggcaggccaatgacggcgacatccttgattttatcataagcccgtaaaaagttttcgatctgcaccgggtagaggttttcgccgccgctgatgatgacgtctttcttccggtcaacgagatagaggaagccatcctcatcctcccgggccatatcaccggtcagcagccagtcgcccttgaggatctcttccgtcgcagcggggtttttatagtagcatcgcatgacgcccgggcccttgacggccagctctccgacctcgccctggggcaccggctggcaatggtcatcgacgatcttcgtctcccacagatagcccgccttgccgatggcaccaactttgtcgatattctccacgcccagatggacacagccgggcccgatagactcggacaggccatagttcgtatcatactcatgatgtgggaagacctttttccaccggcggatcaggctcggcgggaccgcctgcgcgccgatgtgcatcagccgccactggtcgagatgatactcttccagcttcagatcgccccggtcgatggagtccagaatgtcctgcacccacggcaccagcagccagacgatcgtcgcccgctcgtcggagacggtctggaagatccactccggcttgacgccccggagaagcactgccttgctgccggagatcaggctgccgaaccaatgcatcttcgcgccggtatggtacagcggcgggatgcagaggaagacatcgtcccgggtctggtgatggtgatgctgctcggttatgcaggagctgaccagcgccttatgccggtgcaggatcgccttggggaagcccgtcgtgccggaggagaagtaaatggccgcatcatcctcgtcccgcagctcgaccggtggaaccgtcgtgctgcagtaataggtcatctgggcgtaattgtcagcgtagtccggcgtctgggcctggtcaccgacgaagaagtagttgtcgaccttcagattggcccggacctggttcagccggtcgataaactccgggccgaataccagcatccgcacatccgccaggtccaagcagtattcgatctcgtcaccggtgtagcggaaattcatcggcaccgccagcgcgcccgtcttcaaaatgccgaaatagatcggcagccagtcgatgcagttcatcagcagaatcgcgaccttatcgccccggcggatgccccgggtaaacagcagattggcaaaccggttagcagccacatcaaactgcttccaggtgatctcccggcggtagcgttctttgttggccgcggtctcaatcaggttgtactcccgccaggtcagatttgtcgccggttggttggccgggttgacttctaccagcgcaacgtcgttgggatagatgcgggcgtttcgctccaaaaaatcagtaataggcattggaaattctccttctttctttttcgctgccccaggcagcggacagatgcggctttccgccttccccgcgaatccgccgggcatacaaaaacgcccgccgtgccacaagcacagagggcgtcaaaaaaacgcggtaccacctcagtttacagcgcccttacaggcgccgcctcaacgggcacagacatgccctgctggaataacggccagcagccgacgcagccttggcagcccgcagcacgggcctgtgttcagtgcgcaactcacagagggtattcctcctgcccagccatccgccttgcaccacccggcggctctctgcacggcttttgggacaggactacttgtctccggtcatcgtcgttcttttttaatttaaatggctaaattatcaagggaaattatactatatttgataccacacattttcccatttgtcaattccttttttgcgccatccccagttttttcacgctgccgtccaacttcccggcatgcctaggagcagccactgtcgccatcgctttttattgtgcactttttttccggccaacactggctccgctgtgtttttgcctgggcaatgggctatttcttgtcggaatccacaaaaaaaattttttggtcacgatttctcttgccaaatggctgtatttcttgtatactacaagccgtacacaacatttagtggtttcatgccacattttcatactatatttagctttcaaagagggagaacgcgcaatcatgaagatcatcaaacgaaacggttcggaagtcaccttcgatatcaccaaaattatcgcagccgtcaccaaggccaacgaagtggccgaggaaacagcccggatgacgccactgcagatccgccgcatcgcggaaagcgtggagctcgtcgcccaggagatcgggcggaccctgtccgtcgaagagattcaggaccttgtcgaggcccagatcatggcccacggcgctttcgaagtcgccaagctctatatcacctaccgctatacccggactctggtccgccagtccaacaccacggacgacaagatcctctccctcatcgagtgcaacaacgaagaagtcaagcaggaaaacgccaacaagaatccgacagtcaacgccgtccagcgcgactatatggccggcgaggtctccaaggacatcacccgacgcattctgctgccccaggagatcgtcgaagcccatgaggccggcatcatccacttccacgacgccgactatttcgcccagcacatgcacaactgcgacctggtcaacctggaggatatgctgcaaaatggtaccgtcatctccggcacgctgattgagaagccccattccttctccacggcctgcaatatcgccacccagatcatcgcccagatcgcctcgaaccagtacggcggccagtctatcagcctgacgcatctggccccctttgtcgatgtcagccgccgcaagatccgcgagaccgtcgagcaggagatgcgtgatgtcggcgtcaagcccacggaggaacagatttcaaaaatcgtcgaggaccggctgcgtgatgagatcaagcgcggcgtgcagacgattcagtaccaggtcgtcacgctgatgacaaccaacggccaggcgccgtttatcaccgtctttatgtacctgggcgaggccagaaatccccaggaaaagaaagacctggccgtcatcattgaagagacgctccgccagcgctatcagggcgttaagaatgagaagggcgtctggatcaccccggcgttcccgaagctgatttatgtcctggaggaggacaatatcaccgaggactctccctacttctacttgaccaagctggccgccgagtgtaccgcccggcggatggtcccggattatatctcggagaagaaaatgctggagctcaaggtggacaaaaacggagagggccactgctacacctgcatgggctgccgcagcttcctgacgccgtatgtcgacgagaacggcaagcccaagtattacggccgcttcaaccagggtgttgtcaccatcaacctggtggacgtcgccctgtcctccggcggcagcttcgataaattctggcgcattttcgacgagcgccttgcgctgtgtcacactgccttgatgtgccgccacaaccgcctgaaggggactctgtccgatgccgcaccgatcctgtggcagtacggcgcgctggcgcggcttcccaagggcgagcccatcgacaagctgctctacggcggctattccaccatctccctgggctacgccggactgtatgagtgcgtgaagtatatgaccggcaagtcccacaccgatccggccgccacgcccttcgccctggaggtcatgcgtcatatgaacgaggcctgcgccacctggaaggccaagcacaatattgatttcagcctctacggtactcccctggaatccacgacctataaattcgccaagtgcctgcaaaagcggttcggcatggtcccgggcattacggacaaggcttatattacgaattcctatcatatccatgtcacggaagaggtcaacgcctttgagaagctggcctttgaatcccagttccaggccctctcccccggcggcgccatcagctatgtcgaagtgccgaatatgcaggataatatccccgcggtgctggaggtcatgcgctttatttatgacaatattatgtatgcggagctgaacaccaagtccgactactgccaggtctgcggctacgacggcgagatccagatccaggaggatgaggacggcaagcttatctgggtctgccccaactgcggcaaccaggatcaatccaaaatgaacgtcgcccgccgcacctgcggctacatcggcacccaattctggaaccaaggccgtacccaagagatccgcgaacgcgtcctgcacctgtgagcaaggcccatctccaaacgctgtgtccccgcgtcacccaaaatcgggggggacccacgtcatcaaaatctgtgtgcccccaatgcgggcacacagatttttcttgctttttctgatctgcccatggtataatgtaattgtattcaggtgtagcccagttggtatggcatgtgattggggtgtgccgtggcggtatccgggacgggtcagagcggaacactgcaaagccttgtaacgcgggcgatagcgggttttccacgattgccgaaagcggcacaaaagcggctttgaccacaggaatgaccacagacagaaaaatctttatttttacccctcgccgtggtatcatggcagaaaagtgaatatccgggtgtagcgaagttggtatcgcgcttgatttgggagcgtatcggcatccatccgacctgccagagccaaaacgtcggaaccccttgacacacgggcatctgcgggttttccgcatttttcggaatcacccgaaaaaccgcctttgaccacatggctgactacagacagcttaagacttcaatttcataaccgggtgtagctcagatggtagagcgcgtggtttgggaccacgaggccgctggttcgaaaccagtcactcggaccaggaaacccgctgaaatcataagatttcagcgggtttcctatgtaaattgttcgattttttcaaaaagttattctttgattattgcggcgtaggatttgcgctgcggattcggtaaactggaagttatgtggttaatgccattttatcagtcggccatgatctcctgagagccccataggagattaaaa

SEQ ID NO: 3057 - DNA, 10985 bp, Unknown
  16S sequences of unknown bacteria
agcgtcagatgtgtataagagacagcccaaagcccggctgcgtctactgtcttttccgcctccggaaacagggacgcctggcccattgccacgatcttgccgtcctttacggcaatgtccatttgctgggaatgggtagcgttgacgacccatccgtttttgatgattaaatccagcatcgtactcctcgctttctagatgaattgtagattgtcgacaatctaattatagcgtatttttcacattctgcaatgggcgattttcttggctttttcctcttgctcctatggtacaatgaacaaaacgaccgtagaggggcaatttcatgtttttggcggacctgcacattcattcccattatgcacgggctaccagccggcagcttgtcccagaaatgctggcgctatggggccggcgcaaaggactgggcgtgatcggtaccggcgactttacccatcccggctggcggactgagctggccgacgcgctgatcgaagcggagcccggcctttaccgtctgcgtcccgagctggctatgcctgacgattggcatgtgccccatatcacggagccgcggtttgtgttatcttgcgaaatcagctccatctataaaaaacacggcaaggtgcgcaaggtgcacaacgtgctcttgatgccaagcctatcgcaggccgaggcattttccaagcgtttggaacgcatcggcaacctccattctgatggaaggcccatcttgggtttggacagccgcgaccttttagagattgcattggagtgttgtccagaggtcgtattcattccggcgcatatctggacgccgcacttttccctttttggcgcatattccggctttgataccatcgaggaatgctttgaggatctgacgccgcacatccacgcgctggaaaccggcctatcctccgatcctgcgatgaactggcggctttctgctttggatggttataccctggtatccaattccgatgcgcattcccccaccaacctggcccgtgaggcaaatatctttgactgcggcctctcttatgcggatatgcgtcaggcgctggcccatcctgatacggcagggttcggcggtacgctggaatttttcccggaagagggcaaataccatttggatggccatcgcatatgcaaagtatgcctatcgccgcaggaaaccaacgagcttggcggcgtatgccccgtctgcgggcagaagattaccgtcggcgtgctgcatcgcgttgatgaattggcggatcgcccggaaggaagccgcccgaaaaccgcccggcattatgaaagcctaatccccctgccagaggtcatcgcttctaccttgggcgtagggccgaacagcgtaaaggtacaacgcgcctatcaggctgccctttctgccttggggccggagctttctatcctacgccaagtgcccccggaggacatcgagcaggctgccgggccgttggtggcggagagcatccgccggttgcgcagcggttctgtggaaatgcagccgggctatgacggcgagtatggcaaggtcaagatcttgacagctgaggaaattgccaaatacagcggccaaatgagttttctgccgggcggcgttgctaaagcggcccccaaaaagccccgtaaaacagcaaaaaaagcggctcattccctcgaaatgccggacaaaggcacgcaaagcgcgctgccagatccgcactatggactaaacaaggcgcagtgggaagcggtcagcgcgacagaccgtgccgtggccgtctctgccgggccgggtacgggcaaaacccgcacgctgatctgccgcatcctccatttgatcaagcatgccggggtgcatccttcacaaattacagccgtaacgtttaccaacaaggcggcaaaggaaatgcggcagcgtttatcagaatcgctgccaaacgccaaggatgcacgagccgtgcatattggtaccttccacgcgctttgtcatgagttattgacaaaatggaaggttccctttcagctggcagagcaaagcatgcagcaggccgtaatggcagaatgccttcagtctctggcggtcaaaggcaatgtacatcggtttttggaagcggtttcccgccgcaaaaacgggctgccggcggcctcggatacgcccttaaccgatgatatctattatcgctacacagaacaaatgcaggcttatggcttggcggattatgatgatctgctgcttttgacgctgaaaggctttaccggcgctcataaacgcgacaaggctgcgctgcgcatgtttcatcatctgctggtggatgaatttcaagacatcaacgacctacaatatcggctgatccaggcttggggggagaaaagtgcttccctgtttgtcatcggcgatccggaccaatccatttatggcttccgcggttccagtgcacagtgctttgcacgctttgccagcgaccaccctgccctacattccgtacatttatccgaaaactatcgctccgcgccagaaattctttttagtgccctgcccatcgtacaccgcgaaagcggctacctgcatgccaactgctctccgatgggccgggtacaggtcttgcgagctaaggatgaatttgaccaagcactgtacattgccaagcatatcaaccgattggtaggcggcatcggaatgctggaagcgcatagacaaggcgcccgccaggcgtcgtatgggtttggtgatatcgccattttgtatcgaacccatcgacaagcgcagcaaatcgagcattgcttaaaaaccgagggcatcccctacaccgtcagcggccgggaatcctatctaaatgaaagcgatgtgcgcgcagcattgtcctacctacgtctgctgctctgtccccaggatcgctatagtttacaaacctgcctgatggcctttggcgttccgctggaacagatccgtgcggtttccccgacggacggcgcttctttatccatggccctgcaagccttgggcctatcccatctagcttcgctgatggaagcgcaatttcccaaagcggccaaagcaaaaccggccgcgctgctggatgcgctgatccctctgctgggccaaagcgaggccttatccatgctgcgcggcgcagcgctggggcatgccacagccgcttcgttgctcgatgccttggcttttggcagcgagggagacatcacccgcgccagcggcgctgcctatccatcagaggcggtttcgttgatgacgctacacggcgccaaaggcctggaattccctgttgtgtttctttgcggaatgcaggaggggatgctgccgctgatcccgccaaagggcatatgcgatgaggaagaagagcgccgcctgctttatgtaggaatgacgcgtgccaaagatcaattatacctgctctgccccgacccgccgtccccatttttggccttgctgccaaaatcacagctttgctttggtacggcccgggaaacacggcctagcagcgggaagcagttatccatgttctaacaaaaaaacagcccttccaatcagggctgttttagtatgcttttttcttcctttgcactgctttggaggggttcccccttgacaaacagcagcgaccaaatcgcgggcagcgccataatcatcggcatggcataccggctcagcgccacggggcctagcagcagcgacagccagaatgcaacccaaagcaccattggggcaagtattctgtatctacgcttatacacggcataggcgcctacaaacaacaggctccacatcggaaacgccaggtccacacagagagacaacaccggcaaccgatacatttttccttcatctatcatcgtctctaaaaaggactggtacgcagggaaaaggctctgtctgtgaattttaaatacattgatagactcaagatagtttttgtacgcttcaggttgataatagcaatacacgccaggagatatatacggatagcacatggtaaagaatgcatcgatataggctcgtagattttgcagaccaatctcaaaatacacgcgtagataccggcccgggttttcagccagcttttccaagacgacttgtgattttacatcgtccgctgttaaaggattgtaatcctcaaatgcttcgggcgggatgatctcatacaaaattcgtttttgctcctccgtcacgctctccgggctttggttcatcacgcgcgctacctgctgaatgggaaccccaaaagcgtctatatattgtggatgctgcacattcagcacggcgctcaaaggccctgtcaacgcatagtacaaggctaccgcggataagcacagcccggccagccggattcttttgattcgacaagcccataccacaaacgggatcatcaaaaccagcaaaaagatgccctgattgcgcaataaacacatcagcagcgccatccctatataccgagcctgtaaagccttgcttttaaaaaacctatctggcgaaagaatcaagtccacagtaaataagaacagcatcaaaagcgccgcgccgaataggttttctttgatggttgtaaaaacaaacacatgaaaaaagggattgaaagcaaaaaacaatgctgatatcaacaccgccagccttggaacgcaatgacggatcataaagcacagcgtatacgcaaacaccgccgttacgcaggcggcctgcaaacaagaatacagcgccaggccagcgttgtagctgccaaagatcgcgtgccccagccacacggaaccgccgatcaatagattgccaagcaatggattggcggcagacaaaaaatgctcgtgcagaagttgatagatctgcgtaggcccgtcaaaggacaacaagccgggataattggctaaaaatgccggcacatagcataacaaaagcagcccatatagccatacaaactgttttttatagggcatggcatatagccttcccagcagcctatcgccaggccaccggcccccttccctacgagaaagggcagaaaacagcactaggcacattccggaaaacagcgcccataggccgaaaaacacacaggcatatcgcaaggtactatgcgttttagggaggatacccccatacatctgcccgatggtagaaaaggcagcaaagataagcgccgtgcaaacgccaaggatgcaaagccttggctcttttataaggggaagcgttttataaaatagcaaggagatcgctgcaaacaccaaaagtgccagaatattccctgaggaataggccgatgagccaagggatacaatccccccgaaaatcaaggcaaacgtggtgcaaaaagcaaggcctatgctgatcggcaaccgaaatctctgcatcaatttcttcatatgttcggcctcctttcgcagttttcctgattataccaacacagtctctatgcttcaaccagtgggccgtaaactttctgcatcattttaccatattttctgttgaagaagagcgcaatagccgttttctgcatttccaataataaacaaggccgaccgcatccgccaaaaaccatccgattggcaccgaccaccagattcctactacgccgacgcttggtaacgcagatagtatatacgccaacgctaccctcgtacccaacgaaatgacggtaagtaccaccgacatgccgggccggcccaccgcacggtatagtccatagagcaaaaacagacagccaatgccgcagtaaaaagccccttctatgtgcaaatagcgaatgccttcggacaagatggccgtttcccctgcatccacaaacaacagcatcagcgggcgagccaagaaccagatcgcggccgaaatcaaaagacaaaacgccagcgctgtccaaatggcccctttcagccctgcccggatgcggtcttgtttctgtgcgccataattttgtgcaataaaggtagaaaacgcattgccaaaatcttgcacaggcatataggcaaaggaatcgatttttaccgcagcagcaaaagccgccatcaccgtggcgccaaagctgttgaccagcccctgtaccatcaaaatccccagattcatgatggattgctgtgcgcaggtcaacactgaaaagccggcaatttcccgcacacaggcccatcgaatgcgcagatgcctcttgtgtatgcgcagctgcggatatttgagccctgtgtacgccgcaatgcccacgccggaaattgtttgcgcgattaccgtggcctcggccgccccggccaccccacggccaagccctaggacaaaccaaagatccagcccgatgttgagcagcgcagacacggccaaaaatgccagcggtacggcggaattgccgaccgcccttaaaagcgaagcaaaatagttgtacaaaaacgtagcgaagataccgcaaaatatcacaatcagatacgagcgcatcaacccttgtatttgctggggcacctgcaaaaagacaagaagccaatccaaaccgataaacgccaagacattgagcacgagggttatgccagcaatcaggaaaaacgaggtacacatgccctccttgagcccctctgtatccctttgcccaaatcggatggaaaataccgcgccgcttcccatacataggcccaataaaacggaggtcagaaaggtcatcagcgtaaatgcggatccgactgcagccaaggcgtctgcccccaaaaagcggcctacgatcaaggtatccgctacgttatagcactgctgcaatagattgcccaaaatcatcggtacagcaaaccgaagcatcgtcttcataacggggccctgtgtcagatctcccttcatcccgcgcatcctttctaaacgtaagataaaactttctttttgtaaatattgtatgaaattcactccattgcgtcaagcatcggattgcgattctttgttaagttctctataatagactcaacgtagaaggaggaggcgctatgtttttagacggtctggatgcgctggatcaaaaaattgttcagttgctgattcataatgcccgcatgtcctattccgatattggggaaagcgtcggcatttcccgcgttgccgtgaaggcacgcatacaatcgttggagaggcgcggtatcatcgaggaatataccaccatcatcaatccacaaaaaatcagcggcgcggtatcctgctattttgagatcgagacattgccagacgccttatcaaacgccacagaagttttgtcccaaaaccaaaccatcacccagatttaccgcgttacgggccaaaataagctgcatgtgcatgccgtggcatcctccaacgaagagatggaagctttgatccgcaatgtcatcgatccgctgcccggcgtggtcagtagcagctgtaatatcattttgtcacgtatcaaggatgtaaaggggcttaggttataagcgcattaaaaaaaccctcttaagagggttttttatgtaccgtttgcatcgtctctacttggtagcaaaatacgctgcgatttccttcattctggaaatctgatctacgccaaagggacatcggcggttgcaatggccgcaggcaatgcaggcgtccgctcgtgttgacaaggtcttataatgggtgatggccatcgtatccccctgtttggcaagatcataatacttattgatgatcccgatgtcgatctgtttggggcatggttggcagtgattgcagtatacgcatgtaccggctgcatctgcaggggtaaatgtgctgataaccgcataatcccgcgcctggtccgaggcgtcgtaatagcccaaaatgtgttccacatcctccgtgctgctcataccgggcagcacggtcaacacgcccggccgatccaaggcatattgcaggcattggtagggcgttagcgccttgccaaacggcgagagcgctgcatcaagcagttgcccgcccgaaaagggcttcatcaccgaaatgccgatgccctccatctcgcagcgacgatagatttcctgccgctcctctacagagccgtgggcatattctcccttttgataatcgtaggccgggttgatcgaaaacatcagcatatctaccggcgcctcctccagcacacgccgaatggtggacggcgtatgcgatgataagccaatgtgccgtacgattccttgctcttttaattgcatcagataggagaatgtgccgcttttctgataggcccgccaatcctcctcttcatccaggcaatggataaagccataatcgatgtagtctgttttcaggcattggagctgccattcgacgctgcgtcggatcttatcgacattcgtgctccatccgtatgtgccggtggcataatccgccccaaaatggatctgatagaaaattttattcctgatccctgcaaaggcctttccataatatggaaagcatcgggatgatgcggccgccatgtcataataattgacgcctccctcaaaggcgcgttccaaagcggctacgccccgtttctcgtcggcttcggatatatagctggagccaaagccaatctcgctgatgagatcccctgttcgtggatgggttctgtatttcatggcatactttcctttctttacaatgctgcgttataaggcagggtccgcaagtgaaaacgtaacggtcacgcttccccgccccagcgcctctaacagcgcttgtttgcttgtattttctatttttcccaatcttgtaaaatcccaggtattggtatcatagtacagggcaagctgttgtccttgatacaggatcagatccccaggctctgtggtaatctgctcgtcgctggttggcagtttgcgatccaatgttccgaccttttcaaagccgccatagtcttccatcgaaaggataagatcgccctcctgaagcaaagcatacaatgcctctgcgctggcgttgtttgcgagggctgcggtccaggtttgcccaccggcctgtagatggatatgccgctgtttcccaggctctgcggcctgtgccgccggcatctgccccatttctaccagccattgccggatctcctcttccgatgcatcagcagaaaagcgtctgccctggccaaggacagccccgggctccagggcacgaatcgcttgcagagagggttcaatgccactgctgccgcttgtacaaaacgggatcagcgtcttaccctcaaaatcataagcgtcaaaaaaggtgtttagaatgcgcggcatcgtcccccaccatagaggatagccaacatatacaacctcgtaatcctgccacccctctatgctgccttcaaaggccgggcgcgccctttcatcgtcctgttcgcggtttgcccgggaatcatcgttgtgataatcgagatcttcttctgtatagggtgtttgcggtacgatgcgaaatacgtccgcccccgttaatgactgaatattattggctacggcttccgtatggcccgtacaggaaaaatatacgaccagcgccttggcagacggtatggtctgctgcgtatccgtttgcgccgcgctctgcagcggcgttgtttctgcgctgcatcctgccaggcaggccgccactactacccacaacacaacgcataccataatcagcgttttcttcattgcattctcctcatgttttcctcccgcacattgacaggattctttaggtgcagtacaatcttaaaacctaaagttaggtttagatcaatgtttttttgctaatatacaccaaaaggaggccctcctatgttttataccatcggccaaatctcaaaaaaaaccgggatccctatttccacgttgcgctattatgaccgtgagggcatgtttccgagcatggagcgaagcagcggcggcatccgtgttttttcggatcgcgaaatcggcgtgctccgcgttattgagtgtttgaaaaaaagtggcctccctatcaaggaaatcaaagagtttctcgcatggtgcgaagaaggagacgcctcgctgcaaaaacgccgtaatctattttataaaaggcgtgaagaggtgcagcgtcagctcaccgagctacaagacactctgcataccctggcatacaaatgctggtactacgatgcagcgctagccgccggcagcgaagcagccgtggccaagatgcccgaatgcgatattccagaagacgtccggccgtataagctttgagagcacagcgccatgcggtttcttaaaatacaaacagatcgccgatgccgatcggttggcgtttggcttctagggaaaagttgaaaaattacggagcatcttcttgatcctacagcgcacgaatggatagcctcaacctacgcctttttacaagggtatgacgcaacggaaattgttgtatggcgctcttcctgcttttaggcacgcatagtttgccgctgttctggcgggcagatccgaggagattatcttatgcatacaatataccatcatcaattgcatcgcatacaaaacggcttgccgattgcagcaagccgttttgtactctaaaatcatatgtcattttgggagacacaagcaacgcagcattttgcacagatatagaaaaagcccgtatttacggggtttcccggcatccatccaaacggataacgcccacaggcaaagacttcggaatggatgcatatttctttttgggctaaaaatcgtaaaccgcaattgtaagctgcgtgattgggggtatggtcaggatgctgattaccattgacaatattgaaatgttttttcatgacagcccgcaaaaagttggcagcaagcagcgtgttgcaagcgggcctgcaagcgaacaggtgtgtcgcgcgtgagactggtttttatgaaatgaaaaaaggaacgagttacactcgttccgtcgtggaggcgccacccagactcgaactggggataaaggttttgcagacctctgccttaccacttggctatggcgccaaaaaggaattggagcggtagacgagattcgaactcgcgacatccaccttggcaaggtggcactc

SEQ ID NO: 3058 - DNA, 12698 bp, Unknown
  16S sequences of unknown bacteria
ggtgacgacaagataaaattatacgcgccttatgagcacttgtcaacaactttttcaaacttttttaaaaagggttaattgtaaaagtaacttcacagaactgaatgcaaaatgccgaagtatctaccccggcatctcgcttgatttacatattctcggtgtccttatgaatgatgttattttacttttaccttcttaacggcggaccatttgccggtgtagctcttgccttttaccttcttaacggcgcatacctttacgtaatacgtcttcttggatttcagtttgctgatggtcttctttaccgtcttgccggatttcacggttacggtcttcgccttcttgaacttcttgctagtgctgtagatcactttgtaggaagtggcgccgcttaccttcttataagtaacggtcactttctttttgccggccttcagcttgagacctttcacttgacccggcttctttaccggagccgccgttggggatggggttggtttattgttctggttcttcagctcttcctctgccttcttcagcttatcctgtgtttctttcagagagttctgaagtgtgtctaccttcttgttcagctcttccaattccttattcgccttggcgcactctttttccttatcggataacttcgtcttgagctgatctctttctttttctgcctgtgtcaacttctcgttcagtgtagcgttatttccactgcttgccttcaaatctgcttctagtttttcgcagtccttggtctttacatctaaagcatcctgcagcttcttctctgctttctggctggcatccagcttcttctgaagttccgtctgtgcattctgtgccgtagtcagctggttctcaagattactcttttctttctttacctgttccaactgttccttcagcgtcttgttgctgttctcgctttcagtgagcttttcatccttatctttcagttcagtatccttctgtgccagctgatttttcaagtcgtcaatttcgtcctgtgctttcttcaattcttcttgagccttcttcagttctgcttctgtcttggcattcttgacgattaattcagccttttcgatttttggatatacttcctctaatgattctctaacactatataagttagtcaaaatttcattttcagtgctattaagattttcaaattccaagtaaaaagcttcttccaaccccttattctctagctcatcatgaattgcttgtacttctgcctccaaaccttcagctttgttagtatactcatttattgtgttttgtagttcttcctcgatatattgaatcttacctttcgtctctgtcaatgatttttctgctgcatccggattttcaatattcttattaatcaactcagaaattattgattgagatctatacaattcacgtgtgtaagaagcagcttttttgtctgctccgttttttgtttcttcgatcttttcctgcagtgtttgaattttttccttcatacctttatactctaagctttcatttacactccaggttccatcttcatttttttcaagttcatatccatccgcaacacaaacgtcaagcggttgacgatccaaagttccacctttaagtttaatctttccaccacctggaatcaaatctcctctgtaattaccatttgtaatcgtgagtccgaaataaccatcatctgaaatcaaatccgagatttcgatagtaccgtcaattgttcccgttgtgttaatcgttccacctgtaaacggcgatgccttaacatagattgcatgatttccacctgatgacttgatattgctagcgccacctatcccgataatatcctcatcgtagccattgctttctgccttattccatacaacatatttgcacttggcatttgcagatgcatcaacagtacaatcgccaaagtcaatcattccgcagttcttaatccccttctccgtatctgtagagatttttaccgttccattcttaaagctgatgtaaccttggccttctgttccggtatataaagccacgttttccgactcttcatcattctccgcatcttccgtggaaacgctttcagtaatatcgtaagtatgtcctttcagatcaatccttacttcagtatttttgttaacacacccttttccgctaaagtctttatttaaagatatttcaagtggtgccggacaaccatctgaattttcttctgcactccaaattggatatgcttcatcaatggcctcctgcaacgtgtcataattcccaaccaccttatgattgtaatctttcagcgtccacggtgcatcagaattctccgtaccgttattcccaccattttctcctgcgaataccattgccggcatgaatgtcatcgtcatcacgacggacagaatgcctgccaaccattttcttttggatttcataaaatcctccttccatccatttcctttctttctgtttcgacggaattcgttccgccgaaaggcttccaaatcaattctaacccctctgtaccgctcctgtcattcgattcacagtttaattttccaactaaaaaaaagaagcgggacatccggagacgtccgcttcgatttgcgtttgcgtttttcaattgtggttttcacttcaccttaccaaatgcccatcacgtgctgcatcagcaggctcacggcggtgatgccggcccagcacacggcgcccagagcgattggctttccaccggattttaccagttccaccaggttgctgttcagaccgatggcggccatggccatggtgatgaagaatttactcagttccttcagcggggcaaagacttccgccgaaacacccgccatacccgcaagggttgtgatcaccgaagcgattacgaaatatagaaggaacatcggaaaggcccgcttcaggctgaaattgtttttaccggagccggaggatttgcgggcgcggtggatggccagacccaaagtaatcgggataatcgccagcgtccgggtgagtttaaccgttacggctttgttcagagtttcggcgcccaggttccacatgctgtcccaggtcgcggcggccgcggtcaccgaggaggtgtcgttgattgccgttcccgcgaaaatgccgaaggcctcgccgctgtaggtatcgaagccgatggcggcgcccagcatcgggaagaagatggcggccatcacgttgaaaaagaagatgacggaaatcgcctgagccacctccttgtcgtcagcatcgataaccggtgcggtggcggcgatggccgatccgccgcagatggaggaacccacgcccaccagcgtggaaatgtttcccggaatgtgcattgctttgtggagcacccatgccagaatcagtgaggtggcgatggtgctgatgataatcggaagggactgtccgccggtgcggagaaccacgcccaggtccatgccgaagcccagcagcacgaccgccgtctgcaggatgtacttggaggtgaatttaattcccttcttcgcttttccctgatccttccaaaacagggcgatgatcatgcccagcaggattgcgattaccgcacttcccaccaccggaaactgtttcccgatgaaccatgccggcagcgccagcaggaagcagaccgcaaagcccggagctttctctttaatcgtattactcattttactctccttaattcgtcctatgccgcccgtttcgcaaagcggcctttctattatatgccgaaccggagaccttgtaaaatcatattttgcgaatgctccctgccactaccgaagtcactgtctttgatgtataatgttcatcgtgtccgaaagattacaaaaaacgcatacaaatagaaggaagaatctcatgaaacaattctggtccaaaacatccacgctgatcatcaccgccattttctgctgcaccctgtggggcagcgcctacccgtgcatcaaggtcggctaccgcctgttctccatcgcctccggcgacgttcccggacagctgtttttcgccggctgccgtttcgcgctggcgggaatcctggtgattctggcgggcagtctgttgcagaagaaactgcttttaccggagaaatccgattggaagcccatcgctgcgctggccctgttccagacaatcctgcaatatatcttcttttatatgggcctggctcgtgcctcggcggtgcgctcctccatcatcaacgggaccggcgccttcgtggcgatcctgctggcggtgtacatgttccggctggagaaaatgacgctaaaaaaattcatcggctgctttctggggttttccggggtgctcctagtggagaccgtcggtcagacggtgaatttcggcttcgcctggaacggggaagggttcatcctcctttccgtgttcgcctcctccatggcgtcgattttgattaaaatcttctcccgggaccacaacccggtgctgctttccggctggcaatttttcaccggcggactgaccatggccatcgccgccttcctcttcggcggccgaatgacggtgggaaccccaacatccttgctgctgctcctgtacatggccttcatctcctccgctgcctacaccctgtggggtgttctgctgaaataccacccggtgagccatgtgacggtgttcaacttcgtcacaccggtggccggcgtgctgctctcttctgtcatcctgtcggaacacggcgtgctgaacggctccgtcctcatcgctttggtattggtgtgcggcggaatcctggtggtttctcgggaataattcattgtgcagaatattgcccttgattccacgcggtggtataattcaagcgatgttgcagttcataaggggatggacggaacatctatgactaaaagaaaatgtttttgtcggaggatttacagggggtattgagatgactcaacgaaaagcagaagcgctgattgcgctgggactcactttacggggaacgtcgctgctgttcagcaaactggccatgcaaaccattgggccgttcacgctgtgcggcatccgtttcctgatttcatttgcagtggtagcactaatctttcacaagcagattcgcagtgttaccaaaaaggaagtattgcacagcgcaattgtgggtttcctctatttctgctgcatggcgtttgaactcttggggcttcggacaacgccgtcctccacaactgcttttattgaaaatacgtcggtggtcatcgtgccgctgctggcggccatcgtatatcgccggctgccgaaacgcatggatatcctgtgtgcgctgattgctctcgcaggcattgcattcatgaccctgaagggcagcaagctggcatttacgccgggagagctgttgatcttctgcgatgcggtaagctacgcgattaccgttgtggtcatggatatcgttacggtggacgacaacgcgctgaacatcggagttttccatctgttcttcatcggattcttcagcctgctggcggcgttcgccttcgaggatttcaccatcccgacctctgcgccggagtggggtgcgattctgtacctggcactggtgtgcggtgccatcggtttcacgattcagccggtgggacagaaatacaccacgccggagcgagccagcctgtatgtggcgaccaatccgctgacagcggttattctgggcgttattttcctgggcgagcggttcaccttcctgggaatcatcggctgcggattaatcctgctgagcgttttcctgccggctgcgctggagaacggactggcgaggaagaaggcgtagcgaacccttctcaatgcagatgctcttcacgaatttgcgggtcttcccgtccttcgggaagtacacctccaggaaatctccttcgttggagcggatgacgcccacgccgaaattccggctccggacctccgctcccgggacgaattccgccgccttctcccggaactctttggaatccatccggaacacgtctttttgtttgccgctgcggtccggcagtttgccgaagcattcccgcaagaacggggaggaacagtctccgtaatccggaagaatcagttcctcccgggcacgggtgattgccacatagaagatgcgccgctcctcctcccggtcgttttccgaggaaggaagcacatccctcacggcgtccaccaggattacccggtcgtactccattcccttgctgccgtgaatcgtgctgagaatcactttggcatccgctgactccaaattcccggtgccggaagaaatcatctgctccatttcccacagcttctgcagaaaatccgcaatggtatccgcgggttccgcaagcgcttccagcacgaaaagcttttcgctcttctcgttccggtaccgaatgccggtgcgaatcatttgcagcgcctctttcgcgttattccgaaggcgcatatcccgcaagttatcccgaagaatctgaaggtcttccttcttctgccgtcccagaagcggtgattccgtcagcaccgccaggatgggatcctcccgccgaaagtccattcgccgcaccgcgtctcccactgcgtttttcgaaatccggtaattcagcttatagtaaattcgccagaacagctcgctgtccgccggatgcatgacgaatcccaggatatccttcacatctcgcaccacccggctgctgaagaacagggtgtccagccctcgatttcgaaatgaaatcccggcatttctcaggtgatacatcagagggatggcgctgtcattattccggtagagcaccgccgtttcccgctccggctcctcccgaatccagtcggcgatctgccgatactgatcggaccgccgcgccaccggttccacccgaacacggccggaagactccgccgcgggcttcatgtttttatcgtaccgctttcggttgtgccggataaaacgatccgccagggccacgatgtcctttccggaccggtagttggtctccagccgatacactttacccccgggataatggcgctgaaaatccaacagggcctccgggtacgccgcccgaaaaccgtagatgctctgatcttcatcccccaccatgaacagatttcccccgtcctgcgtgagaatctgcagaatccgatgctgcagccacgaggtatcctgcgcctcgtccaccatcacatagggatatttccgccggtaatggttccgcacccccggcaccttctccaggaatttgcaggcgtacaccagctgatcgtcgtaatccatggcgttctgcgccttcatgctccggacgtaagcgtcgtacaagggcttcgccgggtaatctccgattcgaagcttctcaatctccccctccgaaagctgcatattcttgatataggtaatcttctgcgcgaattcccgaatgtcgctctccccgggaaaagaatctcccgccacgcccacgagaatccggcgcaaaagcagcccggtgtccgtcaaatcttccggtttctgccgtcctgttttgtccgcataaaagcaaacgacgcggtagcagaagctgttgatggtcataaaatccacccgattatttccgtactgccgccggaaccgctgcttcatttcctccgccgcattgttggtaaaagtaattaccagcacggaggtgtccggcacgccggaacgaagcaggttctccaggcgggccagaagcgtggtggttttcccgcttccgggcacagcaagaagcagcgagcttccgctgcaatccgctgcggccgctcgctgctgttcgtctaaatgtgtatttccggtgaatgaggaatgattcatacctctccgtctccctgttaattttttacaatctttccgtacaggagtttcgattccaagtcaatctcctctgcgtgctcgtccagagtctcgccggcaattttcttgtaatccgcctcactggtcgcccctcggtctttcatcagctgctgttttgccgccttcatctcctcggaagaaacgtaaatcttcttttctctggaaatggaatgaagaatcagcttctccttcacattctcctttgccagcttctccacctgcgcttggaattccgattccgtaaaatccgactccttcaagtattccttatacgtcaatccgtattcccgaatccgcttgtggtactgactggtgatgtacttctcttcccgcttcagctgcgcttccggatacttgcttacctctgcggatttcaccaattttttccattccttcgccgtcaaggtatcttcctccggcatatcgaaggacacgtaccgatccagcaacagaatattgtatccgttatagcggttcagcgttgcgctcaaaagaaatagaaggaataccagaaacaccagcattcctactataattttcttcttcttggaaagccggcgaaaacgggaatgttctcgccatttctcgtgtgcggatgaaaggtggtcacgaaggctagttctttccggaacttgttgtgacatcgttgcttacctccttatcaatcagtcgcaccttgttcgtcttatctttgcttacaccggaaagttcggtgtcgttctgaacggccttatcgataatatcggtcttcttgttgttcttcggggtcgccgtcgcaatgaccttgttttctttcaccgtagcgaccttcacctgactctgttctccgttcaggaacacttccgtctgattggtatccacgtgctgccattcctcactgttggaatctctgtagaatactcggtagttacccacgttgctctccgctgcggtgaactttacttgggtctttccgttaacctccgaagtaaccacatccgtcacctcattggatttctcttctttctcgatggtcttgctgccaatccggaacggaacgcattccgtatatccgcgatacttgcccttgccctttacgatgacatagcctgtacctttccgaatgttctttgcgtacaccagagtgtagtcctgattctccgtgagcttcgtcacgccatcctgaacggtcacttccggctccaccggattgccggtatacgccagctgctcgtaatccatggtggcttccatcttcttgttgccgttggtgtttttatttttcggaatgtacatatagttggagtccactctgccccgaattccggaaatgcggtcgatactgctgtactgccagtaggtataatcttccgaggaagtgttattgatattgtactgcgcaatccacagctcgtggccgtccttcaccagcttcgccacatccacaccggacgtcttagacgtcaagctctgcgacacgtacaggcaggtggtatatccgtgatccctgcagtaattgaggaacgcgtcggcaatcagggtcagctgcttccgggcattggcggatccgccttccgaaacccagcctgcatacgccgcatccaatctgccgttggagaactccatatccattacaatcggaagctccagctttctgccctcggcatacttgcatacttcctttgcctcgattaccgcttcttccgtggtagtcgcctgggagtaccaatacacaccccgggccactccggcctttgccgcctcgtccatattcttttcataggtgcgatccttaatcatttcaaaggaattctgtccggtggctccggcacggacaaatgcataatccgctccggcatgcttcaccttctgccaattgatgtttccctgccatacggaaacgtcaattccatagaaagcgcggttagacgacaccttgcccggctggcgcacggtgtccttcgttgggagagcatacgtcggaagagtcgaaaagaccatgatcatcactacgaccacagcaacagcaattcttcccgctttcattgttccgataaatcctctcaacatccactgcctttctatcctacaagtgacttcctataaaatgaccatattattatagcatacatgaggcggtttttatgatgaaaatatgattgaacctgcaatttccttttcacagtttttatattactttaagttttcattaagtttttttcagtatattggtactatcaaatgcagcacgacaatgaaggaggattccccatgaataataatttcaacgaatccaataccgacttcattctgatcaatccgaatgaacagaatcgggatgaccataaaaaaaaccgaccgcctcggcagaagcggccgaacgaacatacttttaggaaacggaccatcgccacggtgctgagctgcgtactcatcggcggcgcctccggctttgggggtgctatgattgccgagcgcaccggcgctgctaccctgctggaggggaacggcggagaccggacggtgagcgtgaaaaacgtgaataccggcaagaaaatgacggcggcgcaggtctacgccaagaacgtggatgcgacggttggaatctccacaaaatccaccacccggaacatgttcggttactccacggagtccgcggcttccggttccggcttcatcgtttcatccaatggatatatcgtcaccaactaccacgtgattgagggggcggattccatcacggtttccaccaacaacggcaaaagctacgaggcgacggtgcggggctacaacgaaaattacgatgtagcggtgctgaaaattaacgccaccgggctccgagcggtaacactaggcaagtcctccgatgcaaacgtgggggacgaagtggtgaccatcggaaatccgctgggcgaactcactttctcactgacctccggcgccatcagcgccctgaaccgggaagtgactttttctcagaacaacaccatgaagctgattcagactgacgcggccatcaactccggcaattccggcggcccgctgttcaatctgtacggagaagtcatcggcatcaccaatgccaaatactcctccggcagttcttcctcagaggcgtccatcgacaacatcgggttcgccattccgattgatgaggtggattccatcattaaaaatatcatcaagaacggaactaaaaacagttccgattcgtccggcaattccggaagcaacgattcctcatcggatttcttctccacattctagctttccatccgggggtgcacaggcggcaactcccatggatatatatattttcctttctttggcgaggccggcatgcaaatgccggtttcgttttttgtcatttcttaagatttccgaaagcttttcttaaatttcacccgcctttcttgatatcctcccggcaatagtgtaaggttatatcaattcaagttgaacatgaacgggataccgtttctaataacgaaaggagtattaaatgaagaagagattgatatctgtgattttgctgagcacactggtattgctgtgtgcctgcggttcttcctcatccaaaccggaggtgaccccatcgaagacggtggatcagtttctcaaaggaattcaggatgaggatcaggatgctatcaaaaaggtatacgaagagagtacctttgatcttggcgccgaagcttgggacgacgacgatgacgaagaaggcatggacaccgcaatgaacaaagtgctcaccgacgacttctacccaagactgattgatttcgaatacaaaatcggcgaggaagagattaacggcgacgaggccacggtaaaagtagatatcaccacctacaagatgggcgacgcattcgtggccggtttcaaagatttctttgccggagccatggatctgtacaactccaacgcttccgacgagcaggtcagcaaggtgatgagcgagaagctgcaccggcagatttccgcactgaagaaaaaggaatacaagaaaaccgctaccttccatctgacgaaggaaaaaggcgtatgggttgtggaagacatggacgacgacaataacgaagccgctctgaacatcctgtccggcggaatgctggatgcggagaactccatcgaccgcatgacagatgactaatctatatttccaataaaacacgaacccccggcagcaggtacttgcataatcgcaagccctctgccgggggttttcaattgttttttatcttttcctgcaggaacgctccttgctgtaatccaccaaggtatcgctgccccggccgcttcggacggtggaaacactttttaccatgtaccgcccctttacaatcttccgcttgcgggtcaggttcaaggttctcccattggcccgcccggtccatctggccacggtggtccagtgacctttcgaagatttcagcaggtacaccgtggtgtacagcgtggtcttctttgcggcaccctgattcacccggacccgaacatgcgcccggtcttcccgaatccgaaggcgggtatccaccgaaatggagcctttttttgccacatagaccttatccgtatgagtctttttatgttccggctggtcgccctgactgccggcaaaaaccggcgcggacattgcggtcatcagtacaacaaccagcgtgaatatcagcaggttccgctttctcattgctgcacccctttctctttactaagtcacatatttactaagtcacgcatatacttgccttattctaccatgaaggcacgggctttcaaataaatttttcctataaaaggattattcactcgccgaatgggtttccggacggtcttgttggcgtggctcgacgaaggattaaggctctgccggcagggcgacgccaac

SEQ ID NO: 3059 - DNA, 7790 bp, Unknown
  16S sequences of unknown bacteria
agcttcaccgggtgtggcttcctcacgcgacaattctgccatagtgccgccgtccggtattcttcctacatgaacggtttttgacggagttgaaagcgaaatcatatcgacaatatcgccgttttcgtcaaagaggtaaaggtcatcgttgtttccgatcgaaagcgtgacgctcagtccctcgatgcccttgctgttcgagtagtctgtcgagcagataagagcgtatgagttggcgggaatggttgtagcttcaaactccacagctttcttcgggttcttctttttgccgagagaccagccggaaagcgtgatatccttgtcagtcgtgttgtaaagctccgtccatttgtagtcagtgccgcggaacatgacctcgttgatgacaacagtcttttcttccgcctcctcagccgactgaacgaacgtgaccttgaccttcgccgtgtttgattcagcgataagataaccgtcgtcgtcaagggagcattcctcgtatgttatctcaccgatttcgtagccgtcagcgggagtaagctcgaggggaattcttctgccgacgagatatgagcggctttctccagattccatagcgaaccaaccgagccttacatttccctcgccttctgtttcaagggaaatctcgctcagtctgctcttcgagtagtttttcgtgtatttcagaatgtttgacgcgcggcttattgagaattttctcaaaacgtcaaatccggagttccaacttccgcgagaacctccgccgactctgacagcgcttatcgacactgccgtttccttgccgaaataaacctgcatcaagtcaaaagtgtgctcgcatctttcgggagaaacaacggcttcggcgagggtacacatatagttgtagtaaagatcctcaaactccgagtttttcatgagagagttgtagacgttcttcaaaagcagagcagagccgcccttcatgaacgaatacggatctccggacgcgtcaaaaccgccgtatccgaacgagaggtcaaggtctttggtaagaaatctccatcttccgtcgaacacaccctcagcgtcgaggtcatatccgtttttgttgtaacgccatgcgcggagattattgtcgggccagtcagtgtttcccgtgtacgcttcaaaagctatgtactcgatgaagttttgtatgtctatcatctcggtggcttttttgtagcattcggggtctgtcatatccgatttgactatatatttcagcgcggtgtaaagctcttcaacctcaccctccggaccgtcgtcaagataccatcccgtggttctgtaaagctccggtgcggtacccttgagcgtggtaagatattcttcaggtacgccgtaattcgcgaggaaaaagtcgacatcgtagtcctcaagctgagttacaatgccgtagtatctgccgtttatgtactctactaccggagtgatggcaggtctgtcgagatccgttccgtcaaggagcatgagaagggcaggggtcgtgaatatcgcgttgccctcgttgttagagccgccgcggagaagcacggtatcactgaaagcaaccggagtaccagtgtgagagccgcgaagtccgtcccagaaggaatattcaaaaactccgctgtcgggggtatatgcttttcttgcgtaaagtctgagggatttttgtgtgtttactctcgtgtagccgccggaaactcttacgccgcagttgacgttaagtcccacagtgccgtcctcgcgaaataccgtaagtccgacgggtctttcccattcgataccgcgtccgtagtagtttgcgttggtgtaccacggctgccatcccggaggattcggctgacttccgagctttcccgggacaagaatgcccgtgtcattgctgtagaagttctttttgtcggagattatagaatacaccggcatctcaaatcttccctcgggcgcgctcatgtaaacgaaattgcacacctccgagacctgctcaccatccttgaacagcgcacagcggaggatagcctgtttggtagttccgtcgcctgtgtcgatgtagtcaagctcgagggcagtgctggcttcgtatttgtttgagtcctttgtcggagcggagctgtttgttgtgtagcgcatttccacgccatcctcggcttcgtaagcaaaggtgacgtctttaggttcgctgccgtccgtgtatatcgcgggagaggagcttgccgttatcgaggctgttatttcgttttccgcgttctcgattgccgcaacgtccgcttcgttcacgggagttgttccgagagacgccgcgcatcccgtcaggcagagagcaatcatgatgattttcagaaagtcgatggcttttttgaatattcggttcatatatttgaagcgccgccgagacttgtattaacaaacagttataaaaaatcaacatttacagcgatattggtgtgacggatgaacatttttgcagcttatccgagtttgtcctgcataacgggataaatattgcttttacatgaaaactatcttgataacagccggcggatttgtgacctcctacaataaaagggcgatattattttgaaatgtaaaaaaacaacactatactctattatatactaacgatttgaaaaaatcaatagttatttccgtcatattcagcgaaaatgcgcaaaattaacaattcagagaatctcgaatttcctcttgttatttttcggatattatagtataattataataggttagaatttagtcttcataattgtaatagatacggtgaaaaatatgccagatatcaacgaaaaactcgatacatcggatataagcctgctttaccccgacgccgatactctcagacgacatatgctcggcgaggagaacgcacgcctttcccatataaccacggagcagcttgagcttgactacctcatggatctcaaaacctgcgatttcggcagcttctatacctgcgacccggaggttatactatacagacaggatacattcggcgatatgatagaaaatcccgagctgtcgcacatccttctcaaaatgatacctctgctcaacgatataacggagcttagacgcatgagcagtgactccgcggcgtcaacggaagcatatctatacagcattacggaagtagagctttacacgagcctgcttgatttgctcagagacaaccttattccgcttgcacccaagttcaagagcactgcgttcagacgtttcgcggagagaataaacaccctcacgggaagcgaatactacaaaaacctcaacgatcagctgaaagagcttacatcaagagtgcgcgagataaaaagcgtgacgataggcgtaaacttcgattcacagctcagagcaagccgcgcgggagttctctcgataaacaacgaatacttcaagtccggtgagcttcttgacaaaatgctccgtcttgacttcaaaaacgacgagatgacctgcatagctccgctcatcccgttcaaaaagggtcagtcggacaatcagcagaacgcactcgcaaacgcattcaacggcgcgataaacgatgtcttccgtcagtccatacgctcgtggaagaaagttattcagcattatgtgcttgagaacaccgacttccttatcagacttatgccggagattgagtttgttacaaaggctaccgagcttctcatgagacttaaggaaagaggatgcccgctctgccaccccgttataaaaccgatgtcggagaaggcgtttgacgcgaaggggctgtgcaacccgatagtcgccatgaagctcgacgcgcccgttgttccgaacgacttcaagttcgacgaggacggcatgatatatgtgctgacaggacctaacagaggcggtaaatccgttattacctgcgccgtcggtatcgcgttcgtcatggcacagctcggacttcccgtttgcgccgattcatgcgtgataagcccctgcgacgagatattcacacatttcccgacaggaagcgaagacaccattgacaagggtcgtctcggcgaggaatgctcccgtctcagcgcgattttcgaggaagtcaccgaggacagccttgtgctatgcgatgaatctctttcatccacaggctcttttgaagcggcttatatcgcgtccgaggttctgcaaggcttttctatggcgagatgccgcggaatattctcgactcacctgcacgatcttgcggcttccgtggattcaatcaacgcgtcttgcgtaccgaacggcggcgtaaagatagacaatctcgttgcggctatagaaaaaggctcgcgcagcttcaagattctccgtgaaaagcctgacggaaagagctacgcccgcgatatcgccgaaaaatacggactgtcgctcgacaagataatgacaaaaatcaaaaaataacaaaggtaaaaattatgacagacctgcttaaaatactggaaaacgacgcgcggctttctcccgagaccattgctctcatgcttgacaaggaagtcggcgacataaagaaaatgatagacgaatacgagcgtgaaggcgttatcctcggctacaggacagagatagactgggacaagaccgaccgcgagtacgtctccgcaatgattgaactgaaaatcacaccccagagagaccgcggatatgaccacgtcgcgcagaagatatacaactaccccgaagtcgagtcgctgttcctcatgtcgggaagctttgaccttgcggtatttattaaaggaaagacaatgcgcgaggtggcgttcttcgttgcggaaaagctcgctacaatagaggacgttatttccacctccacgcactttgttttgagaaaatacaaggacaacaatattgtctacggttccgttcccgttgatgagagaggaaacgaattctgatgcttgactactcaaaaataatatcggaaaccgtgcaggacataaagccgtcgggaatacgaaagtttttcgatttgcttgacggaaggcgcgacgttatttccctcaccgtgggtcagccggattttatcacaccgtggcatatccgagtcgcggcgatagaatcccttgagaacggaaagacctactacacgtcaaacgccggaacaatggagctgcggacggaaatctccgactatatgcaccgcagattcagcctgagttacgacccgaaggacgagataatcgtcactgtcggcggaagcgaagccattgacttgtgcatacgaacccttgtgaatcccggagacgaggttataataccacagccgtcgtttgtctgctacggacctataacatcactcgccggcggagttcccgtgtatgtcgaaacaaaggaagaggacaacttcaagctcacccccgaagagctgaaaaatgcgattacgccgaaaacaaagctgctcgttctgccgttcccgaacaatccgacgggcgcgataatgactcgtgaggaccttgagaaaatagcggaggttctgcgcggaacggacattatggtgctctccgacgagatatactgcgagctgacatacggcagggaacacgtctccatagcctctcttgacggaatgagggaaagatgcgtcgtcgcaagcggattttcaaagacctacgccatgacgggatggagactcggatatactcttgcgccgcgtgaagtgaccaagcagatgcttaaggttcaccagtacgcgataatgtgcgctccgacgtcttcacagtatgccgcggtagaagccatgcgaaacggagacctcgatgttgacatgatgcgtagtgagtacaaccgcagaagaagatatatcgtagccggacttcgcgggattggctttgagtgctttgaccccgaaggcgcgttctatgcttatccgaatgtgtcgcgatacggactttcctccgaggattttgcaaggagactgcttgacgaagccggagttgcggtagttccgggaacagctttcggagactgcggagagggatttgtccgtatttcctacgcctattcggtagagcacatcgcgaaagctcttgacaggatagaaaaatttgtaaataatctttgattttgcgaaaaaaatcgaaataaataggaattcacctattgcattttaaaagcaagtgtgatataatacctaatgttgacttttgtttaatgaatccattaatggaggtgtaacttattatggcaaagtgctgcatctgcggaaagggcgttacatttggctgcaacgtatcccattcacatcgtagaacaaacagagcgtggaaaccgaacatcagaaaggttaaggctgttgttaatggtgaacatacaacagtaagcgtatgctctcgctgccttcgttccggcaaaatagaacgcgcgtgaacaaaataaacattatttgaaaactctcccccgatttttgtctgaggagagtttttaattatcgaaaccatgaaaaaagctattgcacttgtttcctccgccgcaccgttttcccgtgtgcttgaggaggagtttgaagttatccatatgccgcatgactgcgagatagacctgcccgtgtcgactcaccccgatatggtatgcaccgcagtaggagagagaatattcttcccgaagtcatacgccgagagatatccgagtgttgtcgagaaaatctcgtcgctgagcggacttgagccggtactgtcaacctctccgcgcgggaagaaatacccccttgatgtttctcttaacaccgctgtcatcggaaacactctcctgtgccgcagagcttcggcttcatcggagcttctcgtatatgcgcagagcctcggaatgaccgtgcttgacacaaaacagggatacgcaggctgctcgtgtcttgtctgcgaaaatcacgtctatacgggcgaccgaggaatttcagctttgctcgaaaaacacggcataggctgtactcttgtgcgggaagacatcatgcttgaggggtacgactgcggatttatcggcggctgcggagggtatttcgatgggaaaacctacctctacggcagtcagcacggggaatatccgaactgtgtcgacctcgctgacggaaaactgcacgactacggcggaataaaatttttacctataaaatgaactgtggagataaaatgtacgaattcataaacaatactatgcgaaaagcggcggaaatcatgctggaagcggatgatatttcgtcaaaagtcaaagtaaaaccgggagacgcgaattttgtcacggcatacgacgttgcggttgaaaaatacttgacggaagagcttacaaaacagctgcccgacgcttcggttatcggtgaagaagaagccgccgagaacacctctgcgctgaaaggcggactttacttcataatcgaccctatagacggcacgacaaacttcatctacggcagaagatacagcgcgatatccgtaggactttgcgacagaggtgacatggtgtacggcgcgatttttaatccctacgccgacagactttacttcgcggaaagaggaaagggagcgttcatgacggttaaaaacaaggacactgtcaagctgagcgtgcaggataaacctctttcaaagtgtctcgcggcgttcggtacgtctccttaccaaagagaccgtttcggctacgctacatttgacacggcatacaaaatgtttatgagaactctcgatatcagacgttccggcgcggcttctcttgatttggcttcggtagcgtccggtacgatcgacatattcttcgagtattcgctgtccccgtgggattttgcggcaggg

SEQ ID NO: 3060 - DNA, 32759 bp, Unknown
  16S sequences of unknown bacteria
cccgcggagaatttctgcggggcgttttaacgtatatatttttttcaggactgattctgagtcgccgcggattttcccgcgagagagaagagataatagaacacggagaaaaagacgaggtcgagaaggtaaacgacaggcagaatcacatatttgagcagctcgctcggttgtttgagatccactttgagatagacggcgatcatgctgacgacgatgacgccgatcacgaagaggatggacgcgttcaggatataagcggggtgcttgcttctgcgcgcctgaggccggtagccgcaggcgtagaggatcgtgcagagcagaaagcccgccagcccgatgccgcacccgacggcggggtaaagtccgcttacgccgatcttgtcttttacgaaaaagataacgaggctttccgcgagaagaatgcagaaagtaatgagggcggctttgaacaaggtcaagcccttgttaaatacggccgcgggcgcttcggacgcccctttctttttttcgccgatactgcccgccgttttaatgcggatgccgtctgtctgcgcccgttcccgcagctccccgaaatcgatctttgcgctctgtttttcggcgggcgcggatcggggcgccgaaagggcaggctgcggctgttccaaatatccgttgttttcatagcccgaagggggataagcggcgggatagggaggatagggcgcctgtgaagccgcgtattccgcttcatagcgtcgggaattgaactcccgccttgccgcgttcaaggcgttctcgcggctttctagttcgagctctttttctttgagcgccgcgagctgtttgtcgatctcggcggttttgctttgaaattccgccgtcgtttccaactttttcttttcgttttctatctgcgctttttcaaattccgttctctgcttttccaggtctgatttgagttcgtcgagttccgcctgttgcttttccaattccgattttttcgtttccagatcctgtttttcgatttggaaagaatttttctcctcgttgaaacgcatcagaccttcgttgaactgtttgacctgcgcgttataggaactcagtctgtccgcaaaatcgaactgctgagcggcaagagtgttcttttgggtcatgaaatcgagctgctgttgattataaatggcctgcctggaagacagatccttctgctgctggcggaacgccgcaatatcgttttgcagctgctcgccgctgcgtatcagttcgctgtgccgcgccgcaatttcttcccgctggcgctgaatatcgaccgcggaagtatccgtctgcgtcttttgcgtttcgatcagccgctcgcgctcctgcaaggcatattccttttcggtgagctcgtaatttcttttatcgagttccgcctgcttttccgccgcctctttttgcgcgttttcgagagcggatttttccgtgtttaaagtttctaatccggattgcagttcggtttctttttccgcaagcgcgttctgttcgtccgtaagccggatgcgctgcgcttcgacgctttctttttccgcaaggaaggaatcccgttctgcttcgaaggcgagtttttcttgctcgtattcttcgcgttccgctgcaagggcggtttcccgttctttgatcgccgcttccctcgtttccagctcaaagagcgtagaggaaacgttcgcttcggaggatttcatggaatctgtcaattcgcctatcgcttgttcgcgggcggaaagttccgattccttttcttccatccgggttttcagcgcgtccaattcgttcgatttttcttcgatttcctttttcgcgctttccagtttttctttttgttcgtccagctgcgcctgctgcgcgcggatttctacggaacgattataatattcggctgttttgttttcgaggtcgctttttaacagggacatcgcttgctcgtgggagctgagagcgttcctcagcgccgcaatatccgctttcttttcttccagctcggcgcggacttcgataagttcttcgctttcctcctgcttgctttccaattcgaactgtctttgctgcaacagcgctttctcttcttccagctttgcccgttccgattgaatgagggagaggaggttgtaattttccgaagtcttttcgtcgagttctgaacgaagcttgtccaaagcctgtgttttttcttcgatttccgctttttgaagcgcgatctcttccttgcgggcttctatttcggcttccgcttcttccaaagcgcgctgtttttcggcgtattgctcctcggcttcccgtagggcggtttcccgtcgtgccagttcgttttctttatccgccgaaaaactctgcgcggaggaaacggcgttctcgcgttcggcgagagatctttgcgcctcttcgagttcgctgcgcttgtcttccagctccgcttgcagctccgtcagatcttcctgcttccgggaaagctcctcctgcatggaaaagagttcgttttgtttctcctgcaattcttccgcctgcgaggaggtttccgcttttacctcgtccagctcggtgatcttgtcgtccagctctattttctgggattcgattctattttttaaagcgtctatttcctcgcgctgcctttcgagttcttcctttgcttcgaggatttcccgctgcttttcgttcagctgcatttccttggcgtcgatctcgttctgtttttcgctcaggatgcgttccttttcttccaattcttctttttgagtgcggatcttgtctttcagctcgttgaagtcggatttttgtgtgctcaaagaggagctctgcacggacagaagggagcgttcgcgctgcaattcgtttttgagattgttgagcgcgctgcgttcgtcttcgagcgccgcttcccgcgccgaaagcgtctttttaatatcgagaagctctttctgcttttcggtgataaaggaaaagtcgtagtgcgcgttgccgtcggaaatcaggctgtcgatgatggttctcgaatattcccattcggagagatttctctcggtgatttccttgcccgaatttgtcagacgaaagtattttcttctgccgccgttagaaaaatcgccgtaatacgattctacgtaatgcagcgtttccagacgttttaaggcgctgtaaagggtaggctgtttcaacgtatacagccctccgctctttttttctatttcattgatgatgtcgtatccgtatttgtccccgtcgtaaagacttctcaaaatgatggtgttgatatgccctcggataagatcggaactgatggtgattccctgttcctcggcgccgcccgtcagcgaaaattcatcctcgggtatttcgtctgcggcggatgctttttcctgttgtatcatcggatgcctcctcttgcgtagttggtgtggcagagtatatagtttgtctgaaagactactttgaatatcttacataaagtattatacaacaaacacccgtataagtcaatagatattcggcaaaaacttacctttttgtcgaatttttgcagaaaaaaccggcgttttttctcgtgttttgtcttaaaaagagcccgcccgaatcattgacatttttttcttgccgttgtataatatttttatgaaactttacgaacatataaaaacattcgatgtaaaatattgcgatacggatttcaaagacgaattgaagccttccgccgtcttggcgtatttagaggaagtcgcctgttccagcgccgacgaacttggcttcggctattcctacttaaagccgagagggtacgcttttatgctgaccaatatccgctgcgagtttctttctcccgttccgctcggcgcgcatatcaccgtaaaaacgtggccgacgcctccttcgtacgtggtattcggcagggagtatcaaattttatccgagtcgggcgatattctcatgaacgccacttcccgctggtgcatggtcgatatgaaaagcggcaggcttttgcagtccaaggttttggataatcaggactattccgcttataacccttcgcgcgcgctcgacgtcaatcgctggaaacttcctccgtttactcccgaagagggggaactgcggttttccctgaccgtggcgaactcggaatacgaccataatatgcacgtcaataacactcgctacgccgattattgcttcaactgtttttccgtcgaagaactggcaaaaaaacaactgaaaggctttgcgctcgggtacttgaaacaatgccgcgagggagatacccttcgcttctttcgcaaacagacggaagaagccgcctttttggttcaaggcttcaatgaacaaaatgaaatcgtcgttcagtcggaaatttcttttgcacgatgacgaacgccgccgtttgatgccttcggaaacttgttttataagtaaaaatattcatttattccgtataagcgtttagaaacgcataaaatttgaaaatgtttgcaaaaaaattcataaagttttagaaaacgggcaaaatttgcttgacgaaatatagtaggggtagtataataaatcgcgataaaccaaagcaggcgcagtcgtcgaagcttacaggcgcttttttccgaactgccgggcgccgctgtgtgtcccgcgattcttataaaataaataaagggcgcggggaaacggagaatgcgccggggaacgacgtcgtttttccggtgccgaaggtcgataaaaatcaagttttactgataaaaatttattcggagataaaaattatggcaaagcaagagaacatcaagaaaatcgtactcgcatactcgggcggccttgatacgtccatcatcattccctggctgaaagaaaattacggggatccggaaatcatcgcagtttccgcagacgtagggcaggaatcggaactcgaaggattggaagaaaaggccctcaaaacgggcgcttccaagctctatatcgaggacctcaaaaaggaatttatcgaggattatatctatccgacggtgcaggcgggcgcaaaatacgaggataaatatctgctgggcacttctttcgcgcgtcccgtcattgccaagaggctcgtcgagatcgccaaaaaagaaggcgcggacgctatctgtcacggctgtacgggcaaaggcaacgatcaggtccgtttcgaactgaccatcaaggcgttcgcccccgaaatgaagatcatcgcgccttggcgcatttgggacatcaagagtcgcgaagaggagatagagtatgcggaagcgcatgatatccccttaaagatcacccgcgaaaccaattattccaaggataaaaatctttggcatctttcccatgaggggctggacctcgaagatcccgcgaacgaacccgattacgataagatctgcgaactcggcgtatcgccttgggcggcgcccgataaatccacctatcttaccattcacttcgaaaaaggcattccgaccgcaatcgacggcaaggagatggacagcgtggcgctcgtggagaagctcaacgaagtgggcggcgccaacggcgtggggctttgcgacatggtggaaaatcgtctggtgggcatgaagtcccgcggcgtgtacgaaacgcccggcggcaccattctttataccgcgcacgagcttttggagtccgtttgtctggataaggcgacgatgcactataagcagctcattgccgtcaaattcggggaaatggtctatgacggacagtggtttacgccgctgagagaggctttgaccgcattcgtcaacgaaacgcagaagacggtgacgggcgacgtcaagctgaaaatttataaaggcaacgtcatgaacgcgggcatctcttctccctattctctgtatagcgaagcgattgccactttcgacgacgacggcggcgcttatcaccagaacgatgcggaaggctttatcaatctcttcgggcttcccttgaaggtaaaagcgctcctcgacgcaaaaaaactgaaataagccgcctgagcgcggttttccgcggactaaaaactatgtataacgtatttatagacggaagagaagggacgacgggcttgcagatatacgatagacttatgtcgcgcaaagatattcgtctgctctctattcccgaggaacttcgaaaggataccgaggcgcgcaaagagcgcatcgatcgagcggatatcgtctttttgtgccttcccgacgcggcggcaaaagaggcggtatctctttgtcaaaacccgaacacgaaaatcatcgacgcttcgacggcgcacaggacggcggaaggctgggcatacggctttcccgaactgtcctgtgactttcgctcggccgtggcgaaaggaaaacgcatcgccaatccgggctgccacgccagcggcttcatctccctggtatatcctttggtgaaagaaggaatcgtgtcgcccgattatcctttcgtcgcgcattcggtgacgggatacagcggcgggggcaaaaagatgatcgcttcttacgaagcgccggaacgggataaggaactcgacagcccgcgccaatacggattgactctttcccacaagcacctgcccgaaatgacgaaagtctgcgctctttcccatgcgcctgttttcaatcccatcgtggcggattattactgcggaatgtgtgtgacggtgcctttgtatgcggagttgatgaaagttaaattgacgcctcaaaagctcgcggatttttatcgcggcttttatgccggcgcaaaatttatttccgtggacgatgcgccgcattcttttttgggcgccaaccatctcgcgggaagcaaccgcatggaaatttttatcggcggcaatgcggaacagctgctgctttgctcccgtttcgacaatctcggcaaaggcgcgtcgggcgcggccgttcaaaacatgaatatcgcgctcggcttcgacgaggaaacgggtttggaataatttgccgaaagggtcggaaataaagaataaaacgttcaaggaagaaagatagataaaatgaggaagaacggagtaaataaagagatgaagccgatagagggaggcgtttgcgcgcccctcggcttcaaagcgaacggaattcactgcggaatacgcaaaaataaatccaaaaaagatctggcgctcattctctgtaaaaagagagcggcgacggcttgcgtctatacgaccaatctcgtgaaaggcgcgcccatcatcgtcacgcagaagcacgtggaagacggctatgcgcgggcggtcatcgtcaacagcggcaacgcgaacacctgcaacgcggacggcatcgagatcgccgacggtatgtgcgcgctggtggaaaagcattgcgggatccccgcgagcgacgtggtgatcgcctcgacgggcgtcatcggacaaaaattgtcgctggaaccgattgcaggcggcatgaaagagcttgtcgaaggacttgaaagtacgtccgcgggcagtcttgcggcagcggaagcgatcatgaccacggacaccgttcccaaggaacttgcctacgagtttcagctcggcgagatcaaatgccatatcggcgccatatgcaagggggtgggaatgctttgtccgaacatggcgacgatgttgatgttcatcacgacggacgtgagcatttctccggaaatgctgcaaaaagcgctgtccgcggacgtcaaggattctctgaacatggtcagcgtggatagggacacctctacgaacgataccctttgcgttatggcgagcgggctcgcgggcaacgccgtgatcgaccgcgccgacaccgattataaaaaattctgccgagcgctgcgcgccgtcacgacggcgctctgtaagaagatcgcggcggacggggagggtgcgaccaagctcatcgaatgcaacgttacgggcgcaaaatccaagcagatcgcgcgcacggtcgccaagtcggtcgtttgttccaatctgctgaaagcggcgattttcggcgcggacgccaattggggacgggtgctttgcgcgataggctattcgggcgcggcggtaaacgtaaagaagatcggcgtatcttttacttctgcggcgggcgagatagaagtctgcgaagagggaatgggcatcgacttttccgaagacgcggcaaagaaggtcctcagcgaaaaggaaatcggcattcaggtaaacttgcacgacggcaattacggcgcgacggcatgggggtgcgatttgacttacgaatacgttcatatcaacggggattacagaagctaaaagcagtcgattttcgctttttcagactcgaaatttcctgcgaaaggttgacaaataggttcgggtgtgctataatagaaaaaataagcgggtgataagatgatctccaaacgggaacaggctgagtttctggcggaagcgatgccttatatcaagaaatataacgataaaattctcgtcatcaaatacggcggcaacgccatgatcgacgaggagttaaagacttccgtcatgcgcgatctcgtgcttttgcagctcgtgggcatcaaagtggtgctcgtccacggcggcggtcccgaaatttccgaaatgctgaaaaaactcggcatggaaagcaaattcgtaaacggacttcgctataccgacgcagaaacggcggaagtcgtccgcatggtgctggcgggaaagatcaataaatcgcttgtcaatcagctggaatcctgcggcgggaaagccgtggggctttgcggaatcgacggccatatgctcggctgcgaaaaggagagcgcagagctcgggtttgtcggcaaaatcaacgaagtcaatatccgcattatcgaggattgtctgagtacgggatatattcccgtcatttccacggtcggttacgatcatcagggcaatatctataatatcaacgccgatacggcggcatccgtgatcgcgggggcgctgcaagcggagagcatgatcctgatgacggatatccggggacttttggaagataaaaacaacgaggagtctttgataaagaaagtgtacgtatccgatattccatctctcgtcaagcaagggattatctcgggcgggatgattccgaaaatagaatgctgcaaggaagcgatccgccgcggtgtcaaaaaagtatttatcaccgacggcagggttaatcattccattttaatggagcttctttccgacgaaggtatgggaacaatgtttgtaaacggcgactgattttcttaaaatcagtcttattttttgaaaaagagtatataaaaggtcgataaaaatgaatttccaggaaattgaatcgaaagataaggcatatctcgcgcctacctatcgtcgtttttccgtcgcgatcgaaagcggcgagggcgcgacgctcacggacacggcgggtaaaacgtatatcgattttaccagcggcatcggcgtcaacattttcggcatgaacgacgaagcgtggaaacacgctgtgacggagcagatcaataaggtccagcacgcctgcaatctgtattatacgcagccgcagacccgccttgccgagcttctctgcgagaagtcgggcgccaaaaaagtgtttttcggcaattcgggcgcggaggctaacgaatgcgcgatcaaggcggcgagaaagtacgcgtccgacaagtacggagagggaaaaaaatacgagatcgtcacccttgaaaacggatttcacggcaggacgctggcgacgctcgccgcgacgggacaggaggcgtttcatagatatttcggtccctttccccagggctttgtctacgcaaagccgacgtttgccgacgtaaaggcgaaaatgacttcaaagacctgcgcggtgatgatggaactcatccaaggcgagagcggcgtgcacgttttggacgagaactttgtcagacaaactattgaatactgcaaggcgaacgacgttctctttatcgcagacgaagtgcagacgggcaacggcagaacgggggagatgtattcttatcaggcgtacggtattacgcccgacatagtaacgacggcaaaggggcttggcggagggcttcccatcggcgcctgtatgctgtttgaaaagacgaaagacgcgttttcctacggggatcacggctcgacgttcggcggcaatcccgtcgcctgcgcgggagcggtgagcatcgtcgaacggctcacgaaggagctgtttctcgaagtgcgcgcgaaaggcgactacttaaagacctttatctccaagatgaaaggagtcgaagaggtgacgggcgcggggttgatgctgggcgtgaaagtgcgttcggaaaagtcggtgcgcgctttggcggaggcgtgtatgtcgaaagggcttttgattttgacggcgcatgacaggctgcgcctgttgccccctttgaatatcacgaagacggaaatgaacgaaggactgaaaatattgaacgaggttttggcggaatgaaacatttattgaagctcggcgatttgtcgagagaggaaatcttaggcatactcaatttagcggatcagctcaaatatgagagaaagaacaatatccataaggattatctgaaaggcaaaaagctgggaatgatcttccagaaatcttccacgcgcacccgcgtttccttcgaggtgggaatgtacgagcttggcggctacgcgctctttctgtcggacagggatttgcaacttggacgcggcgaacccgtcaaggacaccgcgcgcgtgctgtcccgctatctcgacggactcatgatccgaactttcgagcagagcgaagtggaggatttcgcaaaatacggctccattcccgtcatcaacgcgctgacggattattgccatccctgccaggttttggcggatctcatgacgatacgcgaatacaaagggagcttcaaggggcttaaaatgtgtttcataggcgacggcaacaacatggcgaactccctcatggtcggcgcattaaagacgggcatgaaattttccatcgcctgccccgagggatatacccccgacgcgcagctcacggaatgggcaaaggagtacggcgacgatttcgaagtgacgacggacgtcaaaaaggccgcgaaagacgcggacgtgctgtatacggacgtatgggcgtccatggggcaggaagaagagaaagcgctccgcgaaaaggcgttccgaaactatcggataaacgcggaggtcatggaatgcgccaaaaaggacgcgatggtgctccattgcctgcccgcgcaccgcggcgaagaaatcaccgaggacgtcctggaagcccatgcggacgaagtattcgacgaggcggaaaacagactgcacgcccagaaggcggtcatgtgcaagcttctgcgcgactaaacgcagacgcagaggacagagaatgaaagaggaaaaaaatcccgaagcggattggcggtatcaaaacggcgattatctcagaaatctcgtttttgagtacacggcttataaaccgacgggaccgaatgacgaccacgatcactgcgcgttctgttgggtgaaattttattccgaaaagctcggcgacgacacgcaaacggaaggctatgtcgccgttacggaggaggaatacagtcccgaattacacgacatacgcaaaaacgcagacggaagcacggccgttcccaaagcggtgagagtcggaaacaaggcgtatacggcgcattgggtctgtaaagaatgtttcgcggaatttaaagtctctttgaatctgcgggtaaaaaggacaacgattgaaaatcaaaaatcttaacagagaaggaagcatatgaagaaaaccaaagtttatttgacgctgcaaaacggaaaagtgtttcaaggcttccgtttcggtgcggacggcgaaacggtcggggaactcgttttcacgacgggtatgacgggctacatcgaaacgcttaccgatccgagctattacggacagatcgtcacgcagacctttccgctcatcggaaactacggcatgatttccaaggacttcgaaagcgcgaagccctgggtttccgcctacgtcgttcgggaggtatgcgaaaagccctccaatttccgtatggaggaaacgctggacgaatatctcgccaaagcgggaatcatcggcatttacggcatagacacgcgtgaaatcacgaagatcgtgcgcgaaacgggcgtcatgaacgcgtatatttcttccgctcccctgacggagaaggacgccgctaagcgcgaggcgttgaaaaattaccgcgtgaaagacgccgtacagtcggtcacctgccaagaggtgacggaacacggggataaggattcctcccgctataccgtggcggtgtgggacttcggctgcaaagaaaatatcatccgcgaactgatgaagcgcggctgccgcgtgctccgcgttccctccttttataccgcggagcagattctcgccctccgtcccgacggcgtcatgctcacgaacggtcccggcgatcccgaagagaatacgcggatcatcgcggaacttagaaaactagcgggcaaaaaaccgattttcggcatctgcctcggacatcagctctttgcccttgcgatgggcggaaagaccggaaagatgaaatacgggcacaggggcagcaatcagcccgtaaagcatttgggctcgggcagagtgtatatttccagccaaaaccacggctacgaagtgctttctccgacggtgaaaagcggaaagatcagtttcgtcaacgccaatgataacacctgcgagggcgtggattacgacgatataaacgccttcacggtgcaattccatcccgaagcgtgcggcggtcctcacgacgcgaatccgctgttcgataaattcctggcgaatatggaaaaggagaagagtcatgcctaagagaagcgatattaaaaaagtattggtgatcggttcgggacccatcgttatcggacaagcggcggaattcgactatgcgggcgcgcaggcgtgccgcgtcttaaagagcgaaggcatcaacgtcgtcctctgcaattccaatcccgccaccatcatgacggacagggcgctcgcggacgagatctatctcgaaccgctcacggaagagagtttaaagagaattatactcaaagaaaagcccgacagcttgctcgcctctctcggcggtcagacgggacttacgatgggttgcaaactcgccaaatcgggctttctcgaaaagcacggcgtcaaactcatcggcacaaagctcgacgcgatcgaccgttcggaggacagggagctgttcaaggaaacgatggaaaaaatccatcagccctgcgttccttccgatatcgcctatacggtggaggaatgcgcggagattgcgaaaaagctcggatatcccgtcatcgtgcgccccgcgtacaccttgggcggcgccggcggcggcgtggcgtataacgaagaggaacttcgcctcatttcccataacggactcatgctttcgcccattacgcaggtattgatcgaaaaatacatcggcggatggaaggagatcgaatttgaagtcctgcgcgacggagcgggcaacgtgctcaccgtctgttccatggaaaatttcgatcccgtgggcattcatacgggcgattccatcgtcatcgcgcccgcggtgacgctcgcggacaaagagtatcagatgctcagaagcgcctcccttgcgatcatcgccgaactcggcatcgagggcggatgcaacgtacagtacgcgctcaatcccgattccttcgaatattcggtcatcgaagtcaatccgagagtgagccgttcctcggctcttgcctccaaagctacggggtatcccatcgccaaagtggcgacgaagatcgccctcggctatacgctcgacgaaatccggaacgacgtcacgggcaaaacgtacgcctgtttcgagcccgcgctcgattacgtggtcgtcaagctccccaagtggcctttcgataagttcctctacgccaaacgggagttagggacgagaatgaaggcgacaggggaggtcatggcgatcggcacttccttcgagtctgcgatcatgaaagcggtgcgcggcgcggagatttcgctcaccaccctcaaccataaaaagctgatcgggctttcgcgggaggaactactcgcaaggcttcccgaaatgacggacgaacggctcttcgtcgtctatcaggctttgcagcgcggcgtcaccgtcgacgaaattttctccatcaccaagatcgaccgctggttcctcaacaaactcaaaaatctcgtcgcttacgaacgcaaactgacgatgattaaagagtgttacaaggatatcgaggcgacgaaagaggaaggcggagagatcgacgaaacggagcggctgctgttcgattacgaaggcgaggaaacgtatcccgtcaggaaagtggcgacgggcgtgctttcccgcgagatatacgaggaaggaaagcggctcggctatctcgataaggacatcgaaaaattcagcggtcagaaacttcccttccataaaaaagccgtgttcaagatggtggacacctgcgccgcggagttcgctgccaggacgccgtatttctattctgcctacgacgaatcggatcacgacgaagcaaaaccgttcgtcgcaaagagcgagaagaaacgcatcatcgtcatcggctcgggacccattcgtatcggtcagggcattgagttcgactattcctccgtccattgcgtatggacgctcaaagaactcggttacgaggtcgtcatcatcaacaacaatcccgaaacggtttccaccgacttcgacacggcggacaggctgtatttcgaatccttgaccgcggaagacgtgcagaacgtcatcgacgtggaaaagccctacggcgtcatcatcaccttcggcgggcagacggcgatcaatctctgcgcgtatttcgcaaaacacggaatccgcattctcggcacgtccgcggacagcgtggatatggcggaggatcgggagcgtttcgaggcgctcctcgaaaagtattccatcccccgtcccaaggcgatcaccgtcatgactaaggaggaggcgctcaaagccgcggaaaagctggaatatcccgtgctccttcgcccctcttacgtcatcggcggacagaacatgacgatcgcgtttacggaagaggacgtctgccgctacatggacgtcattttggcgcagggaatagaaaaccccgttttgtgcgataaatatctcatgggcaccgaactcgaagtggacgccatttccgacggaacggacgtcctcatccccggcatcatgcagcatatcgagcgcacgggcatccattcgggcgactctatcgccgtctatccgccctataatctcgaagacaccatgttggagcgcatcatcgaggtgtccacgcagctcacactcgaacttagaaccaaaggactcatcaatattcagtatctgatttaccgcggacagctttacgtcatcgaagtcaacccccgcgcgtcgcgcaccgttccgtatatttccaaggtgacgggcgtgccgatggtggaacttgccacgaaaatcatcgtgggcgcgaagctcaaaaaactcggctacggcacgggactgtatcccgcatcgccgtacgtggcggtcaaagtgcccgtgttcagtttcgaaaaactcaacgacgttaattcgcagctcggtccgcagatgaagtcgacgggcgaagtgctcggaatcggcaagacgatcgaggaagccatgttcaagggactcgtttcggcgggctttaaaatgtgccatccttccgatcaacgtcccgtcggcgtctatatgacggtcaacgatcaggataaattcgacatcgtttccatcgccaaaaaattcggggatcttggctgtacgatgtacgccaccaaggggacggcgaaagtcatttccgacctcggcatcgacgtcacgatcgtggacagactttccgccaccgattccgtcatcaagctgatggacgaagggaagatcgattatatcgtctacacgggcaagaccgacctcgaatccatcaacgatttcatccgcctgcatcaccacgccattctgctcgggatcaccgtgctgacggcgctcgatacggcgaacgcgctcgcggacatcatcgccagcaagttcaccgaggacaacaccgagctcgtggatatcaatcacctgagaaaggaaaaattacagctgtcctttacgaagatgcagtcctgcggaaacgattatatctatttcgacaaccgcgacggaaagatcacctgtcccgaatccatcgccatcaactacgtcaatatccattacggaatcggcggggacggcatcgtgctcattgaaaattccgccgtagcggacgcgaaaatgcgcattttcaacaaagacggtacggaagggcttgcgggcggcaacgccatccgctgcgtgggcaaatacctctacgaaaagggcatcgtgttgagccgcgatatgcgcatcgaaacggcgagcggcgtcaaggaagtccgcgtgtattccttcaacggcaaggtcaattccgccagcgtcaatctcggcaaagcggaacttgcgggcaaaaagattccctgcgtttggaatgaggataaaatcgtaaataagcccgtgaagatcggcggacaggattataagatcaccctcgtcaacataggcaatccgcactgcgtcgtattcagcgagaaagtggacgcggtggacgtggaaacggtcggacctctctttgaaaactgcgactatttccccgagcgtatcaacgccgaatttatccgcgtcgtcaataaagtgacgatcaaaatgcgggtttgggaacggggcaacggcgaaacgtggtcgtgcggaacgggcgcggcggccgccgtggtggcggcggtcctcaacggcttctgcgaaaaggatacgaatatcaccgtaaagctccgcggaggagatctcgtcgtcaattatcattcggacggcgacgtggaactgatgggcagcgtaaagaccgtttacgagggcaaatttgagatttgacgaggattgacggctttcccgactcccctcttcggggaagagaataacgagcgtttacggcacgttttccgcgctttttcggagaacctgccgtcgcttggtttaaaggagattgttttatggacgttttatacgaagagagcgcggtgagcaaaaacgcggcgaaagcggaaaagaaatataaagtcatcaacgtcttttcctggatttcgctgattttgggtctgatattcgtgatgatccttcttcccaacctcatcgcttccttttccaaggcgcagcccacggaggacatttcggcggaggatatagcgaaagcgatcgcttccgcccgcggtatggcgttcatgtcgggaatgcaggtcgtatttttcgggttgctttggttttttctctattcgcttaaaaaacgggtgaacatcagttacgactatacgttcgtttcgggcgaacttaggattgccaaagtattcaacatcaacaagcgcaaatttctctgccgcattcagcccgaggaaattttgcagctaggggatgtggaaaacgaaagctacgacaggctccgttcggatccgtctaccaagcaggtcttgtttacgccgaatgcggagccggcggaaggaaagttctttctgtatattttagtcggggaaagcggcgtcaaaaagctgtatattctcgaatgcagggaggagcttctcgtcaatattctccgtttcgtaaagcgaggcatactggaatcggactacgtaagtcaggaaaagaaacagcagcagagcaaataataaggactcgcgttcgtatgatatacttggacaatgccgccacgacaaagcccgacgaaagggcgtttgcgcgtgcgcgggaatttttgacggataaatggtttaatccctcgggactttatcaagagggcttcgctttgcagggcgagctgaaaaaggctcgctccgctttgctttcgcacgtcgcggacgaggaaaatttcgaactcgtctttacctcctgcggcacggaatcggacaatcacgcgattttctcgttcgggcgccgcggcaacgtcgtcacgacgtcaggcgagcattccgccgtcgcggcgtgcgtcgcggaactgaaaacccgaggcgtggcggaggcgagattcgctccgctaaataaagacggcggcgtgaacgcggaagcgcttttggagttagtggatgagaaaacgtccttggtttccgtcattcacgtcaacaacgaaacgggcgcgatcaacgacgtgaacgccatcgcaaaggcggtgaaagcgaaaaatccgcgcgccatctttcacagcgacggcgtgcaagcctacggaaaaattcctttccgtttgggaaaagagatcgacttatattcgatgagcgcgcataaaataggcggcttaaagggaacgggcgccctgataaagcgcaggtccctgactcttcgtcccttcgtgttcggcggcggtcaggaaggcggcaggcggagcggcaccgaaaatttattcggcatcaagatgttcgagtacgcggcggaagaaaaattcaggacgatccgggaagattgcgaacggttgaaagcctgccgcgagatcctttggaatttgcttgataagaatatctttatcaggctttcgtcaacagaatcctcgccttatattctgaatgtgtccgcggcggggcttcggggcgaaatactcctgcacatggcggacgacaaaggcttgatcgtcggcacggggtccgcgtgttcctcgaatgccaaaaaccgttactcgcgcgtgatccttgcctgcggatttgacgaaaagacggcggacggcgttctgcggctgagtttttccgaaaagacgacggaacaagaagcgtcgcgggcagcggagatcctgaacgagagcgcgcgggaattgaagtcgagaatgaattgaacttcggacatgaggagataaagatgaaaaaggtgatcatcatccgctatgcggaaatgtttttaaagggcaagaacaggggctttttcgagcgggtattttcgacgaatatggaacgcgcgctgcgaggcttccgtcacgaactgcatcgttacagcgggcgatatctcgtggaggacttcgaggaaagcgaaacggaaaatatcgtcgcgcgcctgaaaaaggtcttcggcattcattcgatgagcgtcgcctttgaaacggacaacggcatggaaagcattttcgaggctgcgaaagaggtgtgcagaccgagcggcagttttaaggtggaaacgcatcgcggagataaaagctatcctttgacctccatcgaaatcagcagagaactcggcgcccgcctcttggcgcacttcaaaacgctgacggtggacgtacacgatccgtctttctgcgtctatgtggacgtgcgcgaaaacggcaccgcgctcgttttcggggaatttttcgccggcgcggacgggatgcccgtgggaacggcgggaaaaggacttcttctcatttcgggcggcatcgacagtcccgtggcggggcacatgatggcaaagcgcggcatgagcgtacaatgccttcattttcacagctatccgtacacgaatatgcaggcgaaagaaaaggtcgtcgaccttgcgaaaatcctctcctcctacaccttgggaacgcagctctataccgtcagcgtcacgcatattcaggaggcgatccatgagaaatgcgcgccggaattgatgatcactcttttgcggcgcttcatgttccgcatcgccgagcgccacgcccggcggataaaagcgcagtgcctgatcacgggcgaaagcctgggacaggtcgccagtcagaccgtcgagggaatgacctcctccaattccgtcgtggaagatttacccgttttgaggccgctcgtcggattcgacaaaaacgagatcatcgaacgctcgatcaagatcggcacttacgacacctccattcttccctatgaagactgctgcaccgtctttcttcccgattatcccgccatccgtcccaagaggaaggatattctcgccgaagagagcaaactcgacgtggaggggctaatcgaagaagcctttgaaagtctggaaacgatcgagctttgaaaggatgtaaaaaacgctttcgaaaatttcgaaagcgttttcgtttgagtgagagcatataggcgcggcgcgaaaggacaggcgccgtccgcttgaatgcggtttagtagttccaccagtcttttccgacgatttcgggcggtgtatcgggaacgacggggcgcagatcgccttccgcattctttgtcgtcacggcgggaagggagatgctttttccctttgtgcctttatagacgggggtaatcgtatagacgtaggtcttgccgttttccagtttgtcgtccgaaaaagtatccgtgaatttccccgaatagacggtattatgcgtgacagagtcgaagcggtcgatgagatattcgtattcttcgggcgcgcccgccttcaaacgaataacgacttttccgtcctcgtatttgagcgtgggcgccgatatggcgggatgggagtatttgtccgatctcgccgcgggaaaggcgctctttttgaagagttcggaaaagcggctgttcacgggggcgttctcgtctgccaggatcatattatgcgtggcataatattccgctttgtcgagttcggccttctctatccccgccggacgggggaagtcttcggggagggaatttcggtggagatactcgtttatcttcaacaacacattggcgggcagtccgccgcccgtgatatccgtgagggcgttgtcggcgtttccgagccatacgccgacgcagtcggacgtggtataggaaagcgcgtaagcgtcgctgttgcctttctccgttccgctggtccccgtctttgccgcaacggggaagggcagggagcgcagtttctttgccgtgcccgtctttgccgccgttttcagcatatcgttcacgaggtaggcggtttcttcggaaaacacccgtgtctttctctccgttttatgatacgcggggcggccgtcgatgagcacttcgcggataaagcctccttccgcatattccccgccgcaggaaaaggtggagtacgcgtcgagcagtccgttgagcgtaaaaccttccttcatgccgccgagcgccagcgcgagcgaataatcttcctcggaaattgcgagtcccatctttttcatatactccgcggattttgcgacgcccatcgaattgagtatcttgaccgcgggcacgttcacgcttttggaaaggcactcgcgcacgctgagatagccgctgtacgagccgtcgaagttcttgggctcgtagcccgcgaagttggtcctttcgtcgaggataggcgtagcgggggagataagattttcttccaaagcgggcgcgtagactaggagcggcttgatgagagagccgggaagccgcttgatctctcccaccgtcgaataatacgccttgaagccgtgcgttttgctgtcgagaacgctgtacgttttatccgtttcgcttaaatttcccaaagattcgagatattcctgcaagcggggatcgagataggtgtaaatgcggatgttgccgccaagcgtaaagtcgtagcgatcggaaagttcctccaattcgtcgaatacgcggttgaaataactcctgtcgagcgactgcgaggtcggcgcgtcgggaaggggctttttaagcgcttccgattcctccgtttcgtcgatatgtccccgcgcgcgcatagccgaaagaacgagtttttttcgccgcgcacagttttcgggatgcttaaagggggaataattgttcggggatttgatgagtcccgcaaggaccgcggaatccgcgaggtcgagatcttcgggctgcttgccgaagtagaaatccgccgccgagcgcagtccgaagcaactgtgaccgaaatagatggtgttgagatatttttcgagtatctcgtccttggaatatctcttttccagcgctcgggtgagtttaaattctttcagcttgcgtttgatggtcttttcctgcgaaagatgggtgtttttgatgagctgctgggaaatggtggaggcgccctccttaaaagagcgcgccttggcgtttttcaaggtggccttcgccatgcgcttgaagtcgaagccgcggtggctgtaaaagcccttgtcctcggtgtccacgaaggcgtatttcgctttcggagccagggaatcgagccgaaaagtttcgcgcgaggaaaacgccgcggcgttttttaccgactcgccctgcgcgtcgaaaagctctattttatcgtcggataaaaggagcttgttctcgtcgagtacggcgtctttcgtcaccgccgcatagtaaatgcttccgccggcagtcaaaacggaaaaacagccgacgatgataagcagaatcttccatgtctttttcatcgtaaacagtatctgcctatttttactttttatgatgaaaacgccgcaaaaagctttcaaagacttgataaaattcataaaaaagagtataatgaaagaaaaactttacgacaggaaatttatggaaaaaaagtaccatatcgtcacctacggctgtcagatgaatgtgcacgaatcggaaaagatcgcgggcatcctctacaaaatgggctatcgggaaacgaaagaaacggaagaggcggatattatcgtattcaatacctgctgtatccgcgaaaatgcggagaaccacgccttcggaaacatcggcgcgcttaaaaaactcaaaaagagaaagcccgaactcatcatcgccgtcggcggctgcatgacgcaggaaaagggcaaaacagagatcctcaaaaagaaatttccgttcatcgacgtcatgttcggaactctcaatctcgaagaattggaaacgctgatcgagcgaaagctgaaagaaaaaaaacgggtgatagagatacgcgaaaaggaaggggaaatcgtcgaaggcgacgagcctctgcgcaccagctatcccaatgcctgggtaaatatcatgtacggctgcaacaatttctgctcctactgcatcgtgccctacgtgcgggggagagagcgttcgagaaagcccgaaaatatcctcgcggaagtaaaaaagctcgtggcggaaggatataaagaaatcacccttttgggacagaatgtcgattcctacggatcggacggaagtacaaagacgacgtttgccgggcttttggacgccgtagcttcgattgagggaaagtttcgcctgcgtttcatgacgagccaccccaaggatttcggggaggacgtcgtcgaggtgatggaaaagcaccgcaagatctgccgcctcgtgcacctgcccgtacagtcgggctcggacgccgttttgaaggcgatgaaccgccgctatacgagcggcaaatacttatccgaaatagagcttttaaagacgcggctgcccgaagcggaggtgacgacggacatcatcgtcggctttccgggagaaacggaggcggactatctggctaccgaggaactcgtgaaaaaagcggatttcgcttcggcgtttactttcgtcttttctccccgttcggggaccaaagcggcgtcgatggaagggcagattcccgaggacgtgcagaaagatcggatcatgcggctcgtggaattggtaaactctctgacgcggaaaaaatcggaaaaatacgtcggcaggacggtggagatactctgcgaggattacgacgaaaaaaaaggattgtacctcggacgggacgagttcggccgcatgggatatttcgggagcgagaggaatgtggtgggcgagttcgtggaggtaaagatcacgcgggcaaacggtatttccctttacggcgagatcgcggcggaaaaggaaaacgaaacaaaagaagaaaacggaatctaaaaaggcgggtttgaaaaatttatggctctttcacagatgatgcggcattatctcgaaatgaaggacaaatacaagggatgtattctcttttatcgtcttggcgacttttacgagatgtttttcgaggatgcggagaaggtttccaagctcctcgatctgacgttgacgggcaaggactgcggactcgaagaacgcgctcccatgtgcgggattccctatcatgcggcggacgtctatatttccaaattggtggcgctcggagaaaaggtggcgatctgcgaacagctctccgaccccaaggaaagccgcggactcgtcgatcgggacgtcgtgcgggtggtttcggcgggtacgcttatcgacgataccatgctcgacgaaacaaagaataattatatcgcttccctcttcaaatcgggggacacggtcgccgtggcatggacggacatcacgacgggagaattcgccgtgacggagttttgcggcgtttccgcggtcgaggacacgatcaatcagctggtgaaattgtccgtggccgaggtcatctgcaacgaggatatgctaatcgcgtccaaggatctgaaagaaatcaggcacaatcttctgccgccgttttcctgttacgttccctgggcgttcaacgtcaagcacgcggagaaaaaccttctcgaacagttcgaaacgctttctctcgcggcgtacggaatcgcgggtaaggaaaactccgtcgccgcggcgggcgccctgatcgaatatctgagagaaacgcagaaacattctctgagcaatatcaattcgatcaggtgcgtcgatcataatcgtttcatggtgctcgacagcattgccgtccgcaatctcgaactcgtcagaagcaacgcggagggcaaaaagtacggctctcttttgtggctgctcgacaagacgcgcacgggcatgggggcgaggcttctcaatcagatgattctctctccgttaaaggatatagaaaaaatcaattacagacaggaaggcgtggcggaactctttaacgcttccgtggtgaggatggggcttgcggatacgctcaaagaggtaaaggacatcgaaagactgtcggggaaaatttccaacggcaacttttctccgcgggactgcgtggcgctcgcggcctccctgaacgcgctcccgtccgtcaagtttcagctgacgggattctccgcgaagatccttgcggacatagacggaaatctgctcgatatgaagccgctcgccgatctgctttcctccgcgatcgcggataatccgcccgccttgatgaaggacggggaatatatccgcgggggattcaaccgcgatctggacgagcttcgcaggatcggaaaaaacggaaaagacctcatcttgcagatagaggcgagagaaaaggacaggacggggataaagaatctcaaagtcggctacaatcgggtattcggatattttatcgaagtttccaattcgttcaaggacaaagttcccgacgattatatccgcaaacagacgctgacgacaggggaacgcttcattacgcaggagttgaaagagctggaagaaaagattttgacgagcagcgaaaaggcgctcaaactggaagcgcggctgtataacgatctgctcgacatcctttcgcagaacatttccaaactgaaaaaaatttccggcgcgatagcgctgctcgattgtcttgtcgcgtttgcgacggtggcgaaagaacgccgctactgccgcccgcaaatgatcgaaagcggcgggcaactgacgattacggaggggcgtcaccccgtcgtcgaggctatttccaaagagcgtttcgtgcctaacgacactcttttggacaacggggaaaaccgcagcgcgattatcacggggccgaatatggcgggtaaaagcacgtatatgcggcaggtggcgctcatcgttttaatggcgcacctcggctgcttcgtgcctgcgaaagaagcgaaaatcccgctcaccgaccgcatctttacccgcgtcggcgcgagcgacaatctcatcttcgaccaaagcacgttcatggtggagatgacggaagtggcgtccattctcctgcacgccaccaaagacagtcttttgattttagacgaagtggggcggggaacgagcacgtacgacggactttccattgcctggtcggtcattgagtttctgacggaaaagatccgcgcaaagactcttttcgccacccattaccacgaactcaccgagctggaaaataagatcgaaggcgtcaaaaattataaaatcaccgttcgggaaatgaacggcgcggtggtgtttttgagaaagatcgcgcgcggcggcgcgaatagaagcttcgggatcgaagtggcttctttggccggcgtacccaaagaaattaccgtacgcgcaaaaggaatcttaaagacgctggaaaagaacgacatcgccaaaggcaggattttatcgggagaggagaacgaaacggaggaggaaaagaaaactctgtcggaagcggaaaaaatcctttcggaaaccgacctggataccctctctcccatgcaggcgctgcttttgttgagcgatctgaaagaaaaagtgaaggcggaaaactgatatgtcgaaaatcaatattttacccgcgcaggtctataatcggatcgctgcaggagaagtggtggacaggccgtattcggtcgtcaaggagcttgtcgaaaacgccatcgacgcgggcgctacggaaatcgagatctatgtcgagaacggaggcaaacagctcgtccgcgtcgtggacaacggaggcggtattctcagagaggatttgcaggcggcttttttgccgcacgctaccagcaagatcgccaaagcggacgatttggagcggattctcaccctcggattccgaggcgaggccgtggcgtccatcgcggcggtttccaaaatgacgatcacctccaaagttcccggagaaaggtgctatcagttggcttcggacggcggaaagctcggggaaatcaaggaggcggcgggcgacgacggaacggacgtcaaagtggaaatgctctttttcaacacgcccgtgcggctcggctttttgaaatcggacaaagcggaagaaacggatatcactaacttcgtttcccgctttattctcaatcgaccgaacatttccttccgctattacgtcaacggcaagaagatcctgcaatcgttcgggggcggagaggaagaagcggtcgtgggagtctacggcgcatccgttctcaaagactgctataagctcgatgcggaaaaacacggaatccgcattcgcggctatatcggcaatcagaatttttccaagccgaataagacttatcagagcgtatttctgaacggacgctatatcgtcaattccacgatcgccgccgcggtagccaatgcctacgcaagctatctgatgaagaggcaatatcctttttatatcctctatatcgatgtgccgacggagatcgtcgacgtcaacgtgcatcccaataaggcggacgtgcgctttgcggacaaccaaattatatacggctgcatctattcggtcgtgtccaatgttttggacggcaattccaaggcgttggaatatgtggtgcccgataaaaacgtgtccgcgacgcaggaaactctttcaaccgttcccgagcgggcgcaaccgccgcacgacaatacgcctccgccttccttttcggaaaagcggtcgggagaaatgccgttaaagagcgataaggcttcgggctttgcctcctttacttacgaagacgcaaagcgggaaatagaaaaggcggcgccgcagttttccgttcaaaaacaaaattccgcaaaaggggaaatagagcttccctttgcgatggacgacggagaggatactttccgaaaaacccccgaagcgcgcggcggagcgatggaaaaggacaaagaaaaggaatccgatttaagggacgcctttgccgatctccatttcgaaaagaacgttttggaagtaaacgcgtcggaaacgatttccgcatcggcagagcggcagaacgaacggcaggatttctttgccgagaacaaaaaattgctcgaagagatggaaaacaaggcaaaacagaacaagatcgacgtcgcctcctgcgtatatgcgggaaaactgttcaacacctatcttttgtacgagcgaggggaggaagtttttatcatcgatcagcacgccgcgcacgaaagattgattttcaatcgcttgaaagaacagatgcagagccgtagaattttgcagcaacccatgctcttgccttttatgctcgatctgaacgcctttgagagcgcgttcattcgggaaaatctcgaaaatatccgcgacatcggcttcgatatcgaagagttcggaaacaatgccttcaaaatttccgccgtgcctctcgatttgcaggaaatagatttaaaagcgttttttaatgaaattctcggcgacgtgagcggctatcgctgtgtcaagctggaagatctcttaaaggataagcttgctaccgccgcctgcaaagccgcggtaaagggcggcatggatctgacgcgcgaggaagtggacagactttttgccctgatggacgggaatatgggactgaaatgcccgcacggcagacccgtcgttgtcaaaatgacgaagacggacctcgaaaaaatgtttaagaggatcgtctgatatgcgcgtcttggtcgtgtgcggacccactgcttcgggaaagaccgccttagctgtcgagtgcgcaaaggcgctgcatacggagattgtttccgcggattccctgctcgtctataaagggctgaatatcggcaccgccaagccgaccgaagaggaaaagggcgggattgttcatcatctcatcgacgtcgcggaacctacgcaaaaattttccgtcagcgattatgagtctttggctctgccgatcgtcgaaaacttattaaaaaaaggcaggacgccgatcatttgcggcggaacgggattttatatcaatgctctcctctataagagtcaattcggcaatgcgggagcggacgaaactatccgccatatgtacgaggatcttttaaaggaacgcggcgcggcatatttacacgagctgttgaagcaaaaagatcccgaaagcgcggagatcctgcatccaaacgacacaaaacgggtcatacgcgctctggaaattttcgacgtgacgggaaggaaaaaatcggagcagcgagataagcccgttccgcgcttcgatttttgcagcgtttccgtcgattttcctcgggaaactctctacggacgcatcgatctgcgcgtcgaaaaaatgttcctcgaaggattgaaggaagaggtgaaaaatcttgtggcgcagggcgtcacggaagatatgcagtgtatgcaggggatcggctataaagaagttgcggaaggaatgaaagacggactttgcgacgaggagataaaggaagccgtcaaaaagaatacccgcaattatgcgaaaagacagctcacctttttcaaacgtatgcagaatcataccttccttccccccgatcgggcgacggcgaaagaggttttgaaactattataaaactatgtcagacatattatatgtgtctgacataatactgtaaaatcaaaaacggagttcagataaaaaatgacggcagaagaattaatcgagaaaagcgaagaagaattaaaagagaatttccgcagggcggacaaaatcagcgagtacaatcaggaaaaggtgctgaaagcatttcaaaagcacgcggtggctctgaggcatttcaatccttcgacgggctacggctacggcgatgagggacgtttcgttctgggcgacgttttcgcttcgtctttgggcgcggaagcgggcatcgtttcccccgcgatgctttcgggaacgcacgcgctgacggttgctttgttcggtatcctgcgtcccggggagtgtgtacttgccgtttcggggatgccttacgataccattcgcggcgtaattttcggggaagggaacggctctttaaaggattttggcatctctttcgaaaagacggaactgaccgagcaaggaaagttcgacaagcaaaagataaaagaggatctcctgcgcctcgggaagagcctgaaaatggtatacattcagcgctcccgcggatacgaactccgcgacgcgtttacggcggacgaaatcggagaactttgttcctatgtacgttcgctcggttttacgggctgcatattcgtcgataactgctacggcgaatttgtggaggaaaaggagccgtgcgacgtgggggcggatattgcggtaggctcgctcatcaaaaatccggggggaggtctggcgccgacgggcggctatatcgtcggcgggaaggaatatatcgaactgataggaaagcggctcacggcgccgtctatcggcaacgaggtcggttcctatgcctacggctatcggcttttttatcagggtcttttcatggcgccgcataccgtcaatcaggcggtaaagggaagccttttgatcgggaaatgtatggaaacgctcggatatgaaaatttccccggattggataaaacgcctgcggacattacccgcgccattcgtttcgatacgtcgaaagagctttgcgattttatccagtctgtgcaggaagcgtcgcctatcgacagtttcgtgactttggagccttgggatatgcccggctacgacagcaaggtgatcatggctgcgggatgtttcgtcgagggcgcgtctatcgaattgtccgcggacgcgcccgtcaaggagccgtataccgcttatttccaaggcggactcacttatgaacattgtaaatacgccttgaaaaaaatgctggaaaagctgctgccggcgcgggaaagcttataattcggaaagaaaaaaacgcctgccgttttttaagcggaaaggcaaggcggacagcaaaggagaaatcgatgtcgaaaaacgttttgttggcggcgccctggcagattgcgcttattgcgatgctcgtgattatagccgccggttttttattggcttgggcgggaacgagatatattcgtaaattggtgcgaagcgcaaaagaggatattgccgaagaaaattactttttagccgaagcaaagttcgaaaagttgaaaaatcggtcgttcggggagtcgaagctcagcgccgaatactatctcgcctatacttaccttgcggcggaggaatatgaaaagtttttcgcttccgtggagagtatgcgtacctatcgcggcaaggtgacgaaggtataccgtaccgattgcgtctatcttctcttgatcgcccatttgatgctccgcgataaaaaaggagcggaaaaagcgtatgcggtcttttgcaacgcgctgcgcagcgaaagcggctatgacaaaaaattcggcatatacgaaaagttttttgcggcggcgctcgcttatatcggagaatccaaagagggaagaacggaagaaaatgcggcgattatccgcaggtttcagaaagacggcgagggaagcgttctgatcgcccgtcttgcccgcgagctcgtggaagggatgcaaaaaagatgaactcgacgaaaggcgcgggaaaaagagggaaaagggtagggaacgtggaagaaaaaaacgcgaaaaccgttataagactccgacgggcgcaagaaaaagacatcaaaggaatcggcagattattgttgcaggtaaacgccttgcatcatgaaggcagagcggacttattcaaggcgggcgcgaggaaatattccgacacacagcttaaagagatcctgaaagaggaaaagactccggtttttgtcgccgtaaacgacattggcgaagtggagggatatgcgttctgtatttttcaaagtcatcccgacgacagcatcctcacggatatcaaaaccctatatatcgacgatttgtgcgtggacgaaaatactcggggaaaagggatcggcgcgcggttgttttccttcgtttccgattttgcccgtgaaaggggctgttataatctgacgctgaatgtttggagctgcaatcccgcggctttgcgcttttatgaaagatgcggattgaagccgcaaaaaatcgggttggaaaaaatttttaagtgagctttataaaagaataataaaaaaagacgattcctttcagaatcgtctttttcgtaaactctgttatcaatacataccgcccatatcgccgcctgcgggagccgcgggagcgggaggggtgggaatatctgtcacgatgctttcggtcgtgagcagagtcgccgccacggaagccgcgttttgaagtacggaacgggtgactttcgtcgggtcgataatgccgctttccaccatgtcgcagtatttgttgttgagcgcgtcgtagccgtagttggctttcttggaggagaggactttgtctacgatgacggagccgtccatccctgcgttcgcggcgatttgtctgatcggttcttccaaagctttcaaaatgatcgcagcgcccgtcttttcgtcgccgtccaaagtagccaccagcttcttgaccgcgggaattgcggagaggagtgcgctgccgcctccgggaacgtagccttcttccacggctgctctcgtcgccgcaagggcgtcgtcgatgcggagtttcttttccttcatttccacttcggtcgccgcgccgacgctgatgacggctacgccgcccgccagtttggcgagtctttcctgcaatttttctctgtcgta

SEQ ID NO: 3061 - DNA, 32717 bp, Unknown
  16S sequences of unknown bacteria
agaagggctgtcttctatgggatgattcggttgtgtttgattctgtctcatgttagttccatcctaaaaatatttaatttttattatacaataaaagtatacgttgaacaagccttttcaaatattttaaaatctgaatgaatcttccttttcgtgtcaatacttagagtgttgctgctaaggaggaatcaaatttgcaatacaacaaagttgaaatttgcggcgttaatacctcaaagctgaaagtgctcaatgaaaaagaaaaaatagcgcttttaaaaaaagcgcaggcgggcgataaacaagccagagaggaactcattaacggaaatttacgtctggtgctcagcgtaattcagcgatttaccaaccgtggtgaaaacttggatgatttatttcaagtaggatgtattggattaattaaagccattgataactttgacatttcgcaggatgtgcgtttttctacctatggtgttcccatgattattggtgaaatacggagatatctgcgagataacaactcagtaagagtaagtcgatccatgcgggatattgcctataaagccatgcaggaaaaagagcgtttgactgcacaaaacggcaaagaacccactgtggaagaaattgcaaaatccttagatttgcgccgggaagatgttgtgctggcgctggaatcaattgtagaacctgtttctttatatgagccggtgttttcagacggcggagataccatttatgtgatggatcaggttggagacaaaaatgacgacaaaaattggctggacgaaattgcactgaaagaggcaatgaatgacctaagcgacagagaaaaacgaattatgggaatgcgtttttttcaaggaaaaacacaaatggaagttgcagcggaaattggaatcagccaagcacaagtctctcgtttggaaaaatgtgctctggacaaaataaaaaaagatttataaaaaacaggaggtaaattgcctcctgttttttatgtatgattgcctatacaaatctattttgctatgctacactaatcttaaccaaaatgatataacgacctgttttatagaaaggatgacagacaaatgataactgcaagccaaacgaaaacaccctattgcgtaactattacaaatggagatacttctgtttattctgacgttgcaaaagaacgcggcggaaaagagaaggcatttcgtccccatgaatttttatgtgcagcttatgcctcttgttttcatatcactttatgcaaactgttggataaagaaaaattatcttatgaacaagtgattgtatctgtagacttagaccgttccgtggaaggtcaaactaaatttttatatcagtgtgagattataggagccatagagaacgccaaaaaagaggaactgatgaaaaaagcaagccggtgtcctattggattatctttagaacaaaccatactgtttgaaccgttcaattagagaatttgcatggtacttttaaggaagtgattttatgaatatgatcattccaaatgatgtgcttactattttagagaaattagaacacaacggctatgaagcttatgtggtaggcggatgcgtccgtgatactctgctcaacaaagcggtccacgattgggacgttaccacttcagctctgccccatgaagtgcaaactgtattcaaacatgatattaccattgaaaccggaatacagcacggtactgtgactgtcataacagaaggacatcctgtagaaattacaacatttcgtatcgatggaacctattcagacagccgcaggcctgaacgtgttacgtttacctcgtctttaacgcaagatttggcacgccgtgattttacaataaatgcaatggcttatcatcctgcaaaaggtttgatagacccatttggcggaaagcatgatttgcaacagaaaaccatacgatgcgttggcaatgcgcgttcccgctttgaagaagatgcattgagaatattaagagcgctgcgtttttcttccactttaaattttcaaattgccccggacacagcaaatgcattgttggaagaaaaagagaaactatgtcatatctctgcagaacgcgtacgggaagaattgataaaattactttgcggaaaaaattgcgcacaagtactaagagtatatggtaccgttttagctgtttggatacctgagatattacctatggttggttttcagcagcataccccctatcacgcttacgatgtatgggaacatacgattcgaacggtagaagctattcaacctattcctgtgttacgttttaccatgctgctgcatgatattggaaaaccaaatacattcacacaggacgaacaagggattggacatttttatggtcatggagctgtcagcacagaaattgcaaaacaagttttggaacgtttgaagtttgaccgtaaatcaaaagaatccatcattacgcttgtcaaatatcatgatatccgctgtgaactgtcccctatttggattaaaaaacaactccgtaaatttggaacagacttatttttgcaattgcttgaagtgcataaggcggatattacaggacaaaacccaaacttgctgcaccgtttggaagatattatgaaatgcgaagccatggcaaaagaaatcttatcagaacccccttgcttctctgtcaaagatttagctgtaaacgggtcagatttgattgcccttggattttctcagggcaaaattattggaacaattttgcaatttcttctggatgcagttattgatgaaacatgtaaaaatgagaaaaaggaattgctggaatatttgaatcaaaacaaatttttatttacaaaattctaatccataaacatatttgtatttctcaaatgtgtttatgttgcatgataaatcctttctataaggggacggtattccatatataaaaatatattgttcctgtccatataaaatttgagatagcaatatctatttagagggaaaaataactatggaaaaagaatgcagatttgcagtaggctatcaagaaaagaatctcatcaacgatagagctatctgtgtggataaagaaacaatagtaaatcatctatttatttaagcagaatacaactccgaattcactccgcttttagatgaagataggaaaacctgttatcacaaaataaaatcttatttgcaattcaaaagcatataaactctcatcaaacaataaaaagcagaaaatcctttaaatcaaggattttctgctttttatttccatgtatatgaaaggttagagagattacagctttgatatttgacataaacggggctattagagtaaactataatattaaacaggtcttaatctaggaaaggagaaaaagaattgaaaaagctgtttggcaaattctttaagcttttgttcagcagattatgtttggtaggactcactattttaatacaggtcatactgctgattacgcttattttttatttcagcaattattacttttacttgtacgttatttttacagccatcagcgtagcagcagtattgtggattttgaacgatcgcattaatcccgcttataaaattgtatggatactgcccattgttgtctttcctatgttcggcggcttattttatatcttttttggcagaaacaaagccagtcgtcgaaccaaaaagaaactaaaacgcatcggcagcaaaatggctgctaacttacaccaaaacaaacaagtcttcgaacgtttacagcaacaggatttggacgcttccaatcaagccagatatttaattaattactccggctgccctgtatttcaaaatacgactgctgagtatttaaaaataggagaagaaaaattcgctcgcttgtgtaaggaattagaggaagcaaaacactatatattcttagaatattttattgtacaagaaggcgtcatgtggaacactattttagaaatattggtccgcaaagtccgtgaaggtgttgatgttcgggttatctacgatgatgttggctgtttaagaactttacctctcggctatgaaaaacaattgactgcacttggcattcaatgttgcgtttttaatccgtttatccctgtgttatccacgcagctcaataaccgagatcaccgtaaaattgcagtgattgacggacacaccgcttttacgggaggaatcaatttagcagacgaatatatcaatgtcattgaacggtttggtcattggaaagataccgccattgtagtacaaggcgaagccgcatggagctttaccgttatgtttctgtctctgtggagttatttaaaaggaaccaatgaaaactttgagcaatttcgtccttctccccaaagcttagcacgttttccttcttcaggatatgtacaaccctatgcagacagtcctctggactacgaagctgttggagaaaatgtatatttgaatttggtcggagcagcccagcgatatgtatatattactacaccttatttagtgctggataacgaaatgcagacagctttatgcaacgccgcaaaacgtggaattgatgttaggattattacaccgcatataccggataaatggtatgtacatgctgttacaaaatccaactatcaaatattgatagaaagcggagtaaaaatatacgaatatcttccgggatttatacatggtaaaacatttatcgtcgatgataaatttgcaaccgtaggtaccattaatttggattacagaagcttatatttgcattttgagtgcggtgtatggctttataatatgaacagtgtgtttgaagtaaaagaagacttcctccaaacacaaaaattaagtcaagaaattacactgaaaatgtgtcagtctgtaccgtggtatattcgcttaggacgttctgttttacgtatttttgcaccaatgttataaaaaggaggcctttcggcctcctttttttcctgccgtttttcttcttttctgttatgttttacaatcgtaaatagaatgcgcataaatgctttatcccacccgttctaaatctttttttaaacgttccatgattcttttttccagtcttgaaatataggattgagaaatacccaacgtatctgcaacttctttttgcgtgtgttccgtttcctgatttaacccaaaacgcaactgcatgattgttttttctctttgagataaattggataccgcagccattaataaatcccgctctacctgcttttcgatattttgatttaccaagttcgggtcgcttcccaatacatctgataataacagttcattaccgtcccagtccacattcaaagggtcatcaatagaaatttcatgctttaactgggcactttttcttaaatacatcaaaatttcattttcaatacatctggaggcatacgttgctaatttaatatttctctccggacagaatgtattaactgcttttatcagtcctatggtgccgatggaaatcaaatcttctacgctggcaaaactggattcaaactttttcgatatgtaaacaaccaaacgcaaattgtgtgtaatcaaaggttctctggcaccctccacattatttcgtatattttccattacttttgcttcttcttcggcagaaagcggcgcaggcaacgtttccggtccattgatataatgaactgtctcgcgccattttttgttcatccaccattgcagaattgtttgtacccatttcatttgtaaaaatagttgtttcatcaacatttcctccccataacaatttctttgccttgtgaaaataaatccggatttaacaacgctttaaaaccgtcgcttgtaattttttcttggcacaccgcaatataaacatcttctgtttctatttgctttttggcagattttatgatgactttttccggtgaaaatgcaggaagcacacctacaccggagatggtttgaaacggtaccattctgatttttggtatttcttcgcttcccactgtattgccgggatgttcccattttttctcctgaaagaaggtacataaatgttcagaaaacaatccggacagcagttccaattccattacaatcacaggataatgagaaaaaggttccaccaaactgtttcccgtgtcaatttttgcgttacattccactgttttctctttccaaacaacggtaacagtacaacatcctcccgacacttcgtgttttccaataaatctgtagatgaatcgaatcacaacataacaaacagctgttgagccaataagaatgataggagaaatattaaaatagacaatggaatttttaataatcataccttgcggagaaataaaataccaaattgccatcataaatcctgcaaaagcaaaattcataatataaaaacaagccagagattttaaaaattgtttttttcctccccagggaaaagcaacaaaaacaagagatgcagacatcgccagcttcattaacagtgccagtaccataggaattgacggcatcagcatagtaagagaatatgccgcacccaatatggaggctgctaaaattctgagacggactcttttcactgccaaaaattttgctgcagccaacagtaaaaaatagttaataaagatattgactgccagcaacacatcaatgtaaatggtctgcttcacatagttcctccttttcccaaaaagttgtaacattattatagtcagtcggacagaataattctgtcagaaaatgtacgtaaaaagaaaacaacacggtaaaaatgccgtgttgtttatttatatagaaaaccattatggtttttcgttttcatatttggtttttgcttcatcaattgccagaggttcagccaatacggtagggtaccatcctctgcggtgcatttcatcaaatacatcggattccaattgatgttcttcattcaataaatttaagatatcgttgcgcacggataaatttttacattcatttgcaaatgtattataagtttcggtaatgtatttttgatttgtcagtatatcttcaaataagtctcgctctttcatggattttctgctcatatacgtctcctttaatccaacaatgataatagtgtttggtaatgatcctcatgttttgcggccatttgctcgcacttttttctgagttctgggtcatcacataattgggcatacgctttattttttgtaatgagcagtttttctgctttcagttgctcttcaattgcgaataattcctttgctgttaacatatctgcttctcctttatactgcatttcttttgttcaaatgcgatgaaggcgtttatgtagcctgtggcatcgcactgtctgcatctaaaccaaagctgatggacaacgcttggtcaatttgcgtcattgcgtttggatccaggcgtcccatgcgttcttttaatctatgtttatctatggttctaatttgttccaaaagtacgatagaatctcgtgccaatcctgtattttctgcttgcagcataatatgcgtgggcaaattcgcttttgcacgttgacttgtaattgccgctgcaattactgttggactaaaacggttaccaacatcattttgaacaatcagtacaggacgcactccgccttgctcagaaccaatgactggactaaggtcagcataaaagatatcgcctcttcttatattcaattttttcacactccgaattattatattgattttgggccctgaatttatatttgcctgaaacagcaagttttaatcataaaagtaaaaattaatttatgccctaatctataatattaattttgactgtttttgcttgcgattcttttttgattgtttaaaaatgatgaaaagatgcgtttatgatttcttttaataaataaaaatataccgtcaaatctttggagcattatttattttgcaaaacgccattgaattccgtttcatctgtctgtaaccgatatagaatatttgctaatataattatattccctaaaaaataattgcaaataaaaataccggcttccagacaggaaccggtatcaatcttatttattgtttactgtgcttttctttttttcatcacaattgctgttaaggccaaaccacctgcactgactaacagcacaagacataaccctaagatgctgttatctccggtctgaggacttgctgcgtcaccggctgaatttatattcccatttccggttgatgtgttggaaccagtcgtctcagttgtacctgttagcggaatttccactgctgcttttgcaaatccacaaacagtgcattcttcatgcttggagccggcttccgtttctgttgcttctttatctactatccacgcaaacgaatggtcggctgtttctttcttttcatggcatattgtacactcatgccaatgttgaccttcatcgttgctccagacttcattgtaattgtgtcctaaagcagaaccggtagctactctggtatcagtaacatcgcaattatcgcatacagaagtctctgtaccatcttgtgtgcatgtggcatcattgtttgaaatgtagttgttgaagctatgatgctctgcaggtgcatttcctccatccacttcgactgcattcaaagcgtcacatggaaccaaaatggttccattatttataatttgggagccctcagcttttgtaatgctgactccgtcagacaaagtaagcgttacaccttcaggaatggtaagcgttctgccggcagcaatttcccagttctctgccaaaatatagtctgttgggaatgttacttccgttcccttttcgtttatatatccttgaaaatcagcttgttcacccagatttaaagtaatttcacctgtattggtacgaagaatttgtttgttgttctctgtaataaacttcacgttacctacaacttctgccgaattgtttgcaaaaacacctgcaacgctgttcacagtaattgtggaattttcgatataaacatttccgttcggattctgcacgctgccactttgtgcaccccaaccgctgtcatttaacgtaatattactatttacaaatttcaataaagagctgtcttttcctactccaactgcccatattcctcctgtagcaccggaatgactcattaaagtactgtcgtaaatttcaatatttccgtttgcataaatcggattccacgcattgctgtctccatctgcaacggacaaatcaatgtaagcaccattctttgcaacaaaatttccgttcataacaagaccatttgtgttatcaccaactaattttgcaccatcaacagtgacatcctcaaaactgccgctgctcatatagttgcattgcgaaaccgtcaaagagccggaaccttttatttctaatgaatttccttttgtggaactactacttttttgcgccaatccctcagcaaaaccttgaatgatattctctccctcgagaacaattgttacctcaccttgtggcagtaaaatgcctttgcctgtaccctcaccggtaagtgttacatttgtcaaggtgagcgtattcgcggcagagtcccatgtataaccttctctgtcagtgtaatcgtctgcagttacgtcaatgccttggtcatattctgccgcaaaaacactgataggcagcatcaatgccgttattaccactgccagcagacatgctatcccttttttggattttgttcgaaacatccgtttacctcctcaaattcatccttttgtttattcgaatatgtaaaagtatacattttgaaacctcttaaaaaaggcctaaatacaatgcagattattcttgaaacacacaatttaatatggtatacttttccaaatttgaaattttttattttcaattacttttagtctatatcataaaaatactatctttttcaatttttacctcttcaacagaatcattcgcatgaatcataacaagttattattttcccatagactttcctcctattattttttctttttattttgctctgttaaaaacagactgaactgttatcagaaattctatcctaatatttcaatgaatacttttaaagattcttccgtactctatcagcaaatttcaaaacattttataaacgtttcagctgttaaagggcagcctcatatatccctaaaagggcaaactcccatatcgtcccgccctctcctttgccgcatcaaaccgccgcttggcctgattttccgactttggtactttccctaaaagcaccggaaacacaccatttttacacctagaacaaataaaaaagaccctgtacagagtttagtgggttcggcgatgaatcttttatcccttcctgtggtattacttaggttcttcttcggtgcccttctgggaatgtttaggagtgcctttcgtcgccggcaaaaataaatgctctgtcttgtatttaggaactatgcggaacacttgtatgtacatctaatcacaacgaaaataaaaagctcatgtgatataagatttttcctacaacatgagctttttctgttatgttactaccttatgaaaacgatgttatttctatgctatctataaaatcgtaccagtaacatcaacataaatgattctacaaattcaaatagagaccttaaatacaaccgcctcttactttatcatttttattcttgaatacacaaatgttggtatcaatgataccgaaataacttacaaaaatttaatttggtatcggtcaactgtaatagattctacagttcctttatttcttgcagtaactacaaaggacacaccttgttccgtactgcctgaaaactgaccatttccttggctttccaatagctgaggttgttcctttgcataacgcaatactgacaccagctgtgaaaaccaactgtattccggcaataaagcttcagctccgtcaatcgacaagtcattgagagatatctgaactataccgttaatatcctgataacacaatcctttggctgtttcagggcttgtaagtataaaaatagtttctgtgccactgtttttcaacgttccgcaagcgacttctttttctgaagccgacacagatatttgacattccatatcaaagacaatttgctctgcttttaacgacccgccattacctgacgattgacatcctacagcaaacagtgcaacgaacagcaccaatccactgcataaaaaagcttgcattgcctttttcaaatgcaaccaccctatttctcaaattttaaaaataatcttggtaactcttcaatcatatccgtgggaagcatggatatttgagataatttatcagcacacttatctcctgccataccatgcagatatacagcagtccttgccgcttcaaacggcgcttctccctgcgccaatatgccccctatcatgcctgccagtacatcaccgcttccgccttttgccatgccggcatttcctgtagggttcatacttatttttccgtaatgcgccgcaacaacggttcctgagcctttcagtacaagcgtaattccatgttttttagcaaactctcgggaaatctgcagccggtttcgctgtacttccttggccgtaatttttaataatctggccatttctcccggatggggcgttaaaattaacggaactgtggtattctgaagcaattctatatcttcagacacaatatttaaagcatcggcatccaacacaatgggatgcttaaaatgttttaagacataggtcaaaatgagtttggcagtttcacttgttcccattccgcatccaatgacacaagcagtggccttttccattgcttcgtctaactgctgcagcatacgctcctgatacagtaccgtataaatcggttctgtcagctgccctgctacaatcggataaatttctttcggaaccaccatatgtaccagacctgttccgctgcgcaatgccgcttttccacacataattgctgcgcctgccattccctcacttccgcaaatgcaaagcaagtgaccataatcgcctttgtttgtattttgttttctgggtttgaacatggactcaatctgccattcttctgccacttcaatatctgcttcttgctgagccaccagattatgaggaataccaacatcagcaactacaatttcaccgcagtattcttttgcgggagataataaatgcgctgttttcattgttgtaaacgtaatggtaacatccgcctgaaaacaaacggtgtccacagttcccgtatcacattcaataccgcttggaatatctactgcaattttatccgctcctgacaaattggctgtctccaacacttctgtcatacgtgcatcgggagtccctttaaatccaattccgtaaatacagtctaccaatacatcggctgtacgtatcagttcaaagataagctcttggtcgtccgcaatactgaacgcctgaacattggtttgcctgatacgggacaatgtttcttttgcaatatccgttttcggcaaaccgtccaccagtgcaataatcacttccccgcctgctgcatccagtctccttgcagcaacaaaaccgtctccgccattatttccttttccgcacagaatcacagttctcttttctctgatattgtaatgactgctgatatattctgcgaccgcagttcccgcatgttccatcaatgtaatatacggtattccttcatcaactgcccattgttccaattctcttgtttgttgattgtttaacgctttcatacaatcctcccagccttgtagcaatatatatgcttatcgtccgtaaatatgagcaagctgtctcatatgctctgctatgttatccgtaaattgctccgactctaaccgccactgccaattatctcctatggtagaaggaaaattcattcttgcagtgttgggtaatgacaatatatcctgcatctgtaacatggcgatatctgcaacactgccgtataacatccgcataaatgcgttcggcaattcttctaaatctgtcgcattacaataaaagcaggctcttttgtgttcttcttcccgtgttgaaaaatatcccaaaacagtttcgttgtcatgggtgccactgtaagcgaccgtatctttttcataattgtgaggtaaatgctcattttgaggatttccatcaaaaccgaattgcagcactttcattcccggataccccatttgcttccgtaaagaagtgacctcatctgttaacacacccaaatcttccgcaatcatacggtgcggctctatcacctcatgaatggcatgtaacagctttgctcccggtcctttccgccattgaccttttatcgcattttcttctcctgcaggaatctcatagtatctcacaattcctatgaaatggtcaattcgggtaaaatcatacagttcagaacagcaagccatacgatatttccaccattgaaatcctgtatgctccatatagtcccagtcatacaacggatttccccataactgacctgtatcggaaaatgcatcgggaggtacccctgcaaccgccttaggctgcttttcgtcatctaacaaaaacaattcaggatgtgtccacacatcggaactatccaaagcaagataaatgggaatatctccaataatgtaaattccttttttatttgcgtacgtttttacatcattccactgttgatagaagtgatactggcaaaatttccaaaactgaattttctcttttaacaaaatacgataattcatcaatgcagatgaatcacgctctttgatatctgcattccacttgagccattcacattgtccgaaatggtctttacaagccataaaaagtgcataatcatccaaccaatgctcctgttttttacaaaactccatataatcggaacgatataaatgattgctgttttcatatgctgtttgcagcaattgcaaacgatgttctgcaattttgtcataagaaatacaggaccgattttcgccccagtcaaattttaaaatatcattttgggtaagtaatccttgttctgccaagcggtctaaatcaatgaaataaggatttcccgcaaacgcggaataagactggtaaggactgtttccaaaccctgtaggtcctatcggaagcacttgccaatacgtttgccctgctgcatgtaactgatcaataaaacgatatgctgcattccccagcgttcctattccatacggtgatggtagtgcactgacaggcagcaacacgcctgctcctctgatacggcaagcctccatatcatcacgcctcatttcttttttatatagatttattatatcatttttgcataatagtttcaataaatgctgttatttacaaaaaaaattgtaaataacttataaagatgattcaaaccctttgaatcctcatttcagtttatgcggaaatcttgcaaacaagacataaacatggtatagttattataaataacgcgatgaaaaagaaaagtaaccatttaccgctgaccagagagaatttgtaatagctgaaatcaaatttacagtatggaaatggcgaagttccctttggagcggcacagccgaacaaaacagtaagctgtgacggcagaccccgttacaggtcatacgagtgtttggtttacaaaaataagggtggtaccgcggagcatacgtcttcgtccctgtttagggatgaaggctttttttatgtcaaaaatcatcccgtttatgataactttttgaaaggatgtcaaattgtatgaagcaacagcttgaaaccattcgccaattggcactaaaggcaattgaagaagccgaagaccagcaaggactggaaaatctgcgcgtaaaatatctcggaaaaaaaggagaacttaccgctattttaaaacaaatgggaaagttatcccccgaagaacgtcctattatgggtcaattagccaatgatgtacgtgcagcaattgaagaaacatttacaaaaaaagcagcgcatttaaaagaagcattgctggagcaaagattaaagcgagaaaccattgacgtcacattaccaggcaaacacaaagaactgggttccaaacacccgctttccattgtactggatgaaatcaaagaaatctttgtgggcatgggctttgatattgtagaaggccctgaagtagaatctgattattacaactttgaagcattgaatattccaaaaaatcatcctgcccgtgatacacaagacacattctatatcaatgaaaatgtagtattgcgtacacaaacttcccctgtacaaattcgtactatggaaaatcgtgaacctcctatccgtatcatttcacccggtcgtgtatatcgttccgatgcagtggacgctactcactctcctttattccatcaaatagaaggattggttgttgacaagggaattacatttgccgacttaaaaggtacactggagacctttattaagcgtttatacggagaagattctgttgttcgtttccgtcctcaccacttcccttttacagagccttctgccgaagtggacgtgcaatgctttagttgccatggtgaaggatgccgtttatgcaaaaatgaaggatggattgaaattttgggctgcggcatggtacatccaaaagtattaagcaattgcggaattgaccctgaagtctacagcggttttgcactgggaatgggtctggaacgtgttgttatgcgccgttataacattgatgatttgcgtctgttctacgaaaatgacgtaagatttttaaaacaattctaaaataacacaatgaaaggactgcaatcacaatgaatttatccatgaaatggttaaaagaatttgtcgatattgatataaaaccaagagatttttccgaagcaatgaccatcagcggctctaaagtagaaggatacgaaatagaaggttccgaaatttccaatgtggtagtaggtaaaatactatctattgttcctcatcaggattccgaccatttggttatctgtcaagtggatatcggagaatcagaaccaattcaaattgtaacaggagccagcaatttaacagtaggagatttggtgcctgccgcactgaacaattccactttgcccggcggcataaaaatcaaaaaaggaaaattacgcggtgtagaaagtaacggtatgctatgctctttgggtgaattaggtcttactctcaatgattttccgtatgcaattgaagacggtattttcgttctgcaagaagattgtcaaccgggacaaccaatttgtgaagcaatcggtcttaatgatattaaggtagaatttgaaatcacttctaaccgtcctgattgtttctctgtcatcggacttgcaagagaagccgctgctacatttgataaaccgcttacattacatactcctgttgtaaaagcaggaaacggttcctgcaaagacatgctggatgtaaaaatagaggagccttccttatgttctgtttacagtgccagaattgttgaaaatgttagagtaaagccgtctccccgctggatgcgtgaaagactgcgcgctatgggagttcgaccaattaacaacattgtagacattacaaactatgtcatgctggaatacggacagccaatgcatgcatttgatttacgttttattgaagataaaaaaatacgcgtcagacgcgccaaagacggtgaaaccattactaccttggacggtgttgaccgtacattaacccatgaaaacttggtcattgcagacagtaaaaagcctgtagcgattgccggcgttatgggcggcgaatacagcggaattatggatgacaccaccaccattgtatttgaatccgcttgtttcgatggttcttccgtgcgtactaccgcccgcgaccaaggcatgcgtaccgacgcctcctcccgttatgaaaaaggattagaccctaataactgtcttcctgctttggaacgtgcttgtgaattggtagaattgctggatgcaggcgatgtactggatgatgttatggtagatgaccattcttcccatgaacaacgacgaattcctctggaaaccgaatggaccaatggtttcctaaatattcaattatcagcagaagaaatgaaagcaattctaaagaaaattgactgccagtttgacggagataccatcctggtacctaccttccgccccgacttggagcacaaagcagatatcgcggaagaaattgcgcgtttctacggttataaccgcattccaagcacaccgctgcgcggcgatgcacaaggaaaatatactccaagacaaaaatttgaagataaaatttccaatacaatgcttgcattgggattaagcgaaattatgacctattctttccttagccccaaagcgtacgataaaatcggaatgccggagcaggattatcttagaaattctgttaccatttcaaaccctttaggcgaagataccagtatcatgcgtaccactgctctgccgtctatgctggacaccttagcacgcaactacaataacagaaacggagcagtagctctgtttgaacttgcttctgaatattatcctgttgaaggacaagaactgcctgacgaaaaaacaaaactaattgcaggcttgtacggcgacgattgtgatttctttactgcaaaaggtatggtggaacaactgctggatacattgtttattttaaattatgaatttgaggcttcctccaacgagtatgcttatcatccgggtcgttgtgctcatatcatgattgatgatactgtcattggagtaatcggagaaattcatccaaaggtagcagaaaattatggcatcaacgaaagaatcttgtgtttcactttagatgtcgacagcctatttacacatacccgaacaaacgctacttatactcctcttccaaaattccctgcagttacccgtgaccttgcgcttatttgtgatgaagctattcctgtccgcatattggaaaaggctattacaaaaggggcaggtaatttattggaaacaatccagctatttgacgtttaccaaggtgaacaaattgaaaacggtaaaaaaagcgttgcatttaatattgttttacgctctgctgaaaacactttagcagaagaacaagtaaacagtaccatgaaaaaagtgatgaaagaactggaaaaagtaggagccagcttaagagtataagaaattttacatgtttttacttgtaattaattgtaatttgttgtattatggatttgtaatggagggataattacaatgctagacagaactatgacgttttcttttaataacaaccgtgacgatgatataaaagcaattttgacaacggtatataacgcattgcaagaaaaaggttataaccccatcaatcaaattgtaggatacattctatctgaagatccaacttatattacaacacataataacgcccgtagtctcatccgtaaaattgaccgtgatgaattactgcaggctttgttaaaatcttatctgaaataatttgaaactgtcattgtaaattacaatgacagtttttattttctttacttatgaaaacagttatgatataatttaatttcaaagtaacgaatgaggaggtatatatacatgaaagtaaaaaaagcgaatgcgtcaaagtttccaacttataaaggtaaacctcttgtcagatgcggaaacacaatttactatggtgatatgaaagacccatatgtaattaaaatggatattaaatcaacaaaaaaattggcaaatcaagagattgcagatgaaataaccatacaactcatgcgtacggacagtacaatcagtacaaagaaacaaattgtaaaaacaagcaaaaaaaatggactatacttagcaatggatatttcagaagcttggctggaacgtgctttggcaaataatgaagaataagcaaataaaaaggagtgcaaatcatgcactcctttttctcattcataaaatagaaaacgataagtttatctgctatggcatccacgattacaataggaaatattcctttttatcgtttgaaacaatgtatgtttccccagaagaatatcatctcatttatatttgtctgcatatataaaaaaaaataactgatatcaaaaacttattgcttatgtagctactacaaatatgaagtaagcagaaagattatctctctgttcattgaaacataattgtataaaacgtccaatatacacatatgtaccagggaatatcaaataactctaagcatgatatcctatatatcatttattttacagcaaaaatataaaaatattatctaaaaatcttatcgagaatttctgttatctttttaagtcttcttacatgccattcaagccttattttatcggctttgatagcacttttcatagtagaaagcatttcacataaactattatatttctatgtgtttccccgcttgaaagtaataaagccgtagtaaattcagtttgtactaccagccatttcaacctttgcgaaaacataagaaccgtgtatgtaatcctcaagtatcattttgatattggaatgtctcatgatgtactgtaacgtattcgagttcattcctgtatttgccatgttcgtacaaaatgcatttttataagccaacttttttagataaaaaattcagtaccaaatttattaaaacattaaaccttggtttaaattatccatattcatggcagttacttgcttttccatatgataataaggcaacgtttctccattgatatcaacaatttgctctgaaaggactgcataccccattgcctgataccatcctcttacctgctcatgagcgtccactgcagcggtaaagatatcattgactgccagttcatcttcaagacattgtaataattcagtaccaaacttatggtgctgatactgaggcaggataaacaaacgtttaatgacattatctttgattgttcctgtgcctaccaaatacccatcgctttccattaaatacacattggcatttattaaatcatctttaatcgcttcttctgaatgcaaatttagaaaaaaatctacaacattttctgaaaaacattccggatagcactctttgatggtacggtgcaccatattttttacggtttgtaaatctgccaattttgcttcgtataccataatattctaactctcccttttatggataaaaaaagacagaatgccgtctcataaaacgggcagcttctgtctttttcttatttaccaatatctgttctgtaatgtgcaccctcaaaatgaattttggaaacagcattatatgcttttttcaatgcaccttccaaagttgtgtcagttgcggttactcccaacactctgccgccatttgtataaaacttaccattttcttttttggttcctgcatgataaacggttgctccctcaatttgaccattttcattcaggcctgtcatttcaatgcctttttcatatttttcgggataaccgcctgaagccattactacacatgctgcagcttcgtcggaccattcaatatctacatctgatagacattcattacgcacggctatcataatctctaacaaatcagattttagtcttggcagtaccacctgtgtttcagggtctccaaaacgacagttgtattcaattaccctaggaccgtttggagtcagcatcaatccaaaatacaaacagcctttaaacggtctgccttcttgattcattgcagcaatggtaggaagaaaaatcgtatccatacattcttttgcaatttcatctgtataatacgggtttggactgactgtgcccattccccctgtgttcaatcctttgtcattgtccaacgcacgtttgtggtctttggaagataccattggttttaatgttttaccgtcggtaaatgccaatactgaaacttcaggacccgtaataaattcttctactacaatcttattacctgactgaccaaaaattttatcttccataattgattgaaccgcatcttttgctgcttgtaagttttcagcgatgataacaccttttcccaatgcaagcccgtctgctttgactacaatcggaaatgtattattttgctcaatataagcaatcgcagatgctgaatcgtcaaacacttcataacctgcggtaggaataccatattgtttcatcaaatttttagaaaatactttgctgctttcaatcacagcagcgtttgctgttggaccaaacgccggaattccggcttcttccattgcatctaccatacctgcagccaatggatcatccggcgcaacaacagcaaaatcaattccgttttgttttgcaaaggttaccatagaatctttatccatggcgttaatatcaacacactgtgcatcacaggaaataccaccgttaccgggagcacaatagattctttctacttttggactttctaacagtttgcggataatggcatgctcacggccgccgccgcctactacaagcagtttcataaaagctaccgttcctttctgaaatgaaactaatgattaatgatggaacaaacgcactcctgtaaacgccaaacaaatgccgtatttattacaggtatcaataacgtggtcgtcacggatagagccgcctgcctccgcgatataagaaacaccgctgcggtgcgcacgttcaatattatctccaaatgggaaaaatgcatccgaaccgagagaaacgccggtttgttggtcaagccaagcacgtttttcttctctggttagacgttccggtttctctgtaaagaacaattcccatgtaccgtctgccaacacgtccatatcatcatctgaaatgtatacatcaatggtgttatcacggtcaggacggcgaatatctgctttaaatggcagattcattacttttggatgttgacgcaagaaccaaatatccgctttatttccggccaatctggtacagtgaatgcgagactgttgtcctgcgccaattccgattgcctgtccgtctttggcataacatacagaattggattgcgtatactttaatgtaatcaatgcaatcaataaatcacgttttgcctcttgaggcaattctttattctcacttacaatattttgaagcatctcttcattgattttgatttcatttctgccctgctcaaatgtaataccgtaaacatctttgtgttctatgggagcaggctgatatgcttcatcgatttgaatgacattatagttgcctttacgctttgtttttaaaatttccaatgcttcctgtgtatatcctggagcaatgactccgtcggaaacttctcttgcaagtaaagttgctgtctgtgcatcgcatgtatcggacaatgcaacaaaatcaccataggaagacattctgtctgcaccgcgtgctcttgcatatgcagtagcaatgggagatagctctaaatcatctacaaaataaatcttcttcaatgtatcgctcattggaattgccactgctgcgccggcaggactgacatgcttaaaagaagctgccgcaggtaatcctgttgcctcttttaactcttttaccaattgccagctgttaaacgcgtctaaaaaattgatatatccaggcttaccgtttaaaaccgtaatcggcaatgcggaaccatctttcataaaaatacgggatggtttttgatttggattacatccatatttcagcattaattcatttgacatcagaaacagcctcctttacttatttttattgataattctggtttctgttaaaccattttccaattggataaagcaagtaaataaagaaactttattgtctgcatttaaactatcccatacggtatttgtgaaggaatcaatatcaccctcaactgccacacgaatcggctctccttcaaaagaaggaattgggtttccgtcacagcgatacgtatgaataaaatgaccttccccattgacaggctgtgcatattcataaaaataacgcaatgcactttcaggattaccgttattgctttttaaaatggaaagcttatactgtaatccgttatttactaccacttctcccgaaatacgaggggtaaagttcggtgcgtcaggttcaaaggtacgggtacgcaacgcatcttcaaaggttctgccttgctccaatgcttcataaatggtatccgtttggtcaccgtttgttacaatggtggtattgccgatgacacgaacaggagcataaataatgagagatgggtctgttaacttagattcatcaaacgcttttgttttaatacccaaaccatcttctacaaatacacggttacggctgttttcgcttcttcccataataaaataggaaataacgccgtgtgttccgtcttttgtttttccaatcatgatgccacggcccggatacgtattgctttttaaaagttcagcaaaatttttcaattccatgttcttactccaattcaaaaatagttactcatttatttttacaaaatcttgttctatttcaagtttgccttggcaaaacagagaaaccgcctgaggcaacaatttccattcggcttcttccataacgcgtttttgcaaagtctgcgccgtatcgtcgggagataccgtaaccgctttttgcaaaataatgggccctccatcgcaaacctcgtttacaaagtgaatggtagcacctgtcagtttcacgccacgctgcaatgctgcttcatgcacacgtaagccgtaaaatccttcgccgcaaaaagcgggaatcaaagaaggatgcacattgatgattttgttgcgataagcatcaatgactcggtcactgataatggtcatgaatcctgccaatacgattaaatcaatttgatgcttttgcagcaaatctatcaaagcacggtcatattcttccatggtagcgtactgtttacgaatcaatacttcacaagaaattcctgcattttttgctcgttccaaagcaaaagcatttgatttgctggagataaccaaagaaatttctccgttgataatttctcctcgtctttccgcatcaatcaaagcttgcagattggttcctccgccggataccaagaccgcgatttttagcataaaacgacaccctcttcgccttttaccacagttccgattaagaaagcttcttctccgttttccttcaaatgtgcaattgccttttctgcttccgatgcagaaactacaacacacataccgatacccatattaaaggtgctgtacatatcctgtgttggaatatttcctgttttttgaattaaatcaaaaataggtaaggttgggaaagcgttcatttcaattttagcagtatatccctctttcatcatgcggggaagattttcataaaaaccgccgcctgttacatgagaaaccgcttttaccgtacaagttttcatcaaagacaacatgggacgaacataaattttcgttggagtcagcaatgcttctcccaaagtggtacccagctcttcataatactgttttaaattttcttcattgacatcaaatactttccttaccaaagaaaatccgttggaatgtacaccggaagattgaataccaataatcgcgtcaccttcctccatagaagaaccgtcgattactttttcacggtctaccatacctacgcagaagcctgccaaatcatattcatctattggataaaagccgggcatttctgcggtttcaccgccaaccaatgcacagttggattgtacacatccatctgcaacacctgaaacaattttttcaatcttttcaggaaagttctttcctactgccagataatccaaaaagaataatggctgtgcaccgcagcaaataacatcgtttacgcacatcgctacacagtcaacgccaatagtatcgtgcttgtccatcaaaaatgccaaacgcagttttgtaccaacaccatctgttcccgaaacaaggataggtgttttcatatctgtgaaatccggttggaacaatccgccaaagcttccaatattggaaacaacgccgggaatattggtacgtgcaacgtgttgtttcatcaattcaacggctttataacctgcggttacgtcaacgcccgcctctttgtagctgtcactaaaatttttcatggtttttatgttctcctcaatatgttaaagtccaattgatatatcatcgttataacgcgtctacttcagcctgcaaagctgcgtcttttttctttacgccttctaccatttctgttttcattgcatccaatttttttgccagctcttcatcaccgattgccaacatttgcactgcgagaatcgctgcatttgcagcaccgtcaatggccacggttgctaccggaattccgcttggcatttgtacggttgcaagcaaagcgtccaatccgtccaatgtagaagatttgattggaataccaatgacaggcaaggtggtgtgtgctgccaaaacgcctgcaagatgagcagcttttcccgctgccgcaataatcacaccaaaaccattttcttttgcatgctcggaaaattcggcagcatcatggggtgttctgtgagcagacatcacatgaacctcaacaggaacaccaaaagattttaattttttcactgcagcagaaacagttggaaaatcactgtcactgcccataatcactgcaacttttttggacatagtaaaaacacctctaaattcgtttcgttcattcatttttgcttacacttacacaaaaaacaggctacggagcagatgtgcagcgtagcctttatatcacatgtagcaaatgacaagaagaggaatgaaatggaattattacacgatataccatatttcatcctccctcctgtttcaacattatatatagtattatatttcatttttgtaacaaattcaatagtggtttggagatagattttttttgtatggttactataaaaaataaaaggatatctgtatatattgtcacaatttgtctgcggattttacaacaagaagcagcagagcaaaataaaacaggtactgttttatgacagtacctgaaaaagagaaactatatttcgattttacagattaatacatgccgcccataccaggatccattggcattgcaggagctgcagcagcaggctctttcttatctgcaaccaaagattctgtagtcaataccatggcagcaatagaagctgcattttgcagtgcggaacgtgttacttttgttgggtctacaataccggcggaaatcatgtctgtgtatgtttctttcaaagcatcaaagccatagccaactttatttgcttctttgattgcggaaacaataacagagccttccaagccggcatttgcagcaatttgacgaaccggctcttccaaagctttcaatacgatttgaacgcctgttttctcatcgccttccgcagtttctgccaattttgcaactgcaggaattgcattcatcaatgcagtaccgccgcctgcaacaatgccttcttcaacagcagcttttgttgcggaaagcgcatcttcaatgcgaagttttttctctttcatctcaacttcggttgctgcaccaactttgataactgctacaccgcctgccaattttgccaaacgttcttgcaatttttcacggtcatattcggaagtggttgcttccaattgagcgcgaatttggtttactcttgctttaatctcgttggaatcgcctgcgccgtctacgataatagtgttatctttgtcaactttgatttggcgagcgcgaccaagttggtccatagtagtttctttcaagtccaaaccaagctcttctgtaatcacttgaccgcctgtcagaacagcaatatcacgaagcatttcttttcttctgtcaccaaaaccaggagcttttacagctacgcaagtgaaagtaccgcgtaatttattcagaattaaggttgtcaaagcttcgccttccacatcttcagcaatgataagcaattttttaccggattgtacgatttgctccaggataggaagaatctcttgaatgttagaaattttcttatctgtaatcagcacataagcatcatccaaatccgctaccattttatctgtatctgtcaccatgtaaggagttacatagccacggtcgaacatcataccttctactacttcggagtaggtttctgctgttttggattcttctactgtaataacaccgtcagcagttactttatccattgcttcagaaatcagatttccaattacttcatctgctgcagaaatggttgctacacgtgcaatatcatcagagcaagttacttttttggaattctctgttaatgtgtttacagcagtatttacagcgttttgaatgccttttttcaaaatcatcggattggcgcctgctgttacgtttttcatgccctcacggattaaagcttgtgccaacaaggtagctgttgtggtaccgtcgcccgcaacatcgtttgttttgatggaaacttctttgacaagctgagcgcccatgttttcaaatgggtcatccaactcaacttctttggcaatggtaacaccgtcattggttacaagcggtgcgccgaattttttgtccaaaacaacattgcagccttttggaccaagtgtaatttttactgtatctgccaattgattaataccattcattaatgcttttcttgcttcttcaccataaataatttctttagccatagagatgattcctcctaaaaatgatgtatgttcggttacaataaatctattattctacaattgccaaaatgtcgctttgacgaacaatggtatattcttctccgtcaacttttacttctgtacctgcatatttgcttgcaatcaccttgtcacccggtttgatgtacatttcaacttctttgccgtctacaatgccgccggggcctactgccaatacctgcgcaatttgtggtttttcctgagaggcacttgcaagtacaatgccgcttttggttgtttcttctgcttctgtcatttgaattaatactctgtctaatagtggtttaatagtcataaatatttcctccttaaagtaaatatattagttacatcatagttttagcactctttaacttcgagtgctaaaactattttaacgtctttgtcataaaaaatcaagggaattttcattgaaaacgcaaatttcataaattatttacaattatatttccaaatcattctgtactgttttgtgtatttcaaactacatggaatgtttttgcctaaagtttatcaattactgcttaagatattgcaaaagaaacaagttgtatattataataggtacatatctatacagaacaatgaaagtgaggaccttataatgtctgaaagaaaagatccaccagaatttacaccgaaaacctgtcctgtttgcggcggtcgtgcaatgaacgcattcaaagacagagaaaatttcaccagttttgaaatggtatgctgggattgcggcaaacaccacttctataaaatggctgacgataaaaagagctttatcaaagtggacaaactttaattggaacaaaacagcggctgtgttacagccgctgttttgtttttataaagctgatgacaataccaatcttttcttatcatataaaacctaccgtaaaaaatttgccacattatcagacaaagtaaaaataatatgcaaaccgttacaccaaatataccggaatttgtgaagaaatggacatgctatccggagttactttgcagtcaaacgccagaatattcactccgcattcttttgcatactgcaacgcttctccaaatgcagggtgtgtttttatgttaggcgtaaaataccgtacatcctgcatttgaaccacaaaaataatataagcatcaaaaccgttttttctgcattggcacaattcatatacgtgcttgattccacgttccgtcggtgcatccggaaacaataccaccccgtcttcttcaagggttacacctttgacttcaacatatgcaggacgctcttccctttccaaataaaaatcaaatctggaatcacagtatttcttttcaggataaatattttgtatgtgttgtatgacttgattctgttccaaccattctttcacagctgcattgggggcctgagaatcaatattcacaagacgatttcctttttgaaccgatattaacgaatattctgtcttacgattgggattgtcatgatgctgcacataaacttcacagtttggaattaacagttctttacagcgccccgtattttttacatgacaaatgacttcttttccgcccactgccacatgtgccaaaaaacgatttggccttgaaagaaaaatccctttttctatattagaataatgcacacggcacctcctgcacaccaatcgaaattttaagcaataaatcttctgttgacgatactaccaattcatccagcattccttcttcaaaggagtatccgcttaatttgatatgatgttcctttgcataatcaatcattttttgataagtctcccctgttaattcataagaaccctgatgatatgccgctaaataaattccttttggtttttcaaaaaacggtactccttgaaccgtacgagttgttttggtaaaaatatatgcatattttaaatagtttcctttcataatatcttcaacacacaccatggttccatcaggatatccaacattgattcccttttccatacagcattgaatatggtttctccacgcttcggagaaatcatctatcgactgaatgtggctgacattcgttactgcaaaatacgctttttcctgttcctccagttgaatcatgtccgtatgtgtttgaagcacattctgtgttaattgaattctggtttgcagaaaccgatgcgtctgttttaattttttgatttcgttctgaattttacggtcctcttcatgaaataaccgaatcatattttccggattacggttgtcgatatattccttaatctcttttaatggcatgccaatctcacgcaatgctaaaataaccgaaagtacttcaaactgtctgtaagagtaataacggtatccgttttcagcaatatggtcgggctgaaataatcctatttcatcataataaagcaacgtttttttgggcacgccgcatagttttgcaaaagtacctgtggatattttattttgaaaatgttcactcataaaaaaacctcttgactatccagttactgtatactctatgataaataatagttttttgtatgtcaagtgttaggaggtgttatcatgcatacattgggcagaaaaattacgtttgggtctttaatcagatttgctcttccaactgtttttatgctggtgttttcatctttgtataccattatagatggtatctttatctccaattttgttggtgaagacggattatccggtcttaacattgtatttcccgtcatcaatattattatgggcattgctactatgttcgctaccggcggcagtgccattgttgccaaaaaaatgggggaaggaaaaaaagatgaggcaaatcaaaactttacctttttattcattgtactcatggcagttggcactttggtgacaattggtgtgctggtatttattgacccactgctctctttcctgggagccatcgaaaccttatacacatacagttatgattatttattcacaacggttatgtttactttggtaactatggctaaattatatttcgacttcttccttgtcacttcaggtaaggcaaatttggcgctcattaacagcgtcattggcggtgttaccaacgtgatattggattatgtatttatgggaccgttaaatatgggaatggcaggtgcggcatatgctactgaaatagccatgattcttcctgtcattttaagttttatctattttgcttccaaaaagctgactatatgttttaccaaacccaaagctggaataaagctggtattgtctgcttgcgcaaacggttcttccgaaatggtagtacaaatttccgcaggtatttctacatttctgtttaacttatatatgctccaatatatcggaaaaacaggcgttgccgctgttacgattgtgatgtattcccaatttttattaatctctatgctgttgggattctcggcaggaatttctcctttgattagttttaactatggacaacagaatcacatgaagctaaataaaattgtaaaatacagttatatcatggttggcatttttgcagtcgtatcctttgcggcagcacaggccctggcaataccaattaccactttctttgcccatggttctcccgatttatatcaaattaccatttacggattcagaatattcagtttctcttttctgatttgcggatttaatattttaacttcaggattatttacagcattgtccaacggattgatttcagcattggtttcttccttcagaactttgattttctttgtaataggaatggtcacattgcctcttctgtttggagttacaggtatttggctggttgtgccgattgctgaagttgctacgttaattgcttccattgtctttctatatgtatttaaaaataaatatggatacagtaagcaaaaaagtcaattgtttcaggaacaacaactacaagaagcagaataaaaaacgcaggcattttatgcctgcgttttttatttccatcagagcaatactctatcaatctcgcttgaaacagaatttgtaatcgattacagctgtgacaagcatgttagctgctcatcatttcaaagggaatccaacaattcctctgaaatgatgaatagcacccgccatcttagaggcgggtgccattatcgtatagattataaatcatctaccaaagcagtactttttgcataagcggtagaacgaccttcaaagaaatctgttttgattaaatttgcattgctgtattggctaatccaagacatggaatcaggctctttttcatatcccggatacaaaggttcaaatcctaaattcatgcagcgcaaattgcccaaataacgaatatagtctgtaatcatttgacagtttaatcctgaaatatcatcgccgatgacataatgtccccatgcaatttcctgctctacgccttcttttatcatgctgcggtactcttcaattaattcatctgtaaataaatgcggttcctcttttttcaattccaaaataatagagcgaaacagccacaaatgtgtattttcatcacgattaatataacgaatttcttgtacggaaccgggcattttattattgcgtcccaaattataaaagaacataaagccggaataaaaatatacgccttctaaaatatagttggcaatcatagtgcggaccagagtataatcgtctttcttttcttgaaactcgttgtataagttaccgataaattcatttctgcgaagcaaatgttcgtcttgacgccattgatataaaatttcattgcgttctacgggagaacaaatcgtatccaacatatagccgtaactttgtgaatgaacggcctcctgaaacgcctgaatggtcaaacaaagattgacttcattggcggtaatatattcaccgacattaggcaaatttgctgtttgcacactgtccaaaaaaattaagaaagacaaaattttatcatatgcggtacgctctgcttttgtcaactgattgtagttctgaacgtctgtatttaagttaatttcctcaggtatccaaaagttattcatggcctgacggtaccagtcgcttac

SEQ ID NO: 3062 - DNA, 21254 bp, Unknown
  16S sequences of unknown bacteria
gagcaagaagcccccacttcaaaatctgggatttaagtggtgggagcatgtcactatgaaatgatgatgcagaattgcgggagctgctttgcagcggagcaattcgtaggcatcagtaggattgcgagagcatgaaatgtaacagttctgcagaaaggggcggtattattatggtaagaaaaacagtaaaagcaacgaagtcacaggtacagggcggaagaggagaagtcgagtttgagcacattctggataaggatgagctaaacggtcatggtagtctgtatgcaaaaattcgcctgaagcccggctgcagtgtaggatatcacaagcacattggaaatacagagccgtactatattttggaaggtcatgggacttttattgataatgatgggacccggacagaagtaggacctggcgatgtctgtgtaattgaagttggacaggggcattcgatggaaaataattccgatcaggacctggtatttatggcattgatttacaacgagtaggaggcatgaatatggatttcgaagagtttgggaaaaaattgaaaaaatttagtcaggatacggtgacagaggttcagaagatgaacgaggtacgtcagctgaacgggaaaatcagcgatgagaaaaagcttttgaaccgtctgtatctggagatgggtcagaagctgtacgatacgtataaggatgtggagctcccattggaagaattcgacagtgactttcgcaagatccgtgagcgctatgtggcgattgatttgcttcaggaaaagatccgtaatgtaaagggtgttgtgctctgcccatgctgcaatatggaagtggcagccggagatcgttattgtacaaactgtggcaataagatgccggagacggtaaaacttgaggagacgaccgatgaggatgcggtagaggtagaatctaccgttgtagagccgggggctgaatcagaggaaggagaatcagaaaaagccgaagacgcagttgaacagacagagtcagcagcagaagaagcagtctgtgaggcagcagaagagaccggagcgtgtgccaggagtgcccatcaggaagagaccgttgcgacagatgagctggcagcagatgcagaggcagcggtcgaggaagcagaagaggagaccgcaaaggaagctgcggaatccacatcagaggagtagatagcatgcatttttatatgccgacaaaggtatacagcgagcgcggctgcgtccggaggtacagtcaggaatgggcaacgctcgggaaaaaagcattgatcgtgaccggaaagagctctgcgaagaacggagccttgatggatgtactcggtgcgctgcatgagcatggtacggcggtagtcgttttcgatgagacggaggaaaatccgtcgatcgagatggtgatgcgggtgcgggagcttggtctgcgggagaacgtcgatttcgtcatcggaattggcggtggatctccgatggatgcggcgaaggcgattgcgctgatgctgtatcataaggagaagggcgcagagttcctgtatcagaatggcgacgatgaggcgctccctgtcatagaagtaccgacgacctgcgggaccggttctgaggtgacgccgtatgcgattctgacgatccatgcgaagcgtacgaagtccagtctgccgcatcgaatttatccggcatatgcgctggcagatggtaagtatttactggaagccgggcgtggcattttggtcaatacggcggtcgatgcgctgggacatttcatcgagagttatatcaatgcgaatgcgacagattacagccatatgctctgtgaatatggtatgaagatatggagcagtacgaagagtgtgctgatcggggcagagcggacggtggaggactgcgaccggctgcttctggcatccacgatagcggggatggcgattacacatacagggacggcgctgccgcatgggcttagctattatctgacctatgaaaatcatgtgccgcatggcagggctgtcggatattttctgccgggctatgttgcggctgcggatgctgcaatgcgccgaaaggtgcttgaactgatcggttttccggatcaggcgtattttacagcctttatccaccggctgctcggaccgatgcaggcagagccggagcttataacacgtgcagtagaaggtattcttgcaaacgaggcaaagctgaaaaatgttccgttttccgtcacggaagatatattgaacagtatttgtgccgaagcaaatctacagaggaaatttacttaacaggttttcgcctgataagtgaaacggattctgtcgacagaattgccagaatcaggatagactgcaggactcgatcaggcataaagtatagtaaatatatcagagagggaagagaagatggaaggaacaggaaagcaggaaatggacgcactcgtagatgagattctgaaaagctatgaggcgcatccggagacctgcagcattaatacaagaaaccgcattagtaaagacattattattgatattctggaagagatccgaagcgtggtatttccgggatattttgaggtgaaaaatctgaacgcgcagtcgatcgaataccatatcggggagcttctggaggatattcattatcggctgcgcaagcaggtggcgaaggctctgtatcatacaaatgagaagagtattcgcgaggaagatgcgcagcttcgggcggaggagatcgtgaaggcatttctgaaacggattccggcattgcgcgaagtgttggcgacagatgtgcaggcagcttacgatggcgacccggcggcctttaataccgatgaggtcattttctcctatccgggtgtgttcgcgattacggttaaccggatcgcgcatgaactccatgtgctcggtgtgccgctcatcccgcgtatgatgaccgagtatgcacacagcctgaccgggattgacattcatccgggggctacgatcgggcggtatttttttatcgaccatggtacaggtgtggtagtcggtgagacgaccaggattggggattatgcgaagatctatcagggcgtgacactgggagcgctctcgaccagaggtggacagtgcctgcgcaatacgaagcgccatccgaccttggaggacaatgtgacggtgtattccggtgcatctattctcggaggagatacggtcatcggggccggagcagtcatcggttcgaatgcatttattacttcctctgtgcctgggggcacgagagtcagcatcaagaatccggagctgcagttcaaggatcgaaaggatcgcggtgtgaagatgaccgagcttggtcaggaagggttctggacgaaggacaacgagtaagcaggcggaagaggggaaagtgtggaacaaacggagcacggtttcgtgcggaagggagattccagtatgagcagaaacaaaaaagaaatgggaaacgtgggacagccggagcatccagcagcaccccagtcatccagtgagcagccgtcagtgcagaagcattctgcaataagcgagacttgggcgcaggagacgatcgaggatctcgatgattttattgagtctcaggggatttatatccggcagtagtatggacaatactttagcatcgcattgtcaataaagcgactgcgttcatgaccaagtagcgaagctaggccctgtcagcagagttgcagggatggattgcgaatgtccgctttactcacgcagtacatcagaaaaaggaaggacacggaatgtcatctccaatgctatggagacgacgttccgtgtctttttattttacaggaaattgcgtcctgtaaaataaggatgttccgtgaggatgcgcagcaaagatcagacattctgttgagtgcttaactatttgacagtcgttcgatgatttcaatgaccaaggacagatcagaggtgctaagggacttcagagcctctgtcacctgttccagtaaaaccggattttctgtgtttgtatcaaaaaattcccgcggcgttacgccgagatattcgcagatatacagaaattcagacatagatggcatggcacgtccggaggcgatgctctggatatagcttttgctgtgtccgagatccagactcatcttatattcggaaacttctttttgcatgcgtaattgggtcagtcggttccggatgaagttttcgtccataataattcaattcacatcctttttgcagacagtaccgcagagaaaacgatctgccgtctgggaaaacaacggcaatgttcccggcagtgaaacacagcatggaagtggattaccgctgaaattagtaatatcaatatagcgtctattctatacggtagaaaagcaggattgacacgattttagcggtaatatataattatatagactaatttaaacggtatatattaaggcatacctgattaggaaggccttacgccaaagagaaatatggatggagaaatggacgaatgatatggtgcgacagcagatagctgtgcattttatcaaataaaagtgtaaagaggaggaactgagtatgaagaacagacggttggcactggctatggcattcgccatgaccgtcacgtcgcttccggtgaacgggttgaccggctatgcggcggagctttcggagatcggatcgggcacagaagacctgttcgatgaagcggaagtgatcgcggaggatgttggcgaagcatcggaggcaaatgcatccgcggaggatctgccagacgcaccgggcgacgatcacggggtagcagaacagagcatggaggtgaccgatgtggctccgttcgtggaatcggtggaagtcgtggggcaaagtgatggtggagaggaagacgataacgactggggtaccgaggaagggctgatcggaggccatgtttttctgtacgcggactgggaatcagatgccacctatcagtggtatacaagtgaggccagggacagcgcacaaagcacttatactgcatttggaggcacatcctatgagcagtcagttccgttcgagagtaggagaacgtattatcattgtaagattataagaaccgctgaggatggaacagaaacggtaacgtggaatcattttcaggtgactggaaaaacgctgcagccgacgatgggcggtgaggagataacggttgttccgggagggacgatcgaactatctgcggaatttgaggcgtgtgcgggaaagtcgcttttttatcagtggtatcagagcggcgagaatggtgagttgacgctgatcgatggagctactagtgagagctataccgcagagaatattacggaaggtgtgacgtatgtctgcagagcttacacggatgatctggaagatggcgatacggcagatgtctccttttcgataacgatcgcaacgggattttgggtcagcgaagatcaggaatgcgaggcaaagccgggtgattcgcttaaattggaagcagtggcattttcagatgagggcaagcttacctatcagtgggcgcgccgggtactgaatgcagagaaagaccgctgggaactggaagtgatcgaagaagcgaacgaccgcagttatacgattacagatgtacagaaaaatgagacatttgtgtgtaccgtaagcaatggcagtgaggcaaaggaagtgagctttgaggtatctgtggacagtgggctggattatgcggaaacggcatccatcaatgtcgggagactttctccaagacagtctgttacgctgcatcaggatgcgacgaccaactatggcccactgacctatgagtggcagatgctcggagagccgaatgaggtcggcgtgcgggtttatgagccagttccgggggcgacgaacagcgcagactgtgtgattgagaatccaaagttaaatgcggacggagagtacctttgcatcgtttctgaccggtataataccggagagacccgttattcgctggagggctccatgagtacgcttcagatcgaggggagtgactgggagcgcaacgtgctggtagcatttggtgatgagctggagatggaagtcacggtgaactcgaccatttccgaagaggtgacttaccaatggagaaaatgtgtccaatgtggtgaggaatggatcccggatggagactgcatcagtacggagtcgatactgtatataccaaaggtgacagaaagcggagcctattgctgtaaagtatccgatggcgtttccaccgaggaagtgacattttttgtccagatgcacaaagggctacaggtgcagattccgccggagtctgtggtcaaggcgggtgagagtatcacgctggaggccaatgcgcgtacgaattctgagttgccgcttacctatcagtggcagacggttgtgcgtgatgaaaattatcaggaggaggtcacagatattgatggtgcgaccgcccagacctatacggtagagaatgttcagggaccgtgcatttacaaatgtgaggtatcggacggatacagtacgtctggcatttactacgagattaagatggataccggcttgaagtttgataatccggagtatcctacagttgctacgatttcggcaagaccggatcaggaacaggtgctggatgcgagcgcaagtgcggatggcggagtacagtacaaatggtattgcagagatatgaagaccggtgcatggacatttttggaggatgtgaccggggcgacctgcaaggtagatcttgcaaaatcaaaatattataaatgtgagatttatgataaatatgggcagggactcgacacacagtttcaggtgattgtcaataccggtctggaatccggtattgtggagaagactgtgacagtaccgtatggcgggcaggcggtgctgaccgtggatgcatccgatgcgatgacaaattatggaccgctgagctatgaatggtacaaggtaacagaggatgaagaggagagactggacggagcggatgacgcaagctatacgacaccggaaagctttacacatgtcatagagaatgatgtggactactactattatatgtgcatcgtccgtgatcagtataatacgaaaaagatcaattttaagatcgaaattgcaagcaatcttgtcgtgaagacgccggatcttttatgggtcgaagacggcggaagcgttgatctgaaagcggaggcgacctctgattacggaccggtagaatatgtatggggcgcgatgatgacaaatggccagatatggggactgggcgacttttccgaggacagtgcatttccacagacagatgtgacggatgtcgttcaatatgtctgcacggcgagggatcagacgggaatggtaaaatctgtatccgcagtagcagctccgctgagctttaaaggaaaggatgccccggattttgaacatgccagaacattccagattctcggagatactgctgaaaaccgggcaatcattttgcagccgggtggaagcgcttactttaagctgataccggatcggaatggtccgtggaatttctacgcggatacatcaaacgctacgatcgctgtttatgacagtgagcgaaatctgttagacaaagccggtgacgaagaagacagctggggcttcgacctgacactggatctgaaaaaaggcgcgacctattatatcgaatgcagctatcagagcatttggggcgagatcaaaaaagcaggaagctatgagtggtatggaggatataaaggcgatgagttccatgaatatgatgagggtgtcgtagtgaaggaaccgacctgtgtacagagcggtaagatcgtctacacctgtaaagactgtggatatgagtacgcggcaccgcttccggcgacaggaaagcatcagatgattaccgtcgtagagaaagccgcgacgtgcggagcagtgggcagccagcaccaggagtgcggcgtttgccacacgaaggaggcatcgacggtgattccggcgacgggagcgcatcagatgacaaccattgtagataaagcagcaacctgtggagccgcgggcagccgacatcaggagtgcaacatttgccatatgaaggaggcatcgacggtgattccggcgacgggagcgcatcagtatggagcctatcgtgtgacgaagcaggcgacggtctttgcggcaggtgatgaagtgcgaagctgcagcttctgtggcacggctgagcacagaagcattccgcagaagcaggggacggtgactctgactgtgacgaagcttccgctgcaggtaaagaagtcggtagcacttggcaggatcgtgaccggactggcagcaggtgattcgattgcatcctgtgtgagcagcaaccagaaggtggctactgtagataacagaggcaaggtgaccggtaagaaggccggaacggcagtcattacgattacactggcaagcggtgtatcggcagaagttacggtaaccgttcagaaaaaggccgtggcgacttcgaagatcgcgaatgtagagaagtcgctgaaactgaacattggcgataaaaaggccctgcagccggtgatcagcccgatcacaacgacggataaggtgcgctacacctcttccaataagaaggtggcgactgtgacaaagggcggcgtgatccttgcaaagaaatcaggaaagaccaatatcaccgtgaaggcaggaaagaagaaagtcacagtaaaagtaactgtggcgaagaaaacgccgaccggaatgaacggagtcccggaagcaaagacgctgaagaaaaagaaatcctttacgatcaaaccgaagctgactccatccggagctgaggcaaagattacctataagagctccaacgcaaaggtagcgacggtcaatgcaaaaggaaaagtgaccgcaaagaaggctggaaccacagtaattacggtgaaagcggatggtgtggtacgaacctgtactgtgacggtgaagtagtagggagcagctgtaaaataaaatctgcataaacgtataaaaagaaaaagatcctgccagagtaaggcgtacaaaccttatatctgtcaggatcttttttgtttaatattgccggagcattgcattacaagatcagccgctctgccgcgaatacgaacaacggaattgtcacaagcgatgcgaccgtggtaaaggcatacagctcggaggcgtacagagagttcttatggaagcgcagggcaaaggcagtgccggtcgctgcgatcgggcaggcagcagcgacgagcatcgtgcagccaaccatcgggtcgaccggaatcagtgcgagcacaacgagcagaagcgccggcataatgagcagcttggaagcagaaatgagatagagcttccgatttcggagcatgctcaaaagatcggtctgtgcgacagaaataccggctatgagcatggcgagcggcgtgttcataccggcgacatagttcatcgagtcgagcagcagatacgggatgtggatcctgccgaaaaagaacaccacgccgaggatgctggcaaagatcatgggggagagcaggccctttttcagctcctttaaagagaaagtcccggtcatgatcatgatgccgtgtgtccacgaaaagaaattgaagacagtcatgtaggcggtcagatagagcacgccctcgttgcctaagatgctctgcacgagtggtatcccgataaaaccgcagttggaatacatgctggcaaaccggtcgatgccacagtccggattgccggtcgtgcggattaggacggtggaaaggatggcagctacgagatgcgtcagaaaagcgagcagataggcgatgagtagtccctgtgcgagatgagcggaatactcggtctgcaaagatacgatggcgagcatcggattgacgaccatgagcagcagattggcgagtaccttgctgccattttcgtcgattagcttcatccggaagcaaaggcagccgagcagtaaaagaagtagcattttcaaaatctgattcactataatgacaaacattgtggtataatcctttcagagaaattcggttggcgcggtatacacggctacaaagcggattgagaatatccgcttgaccagatacttatatcaagtatggcatagcaaatgcgggatgtctagcgcaatgttgcggaaaaagcgatcttgcaggatatccggacaagaatcggcagaaggataagtcacagaaggttgaaccatgtatgaaacgcgcagaataacagagcagggaggaaaatcaaaatgaaaaggctgatactcgcatcaaattccccgcgcaggcgggagctcctggagcagatcggggtggaattcgaagtgattccgagcaacgcagaagaaaaggtcacaaagcaggagccgtcggaggtcgtggaggagctttccaggcagaaggcagaggacatagcggcatcggtagaggacggcatcgtgctcggggcagatactgttgtatgtcaggatggccagatcatgggcaagccaaaggatgaggcggatgcgaagcagatgctgcagaagttgcagggcgaggagcattccgtctataccggcgtgacgattctggtcaaagaaaacggcgcggtacagcatgtacagacgttttcgcaggagacaaaggtgtatgtctatgaaatgactgacgaggagatcgaccgctacattgcgaccggagagccgatggacaaagcaggtgcctatggcattcagggccggttcgcagcttatgtggatggcatcgagggcgactacaacaacgtggttggactgccggtgtctgcggtgtggcaggagctgaaggagctactgtaagcgcagaaatttacctgaatcaggcaaggctcctgtttccattgcgtgaaacaataaaaaagactatgtaagatgtccggaccggaagggtttcagaaggacagttacatggtcttttttgttgaatcagcatttgttatttactcatgacggctatcgtttgccagcggcatcttcctccgccgccggataaaacacatccacgagaaacagtccttgcggtggcgcggtgaatcctgccagtgagcggtctttcccttcaagtgcaagccgaacttccggaagggaacgttcgccaagcccaacctcaaggagtgtaccggtcaggatgcgaaccatattgtagaggaagccgtcgccgtggtagcgaatcgcgaggattccattggtttcttcgaaggtaatctcgtagatcgtccggacggtcgattttttcatatgccggtttgcacagaagcttttgaaatcatgagtgccggtgagcagatcggcggcctcgcgcatgtgctcaagattcagcttatcttccacgcgaagcaggtagcgtcgctgaaagacatttgcgacttcaccgcagtcaatccggtattcatacagcttgctgctggcggagagccgtgcatggaagcgctccggcacctgctcgactgcgaggacacggatgtcctgcggaagatactgattaaaataatcctggattttctggcaggaataacggctcatgatgcgcggaatccggaaattggcgatctggcgcagtgcatgtacgcctgcatcggtgcggccggagccgttcagatcgacaggctcgccgtaaagctgttccagtatcgtttccagcttttcctgaattgtatttgaggtgttgccctggcgctgccagccattgtagcgggtgccgtcatattgaatcatgaggcagaaatttgccatgcgagatgctcctttctgatgctgtatatgcggatttgccgcagttattgtgcgtaccgtctttcgggtatcatgtctgtcgagaggcactctgcggtgtacagacaaatagatatacgccggatttacggctgtacggtatctgtctgccggatacggaaaatttcaaattccccggcctgtccaagcttttcatagcctgcagcttcataataatcggcaagccccatatcagaatgcgagataatataattgacggtacatttttttgcgcttgttaaaaattcctgccggtcgatctggatgccatagcgggagacgagggccagccggtgcagatggtgatttgatgcgatcacatctgcgatctgtgtctcatcgtccggatcaatgctccagtcaagcagatcgttgcggcgcaggataccacggatcgacggatcgtactgtcgaagctccagcagctgctggcttgagtagagtgtgcgcttttccagtccggttgcggcagaatccgattcgatgatggaagaaatctccaggatctcatcgcttgtcttgtaaatattctgcggcatgtgcagataaggccggacagaagagccgacggtcgcgacaaagacagcgaagacgatagacaaaagaagctgtgcccattttttcatgcggagagtacagagcatggtaaaggcataggcgagcacgagattgaccggaagcagccagaacaggcggcggatccgggtggtcaggccgatctttgccgcgagcggcacgatgaagaacggattgaagatcgtaagaagcatgaaaagaaacggataaagaaagccgagacttaagcgttcctttccgatcacgaaaaatccggccaggcatacaaagtaagcgataagaaaccattcgatcccaccgaaggcggtccggaacatttcgtataaaaaggttacatttgaaaactgaaagatggaagacattcgcatcacctactttccggtataaataaggatatgattctttgtcagcatgtacagagcagccatgagcatgcatggaaggatcagaatcacataccgcaccacgatccgcagctgcttcttgtgcagtgcgagcggcagataaaaggccgtcagctcaaacggaatcataaagatagaggacatattcagcccaaaggagccgaggatgaccagaaacgagtagacccaccacgttttcccttccggattcaaaagcgtcttcaggaagcagtacagcagcgccggaataatcagaacggcgagaattgttttgccttccgacgggcggatgatcagaaattcagctgccgtgaacaggttaaagctgaagaagttcagcagccagagaaaggcgagcataagagtactctttgcacggttcccatgaaaaaggaagcgtccgatctcatacatgatgcactggtacaaaatgataacgacagatgccataacggtcatattctctaccatcggatgcagatgcagcagctggcacatgaccgcgccgtgattctgataggtttccagcagatattccgggttcaggtagtcgaggagcttaccggtatatggattgtactggctgagcgtattcgtatacagcgaagtcgccgtgtcaccaaggtagtaggactgatcccagattgcgtaggtctcgtcattcagattaaaaagaaggacctgggcggcaatcaggatgagcagcacacaggtgctatatttttgctgttcggtaaaaagcgaccgcagacatgccagcctggggccaaaatcctttcgctcggtaataaaaaagagaatcgatacgagtataagtacaatggcccacacagccgacagccgggataacggccataaaagcaccttcatcggaagtgccagcaccgtaaacagaaaatgatagacgaagaatccaaggattgtcgtgcgcgcaaatgaaaaatccgaggccggaacgagccgcaccgcaagtgcaccgaacgcataatagaaaaagaagtacaggagcagaactcctgcgagaatcaaaagctgaatcatcattcgtattctcccatatagatagtaaggtttaaacggtaacaaatcaaagcagaattttccggcaaaaaagcacagaacaaacgatctgtcatctctataaagataccaatttttgcgggaaaaatcaaggcgaagggcgatatctcaattgacataaagcagctgggatacaaagtattgatgctggaaaaggatctggcgtttatcagggcctgtaaaattgtgcagattacagagcaggtaattgtgttcggatgtaaaatccgctatactgataacatagtatagcgggttttgtacgttctgtggaggttcatatggggaatacgttaaaattaccggtaggaattgaaaattttgaggaaatccgaaaaaacagattttattacattgacaagacaaggtttatagagcagctggttacagccgggggcaaagtgacgctgttcacgcgcccacgccgtttcgggaaaacgttgaatatgagcatgctgcgctgctttttcgagattggtgcggatgcgtcattatttgagggtttgtatattgcggaaaacagagtactttgcaaagaacatatgggaaaatatccggttatttttttatcactcaaaagtgtggagggtcggacctttgaggatgcaggctatcgtatgatggaactgatcgggatggaggcagaaaggtttggatttttagctgagagtgaatatctgtcagaaaatgagagaaaccgttataaggcgatggtttcgctgcataatggcgcgaatgcaatggatgaaaaaatactgatatcaagtctccggattttatcacagttattgtataagcattttggacaaaaagctgtaatcctgatagatgagtatgatgtccccctggataaggcctttcagaatggatattatcatgagatggtttcgctaatcaggggcctttttggaatggccttaaagacaaatgacagtctggcgttttcagttttgacgggatgtctgcgaattacaaaggaaagtatttttacaggacttaataactttaaagtactgtctattttggatgtcagatttgacgaacagtttggatttaccgatcatgaggtaaggaaaattctggaagattataatctggaatctcatctggaagagacgaaggaatggtatgatggataccattttggcaaagcggatatttactgcccctgggatgttataaattatgtggatcaacttcggtatgatgagacagccgatccgcaggatttctggtccaattcaagtggaaatgccatagtccgcagatttatagacaaggcagatgtttcgactaaaaatgagatagagcatctgatagcgggggagcaaattgagaaagagattgtaccggagctcacgtatgatgaggttgataaaaacctggaaaatctgtggagtgtgctttttacgacaggttatctgactcatgacggtcgcacggaaagcgggaaataccggctggtgatcccgaacagggagatccgaaatctctttataaaaaaaatcagggaatggtttgctgacgtaacaagaaatgacggaaaagtactggaggagctttgcagtgcgtttgtaaataaggatgctgataaaatagagcagatatttggtgattatctctggaacacgatcagcatacgcgacactgcagttgcaaaagaaaggaaagaaaatttttatcatggtattcttcttggacttttaggatacaggtcgaactggctgatctggtcgaatgcagagtcgggaattggttacagtgatatcctgatagaggttccgacaaacaggacaggaattgtgattgaggtcaagtatgcggatgatggtgatctggacgcggcatgtgagcaggctctggagcagatagaaaaaaaagattacgtggcaaagctgaaacaggatggtatgaaaaattttattcggtatggaattgcgtgctttaagaaaatgtgcaaggttgtggctgtataaatataaaatttttaaaaatcaacggatattttatttcctttctcagggaacaacgatcatagaacatttgctgcagctggattctttctccaaattctgctagaatgaaagaagcgagagcaagaaagaaggatggtagatgatgcaggatattgatctggattttcatgggatcgatcggacggagctggatattagtctgaagtccttatattattttgtggtggtcgcggagacgggcagcattaccaaggcagcccgccagctgtatctgacgcagtcgatgctgagtaagaatatcattttgctggaggagcatttgcaggtgccgcttctggagcggagcgggagaaagattgcgctgacggaagaagggcagtatatctacaaaaaatggaagacgctgataaaaaattattgcagagagaatgcggtcatgcggaatctcagacattcggcgccggagaagttccgggtgggattttttccggcgctggatgtcctctgctattttgagccgtatctggagcggatccagcagaaatggccggaaatgttcgtcgatgtggtgcgcatgaacaatacgcgcttgtttgagcatatgaacggggaaatgatcgatctgctgtttactttggaggaggatattccggagaaaaaggagctgtatgaatggaagcggattggcacgacgccgctggtcgcgctgatcggaagacatcaccgactggccgggcgcgagcagatctgtgcgcaggatctccacggagagcagctgttttttaataatccgggcggcaccctgtccagagaagtctggctggagcgtttttttgagcagaatggactggagcgggagcatttgctgctggtgaacaacgacctgacggcggcagccaacgcagcgggagagcgggggattgcgctcggcccgaaatgctcattcggcaatctgacacaccgggtgagcatgcttccggtgggcgatatcacctttcatgtggtggcgctgtggagaaaggatatcagcacggcgatccgggagatgatttgcgcgattttggaataaggaaatgagaaaaattcgtttgacggaacggacggcgatctttataatgtcaatgtgaaaactgaacagaaacattttccggtatgtatgaagatacatttaatagggaatgcagtgaaagtctgcagcagtccactctactgtaaatgttttcctttccaatgatgtcactggtgcgcagcaccgggaaggctggaaggggtgaggcatgagtcaggagacctgccggataaatgagagagtgtgtgtcggtggagattctcacagtgtgataagtgctgccgaaaggcggcctttttttgtccgaagacctcatttgcgtgttctgtttcaagtaaattttacaggaaggtcaaagaagggagaactatcatgagaaaaacagtaagagcattggcagtcagcacgatttttgtactgagccttggaatgagtgcaatggcacaggagggtgctacaaatgaggtgacagacgttacaggacgtgtcgtagaagtaccggcggacgcgcagaacgtcgtaatgcttccgggcccggcttatgagaaggccatgatcgtaggcgcgaccgatcaggtgggtggcgtattaaagagctgcgtgaccgactgggcaaagctgatccatccggagatcaatgatctcgttatttttgacagctccacagagccgaacatggaagacatcatgaacctgaatgcggagtttgtgatctgccatgactatcaggatttggatgcgcagctggatgagctggatatcccgtatgtgattacgcagtgcagcggcgagcttccgtatcatgatctggaaggatttctggattttcagaagactgaggtaaaggcatttggggatgcatttggtggcgatgcggtagagaaggcgcaggcatggtgcgattactttgatgaaaaggtcgcttatgtgagagagaagaccgatgatctgaccgaggatgagaagccgcgtgtatactatgcacgttccgatgaagggctggttacattttccaaaaattcttatccggaatatctcgtagaactggcaggtggtaactatgtggcaaaggacactccggaggagatgaacagcacgcttacgattgagcagatcatggactgggatccggagatcatcttcatgggccgtatggacgacaccggtatcattttagacaacgatgcatggagcggaatcacggcagtcaagaacaatgcggtatacctcagcccgagcggcgtattccactgggattacagcggagagagcgtactgctgatgatgtatctggcaaagaatattcagccggagctgttcgcagacctgaacatggaagaggagattcagaattattacgagacgttctacggatatacgttaagcgatgagaacattcagaatatcctgaatcatatggcaccggtagagcagtaagaatcatgaaaaagggcagaggaaccaaactgattttcaccggattgttgctgttctgcgtggtggcgttttgcgtcggcatgtgcttcggtagatacccgcttagtgtaccggaattgttgcaggtacttggatcaagggtcttgaaaacggagatgacctggtctaaaaatgtggacaatgtggtatgggcgatccggctgccgcggatgtgtgcggcatttctggtcggtgcaggtctggccttatccggagcgacgtatcaggggatttttcagaatcccctggtatctccggatctgctcggtgtatcggccggggcatgtgtcggtgcgtcgatcgcgattctgtgtcagatgccatccgggatgatccagctgcttgcatttggcggcggcattgcagcggtggggcttacgaatctggtaccggttttcttccataataagagcaatctgatgttggtgctggcgggaatcatcgtgagtggatttttcaattcggcgcaggggctgctcaaatatgtggcggatccggatacacagctggcacagatcacgtactggacgatgggaagtctggctaagacaaatgtatcgggcgtgctctccattacaccggtgatgctcattgcgatgggcgttcttctttttttgcggtggcggatcaatctgctggcgatcggtgaggcggaagcacatgcacttggcgtgcaagtgggaaagcttcgggggatctcgatcatctgtgcaacggtgctgacggcttcttcgatttgcgtggcggggacggtcggctggatcggtctagtcatcccacatctcgggcggctgctcgtgggagcggacaataagcatttacttccggccagcctgctcatgggcggtggatttctgatgctgatcgatacgtgtgcgcggaacctcagcggatcggaggtgccgctcagcattttgaccgggtttatcgggacgccggtatttttatggttaatgataaggcagagagcgaaggtatgacgaatttattagaagtcgcagacgcagagttttcctacgatggggcgacgaccgttttcagacaggtaaattttcagctgaaaaaaggggagattctgacgatcctcggcccgaacggggctggaaaatcgacgctgctcagctgcatcagcgggtttcggaattttgtaaagggaaccgtgacgctgggagggcaggatctttctgccgtcaaagggcgtaagctggcgcagatggtcggatttgtcccgcagtcgcaggtgcgcacgtttgatttttccgtgcgggaatacattgcgatgggacgggctccgtaccttggatatgggaaaacgccatccgcttccgactatgcgatggtggatgcggtcatggagcagctgaatctgacgcatttgaaagacaaggtatatacaaagatcagtggcggtgagtgccagcaggtgctgatcgcgcgggtgctcgtgcaggatccgcagatcatcatgctggatgaaccggtcaaccatctggactatggcaaccagatccgcattttgaagctgatcaaacggctgtcgacagaaggctacggcatcattctgaccacacatatgccggatcacgcgctccttctggacggcaccgtcggagtgctcgaccgatccggacacttcaccgtcggcacaccgcgggagcttctgacagaagaaaagctgtatgagctctatggggagaagatcagctgcacgtatgtcgatgcggtgaagagagaggcgagtattccgtatccgctgggggagtgagttgaaaaacacattgcgaatgattgatatttagcgtttaggcgtgtatatttaagtgtaaaaagagcgatattatagtcggaacggagacttaaaacccgtttccagtggtcgggatgaagacctaaagcatagagtaaactgctaaaaaatagcggcgggtggcgcaggccatccgtctttttttggaaaataatggaaagcgaaagacaatgtattgaaatagaaaaatgctttttatcaagtcggcaggcagcggaataattcgaaggtcgattgataaggagcatttttgatgtgaatacggaagtacgcactgtggataagtttttaaattttactagtccctgttgaaaagctgcgtaaaatttcttatactaaaaaatagtacctgctatctctggatatccgggacagaggatggaaagggacatccatgaatcagaagacggcaggatgtgaaataattacggaagaaaatggagaaactgatcgtgacagaggaattttatatagatcccaggctgcaagaggagatcgagcagcagcttctggagctgccgattgtccagtatgcctggctgcctgcaaaagaactgaccttttcagaaaatgtgcgtaagatctgtcgggaggagtgccctcgttacgggacgagctgggcctgcccgccggcggtcgggacagtggcggaatgccaggaacgctgcaatgcgtatccgggtgcgtttgtatttacgacgattgcagaggtagctgatacagcgaatctggaggaaacattggcgacacgtggggaacatgaggcggtcacaaaggagattcgcaagatcctgcagacaaaatttgaacagacgctggccttgtcggcggattcctgtgaaatttgcggaacctgtgcctacccgaatgcaccgtgccgtcatccggatcatatggtgccatgcattgaaggatacggggtcgtggtagctgattttgccagaaaagcaggcattgaatttatgaacggagccgggatcgtgacctggttcggaatggtgctggttaaatagccgggtaaagtggacattcgcaatccacttcgctacttgctcatgaacgcagtcgcttcgcgatctgcgttcac

SEQ ID NO: 3063 - DNA, 29699 bp, Unknown
  16S sequences of unknown bacteria
tactgctatatataataattatatatatgagtataatcaaaggacgtggacaaagtaatgcagaatttcaaaagcgtttgggcggcagccgtcgatcttttgcaaagttcgataaacgaaaccgccatgaacctttggataaaaaccataactccgcttaaatacgaatcggattatgccgttctgaaagttgagtccgactttcaaagagacgttataatgacacgttacaagagccttatagtaaaggcgcttgaagacgttgtcggatttgaaatgaatataaaagtcataacggacgagtcttcatcggaagataccgttaaaaacgaccctgtttcttccgttacggaaaaagccgttgcggcagcggaagacaagagcagcgaatatacgttttcaaactttatagttgcggagtcaaacaaacacgcctttgccgcctgcaaagcggttgcaaatcatcctgcgggcgcatataaccctctattcatatacggaaatacaggtctcggtaaaactcacctgctgtttgcaattaaaaatgaaataaacaaacttcatccggaactcaaaacgctttatgtaaagagcgaacatttcataaacgaacttgttgctcttacttcacagggcaaagcgctttcagacaatgcaaacagtccgaaaaatatgatagagttcaaggaaaaatacagaggcgttgacgtgctgcttgttgacgacgttcagttcatagcaggcaaagacgcgacccaaaacgaattttttcatacattcgacgctctttaccaggcaaacaaacagataattcttgtttcggaccgtccgccgaaagatatgcttttacttgacgaaagacttaaaagccgcttcgaacagggtctgacaacggatatttatatgcccgaatacgaactgaaagttgcttttataaggcaaaaagcactcgtatacaatataaagatgacggaagaagttgtagacttcatagcacagcgcatcaaaaacaacatccgacaacttgaaggcgttatgaaaaaacttatggcattccaggatatatccgatatgccgccgaatattgccattgctcaaagcgcaataaaagatataacgcacgaaaatatgcctgtttccgttgttgtggacaaggttattatagaagtttccaccgcttacgacgtttctgttgaaagcatgaaaggcaagggcagaaaaaagaacgttgttatggcgcgtcagatagcgatgtacattttgaagaccattacggatatgtcgcttgacgaaataggcaaacaattcggcaataaagaccattccaccgtttcctatacaatagacaagatggaaaagatgcttgaaacaaatacaacgctgaacaacgagataaacgatataatcaaaaaaatcaaatcttattgattcaacacaataatcaacgcggttttcaaagcacgcctgcgttatcaaaaaagttataaaacgctttttcaacaatcaacgacgtttaaacttttcaacattgccaaaaaaaacgctgttttgataagttttactttatcaacatatttttcattttcgtttttattgacgttcaggtaaaaatatgaattataaacagtttccgcaacccctattattactaaaataattattttctttctttttactataaggaggtcaccgccttgaatttcagttgcgacagagatcttatattagaagcactcaataccgtcataaaacccgttcctcaaaaagcgagtattcccgttcttgaaggaatatgttttgagatagaagcggacggaacatgccgtctgacaggttccgacgttgagatgagcatcgaaacggttatacatatcgatgcggaagaaaaaggttctttcgttgttcccgccaaaaagttttttgatatgatttcaaaaatagacagcgggaacatcgacttcacgcttgatccgaacaagatgcttcacatcgtaagcggaatgataaagttcgatatttcaacacaggatgccgaattttatcctcagatgccgctcgttgaaaaatcaaaatctattgtcataaaacaggaacttcttctcaatatgataaagcaaacgcttttctccgtttcggagtttgaagcaaaagcaacgttgagaggtctttatttctgtgtcgaagacggatttctgacagttgtcggctccgacatgagaagaatggcaatgagaaaagaagagtttcttaataccaacggcgaagacttttctttcatagtaccggcaaaaaccgctgcggaactttctaaaataataaccggtgacaccgacgttataataggcatagcaagcactcatatagtttttgagtttgacgaaacaaaagttacgtcgcgcctgataagcggagaatacataaaatataaatctttgcttaaacgcgagttcaaaaacgaagtcatcgtaggctgcgacgatctgaaaaaagcgcttgaacgcgcacttatcgtcaatgataaatcaaacagttgcataagagttaattttgaatacgattccattgttatttattgccgcacttcggagggacacagtctgacagatgaaataccctgcaagaagacaggcgaaaatatggaaataggttttaagggcaaatatctgcttgacgttctgaacggttgcggagacaaagaaataaagataaaaatagattccgcaagaactcccgcatgccttgttccgacggacggaagcgacagatatatatatctgatttccccgatgaacataaacaacgactgataatatgcacatcaaatctttatcgaccgagaatttccgaaatctttatccgcaggaaattgtatttgacagcggcgttaatatctttaccggtatgaatgcgcagggcaagacaaacattatagaggctttgtggctttattcttcctgcaaatcgttcagaacaacgaacgaaaaagattttataaatcatgaaaaagtatttgccgaaacggatatactttttgaaaagggcggaagaatacagtcgggacaaatgaagtatcatacggcaaaaagacgggaactttatcttaacgaaataaaagtcaaaccgtccgaaatgataggaaattttacttccgttctgttttttcccgagcatctcgatcttttgaaagccggtcctgagggacggcgaaaatttgttgaccttgcgatttgtcaggtcaaacctaaatattacgcttacttatcggaatataacaaaacgctttttcagcgaaacaacgttttgaaaagcgaggacaaatctgaacttgaaacgattgaaatatgggatgtcaaactttctaaactcggagcgtttatatatttgacaaggcgaaattacatagcattgcttgccggttacgcaaaaacggtcatagatgaaatgagcggcggcaaagaaaaactcggtcttttttatcagagcgaatgcgacggctgtgaaaaacttgcggaagcggaagaacttcttataggaaaaatgcttaacagccgcgaaaaagacattaaatgcggttttacaaatgttggcgttcaccgtgacgaccttgaaataacgcttaacggtttgagcgcaaaatttttcggttcgcagggacaacaaagaagttgcgtcatggctttgaaaatggcggaagcggatatattgaacagcgtttacaacgaatttcccgttatgcttttcgatgatgttttttccgaacttgacagttcgagaaaatcttttatcgtcagccgcataaaggacaagcaggttataataaccgcctgcgaggacccgagtggaatgggagatgcaagaatattttccgtcagcaacggacgggtggagttggtttgatatgtatcttcacataggtctgaattatcttataaaaacaaaatacatagtaggcatattcgatattgagaacacttcggtttctcccgcaacgagagcgatgttccgttcggaagaagaaaaaaaacgtgtggtttccgttaccacggaacttcccaaatcgtatataatctactgtgaaaagggaaagacaactctgtttttgacccagttttccgtatcgaccttaaaaaagaggtttacgcaaaacggtgaaacggaactgagatgaaaggataaatggtatgtctgaaaaaatcgagaggtacgacgaaagtcaaatacaggttctggaaggacttgaagccgtcagaaagagacccggtatgtatatcggatcgacttccgtgcgcggtcttaaccacctcgtgtatgaaatagttgacaacgcgatagacgaagcccttgccggttactgcaaaaatataaccgttaccatcaaaaagggaaatatcgttgaagtgaccgacgacggacgaggaataccgaccggaaaacacccgaaaatgggtatatcgacgcttgaagtcgttttcaccattttgcacgcgggcggtaaattcggcggcggcggatataaagtgtcgggaggtcttcacggtgtgggagcgtctgttgtaaacgctctttcggagtggttgaccgttgacgtttacgattcaagatcgcataaacacgtttttcaggagtataaacgcggaaaagcggatgctcccgcaaaagtgcttgaagatacggataaaacgggaacaaaagttactttcttccccgatgccgaaatttttgaaactcttgaatttgaatatgacactctgcttaaaagacttcgcgaacaggcgttccttaatgccggtgtccgcatagttttcaccgatgaacgcggagaagaacccgtagtaaacgatatgtgctatgagggcggtatcaaaagttttgtagagtacatcaacgataacaaaaaagcaattcatgacgttatctatgttgcgaacgacaacggaacgtattccgccgagatcgcaatgcagtatacgaccaattacgatgaaaacatactttcgttcgcaaacgatattcatacggcggagggcggaacacacgaacagggtttcaaagccgctctgacaaaagttgtcaacgaatatgcgagaaagtacaaatatttgaaagaaaaagattccgacctttcgggcgacgatgtacgcgagggattgactgccgttattagcgtcaaactgacggaggctcagtttgaggggcagaccaaaacaaaactcggaaattccgagatgcgcggttttgtaaacaaactcatttccgaaaaacttgccgatttctttgaggaaaatccgacggtcgttcgcgttatcatggaaaaagccataaacgcacagcgcgcaagagaagccgcaagaaaggcaagagaacaaacaagaagaaaatcaggtctcgattcgggacagatgcccgacaaactccgcgactgcaacgaaagagacgcttcgctcacggaactttacatcgtcgagggagactcggcgggcggttccgcaacacagggcagagactcccgtttccaggcgatacttcccctttggggcaaaatgctcaatgttgaaaaagcgagagcggacaagatatacggcaacgacaaactttcgcccgttataacggcgctcggcgcgggtatcggcacggaattcaatatagaaaaactgcgttaccataaaatagttatcatggcggatgccgatgttgacggagcgcatatcagaacgcttcttctgacattcttcttccgctttatgaggcctcttatagaacagggctacgtttattcggctgttcccccgctttataaactttcaaggggcaagaccgtccgcgttgcatacagcgatgaggaaagagaccgtataagcgcggaaatgcgtgagggtaaccagaatgcgaaaatagatatttcgcgttataaaggtctcggtgagatgaaccccgaggaactttgggaaacgacaatggaccccgaaaagagaacattgagaagaatagaactcgaagatgcggttgccgcagataagattttcagcattcttatgggcgaggacgttgaaccgagaaaagaatatatagaattgaacgcacgttatgcggttaatctggacttttaaggaggtgacggaaaatggcaaaaaagagaagcgattataaacccgaggacattatgttccccgatcagataattacgtcttcggaactcgttcacgaaatgaaaacgagttatatcgaatacgctatgtccgtcatcgtcggcagagccctgccagacgttcgcgacggtcttaaacccgttcacagaagaatactttacgcaatgtatgaggacggtcttacaagggataaaccctatcgtaaatgcgcaacggcagtcggcgacgttctcggtcgttatcacccccacggagacgcttccgtttacgacgcgcttgtgcgtttggcacaggatttctcaatgcgttatccgcttatcgacggtcacggaaacttcggttcaatagacggcgaccccccggcggcttaccgttataccgaggcgagaatgtcgaaaatagccgacgaaatgctccgcgatatcgaaaaagatacagtcgattgggttccgaactttgatgagacgagaaaagagcccaaagttcttccgtcgcgttttccgaacctgcttgtcaacggttcttcgggtatcgcagtcggaatggctaccaacattccaccgcacaacttaaaagaagttataaatgcgacgatatacgttatcgaccacccagacgcaacggttgacgacctgcttccgataattccgggtcccgatttcccgacaaagggaataattatgggaagaagcggaataagaagcgcctatgaaacgggtaaaggtcacataaccgtccgcgcaagaacagagtttgaggaatatgcgggagacagaacgagaatagtcgttcacgaacttccatatcaggtcaacaagcgtatgcttatcgccaatatggcgcagcagttccacgataaaaagttggaagacatcgttgacatacgcgacgagaccgaccgaacgggtatgcgcatagttatcgaactcaaacgcggagcaaatgcacaggtcgttttgaacaaactgttcaatcagacgcagatgcaaaccacgtttgccataaccatgcttgcgcttgtggacaatcagacacagccgagaatactttcgctcaaaaagattcttgaagagtacatcgcgttccaaaaggatataatcacccgccgcactcgttttgacctgaaaaaggcgatggaacgcgctcacctgcttgaaggtttgcttatcgcgcaggagaatatcgacgaagttataaagataatccgcaattcctacgacaacgcaaaagaaaaccttatggcgcgcttcggtctttccgatattcaggcttccgccatactcgaaatgcgtttgaaagcgttgcagggactggaagaagacaaactccgcgcggagtataaggaaatcgaagaaaagattgcttattacaaccgcttgctttccgacgagggacttctcattcaggttctcaaagacgaactgacgcagataagagacaaatacggcaacgaccgtctgacagaaatttgcgagtccgaggaagatatagacatcgaagaccttatcgaggaaaagaactgcgtttacactcttacgcattgcggctacataaaacgtcagccggtggacgcttacgaagcgcagaacagaggcggcaagggcaagaagtcgatgacgaagaaagaagacgactatgctgaaacgcttttcgtttcttcaagccacagtctgcttgttttcttcacaaacgagggtcttgcatataagatgaaaggctatcgcatacccgaagcgtcgagaacttcaaagggtatgaatatagtcaacctgcttcaattcaaggatgcggacgaaaaggttacggcgatgatagccgttccgtcgcttgacgaagaggggctttacttcaacatgataaccaagcgcggcgtaacaaagcgctgccccgtttcggcattcaaaaatatgcgtaaaaacggcggtcttatcgcgctttcgcttgatgacggcgatgaacttataagcgttcatctgacggacggaacaaagaatatacttgttgcgacttccgagggtcagggcatacgttatgacgaaaacgaggtaaccgttgtcggaagaaccgcaagaggtgtccgagcgatgaaagtcgatccggaccatgaggttatcggttcggttgttgttgacgatacaaagaatctcttgacagttaccgagaacggatacggcaaacgcacagagtttgacgagttcaacacgcagcacagaggaggtctcggcgttatctgccacaaactgacggataaaacgggcgcactctgcggtataaaagcggttgacgataccgaggacgttatcgcggttgcggcaaacggagttcttataagaaccggagttgcaagcatttcgacttacggcagatcgagccagggcgttcgcgtgatgaatcttgaagaagataacaaggttatcggaatagttgcggtcgaagctgaacccgaatccgaagaaacggacggggaagacggtgaaaataccgagactgcggaaaatattccgcaaaccgagacagaacaggaatacacggaagaataaaccaaaaccgacgcggcggtatttccgaccgccgcgcgacaatatatgaaaatacagaaaaggtgagaatatggacaacaaagaaaagactatggataaagtagtcgcgctttgcaaaggcagaggctttgtatatcccggctcggagatatacggcggcctcgcaaactcctgggactacggtcctctcggcgttgaactgaaaaacaacgtcaaaagagcatggtggaaaaaattcgtgcaggaaagcccgtataacgtcggtcttgacagtgcaatacttatgaaccccgaaacatgggtggcgtcgggacacctcggcggattttctgacccgcttatggactgcaaagtctgcaagaccagacacagagcggataaactcatcgaggattacgttgcggaaaacggacttgacgataaccctgcgggttggtcggatgaggaaatgcttgcttatatcaaagagcatcacatcacctgcccctcctgcggctcttccgatttcaccgatataagaaaattcaacctgatgttcaaaacgttccagggcgttaccgaggattctacctcgactctgtatcttcgtcccgaaaccgcacagggcattttcgtaaacttcaaaaacattcagagaacaacgagaaaaaagattccgttcggcgtcggtcagataggcaaatcgttcagaaacgagataactccgggtaacttcattttcagaatcagagaatttgagcagatggaactcgaatttttctgcaaaccgggaacagacctcgaatggttcgattattggcgttcctattgccgtgatttcctttattcgctcggcataaagaaagaaaatattcgtcttcgcgaccatgacgcggaagaactttgcttctattcgaaagcgaccacggactttgagttcctcttcccgttcggttggggcgaactctggggtgttgcggacagaaccgattacgacctgacgcagcattccgaacacagcggtcagcctctcgactatttcgaccccgaaacaaacgagagatacacgccttacgttatcgagccgtcgctcggtgcggacagaatgacgctggctcttctctgcgacgcttatgacgaggaaaacatttcgaaagaccccgaaaagcccgatgtaagaaccgttatgcacttccaccccgcgatagctcccgtcaaagccgcgattcttcccctgtcgaagaaactcagcgacaaggcgatagagatttacggcgaactttcaaagtatttcaacgtcgaatacgacgatgcgggttccgtcggcaaacgttatcgccgtcaggatgagataggcactccgatgtgcatcacttatgacttcgattccgttgaagacaactgcgtgaccgtccgcgacagagatacgatggaacaggttcgtattcccataaccgaccttaaatcgtacatcgaaaaggcgattgaattttaattaaagcggattaacattttattaagaccgtagtttttgcgtatttttgcggtatacttaccgtagaaagacgtaagactgcggtctttttgcgctttttcggcggaaaaaagccgaaccgcaaaacagaccaagcatttccgactgtatgtcggttttgacgggagcggaagaaaggatgaaaaaatgaaactcatatccgttgttgttccgtgttataacgaacgcgaggttctgcccgcgatgtatgcggaacttgaaaacgtccgaaaaaaggattttgaagggatcgccgaatttgaatatatatttgctgatgacgggtcgtccgacggaacgacggaatatataaaagaaatgaggaaaaaagataaaaaggttcgatttgtttctttctcccgaaatttcggaaaagaagcggcgatacttgcgggactgcgcgccgcaaaaggcgatcttgttacggttatggacgccgacctgcaagacccgccgtcgctgttgaagacaatgtttgattccattgaaaatgaaggatatgagcaggtcggaacacgtcgggtgacaagaaaaggcgaaccgcccgtgcggtctttttgcgctcgcacgttttataaaatgataaattcctgcgcggattttgaaatgaccgacggcgcgagggattatcgtctgatgacaagaaaagtggttgacgcaatactttctttgcctgaaaaatgcagatattccaagggaattttcagttatgtcggcttcaaaaccaagtggataccatatgaaaatatcgaacgtgcggcgggaaaaacaaaatggtcgttttgcaaacttttccgctatgccgttgacggaatggtcgcgttttcggacattcttttgcgcctttccgcgtttgtctgcgtgctgttttttatcgcttttctgacctttgctgtgcttgccgttgtgttgaaaagttctgttttcgcaatcgtttccgtcggatttcttatcggcgggacggtgcttttgtgccaaagcgcaaacggaaaatatattgagcagatctcacgcgaggtcagacagcgccctgtatatattgtcgcagaaaccgaaaaggacggtgaaaaacaatgagttttccacacaggaagagaccttcgttgataacttcggcgcacatcgtattgcttgtcatcggtactgcgatttttacgctttttgcttttaataaaaatacttggttcgatgaggcgtatacgataggtcttgtcagacacggtgttgccgatattttcaaattacatatctatgatgttcacccgtttttgtactattttctgcttaaaatctttacgttcattttcggttcgtcgcttctttccatgcgcctgttttccgttatcggcgcggtaatgctttcgcttctcgggctgacgcactttcggcgtgatttcggtgaaaaagtcggattttggttctcttttttcagcgttttctgcgcttcgactctgtattatgcggaacagataagaatgtattcgtgggcgacattttttgtcgcgcttgcaggcatttacgcatatcgtttaggtaaaaacgacggtataaaaaactcagcgcttttcgttttgttttccgtttgcgcggcgtatacgcattattttgcgcttttcgctgttgcggcggtgaacattgttctgcttgtgcataaaataagacagaagcaactttttcgttggttcgcaacggcggcgtcgcagataattttgtatattccgggtgcgttaattttcttaaaacaggcaacggcgggcggcgcgtcatggataaaactctcattccccgaaaatgtttttgatacgctggcatatccgtttttgggtgaaaaacttattgatattctcggaaagggttccgttgcgtattatgccgtcggttcggcgcttgtcgcggtttttcttgctgcggtgcttttgcttttcttccggtgccattcgcttctttgcgaaaaaccgtttcgcttctctgcggagataattttcggcgtaattgctttttctgtgcttgtttcgcttttcagacctatatattacgaacgttacaccgtcgttctttacggatttttattctttctgtttgcccgtgccgtaagcgaagcaaaggtgtggacgcgcattgccgctgcggtgctgactgttgccgtgtttgccgttcaggtgcaccgaatatcgacgaaatgttttgatgagacaagcggaaaagtcgagactttgcttgaaaacaaattgcaaagaggcgatattgtcgtctcttcttccattgacatttactgcttttcggttttttccgagaactgcgacttttatttttacaataagggcgaatggaacgttgagaacgcatatcgtgcgttcggcgacaatacagttgtaataagagatctcaatattcccgagattactgaaaatgtggaatcggtctgggtattaaacgacaaaaatgttcgtgattttctgattgcgaacggtttttgcgaaaaagaaagggtttccgagcggtcgtcttacagaaaagaaaagtatactttcgtgcattttgaaaaggtgaatacggactgacaagaaaatgaatattatactgttttttgaatttttattgaactgacttgatttttgaaaaagatgtgctatacttaatatcaaacagaaacgttgtttttgtttcggacgctgtccgtaaaaattaaaaatgccaaacgatgtctgcgggaaacggctcacgccaccgaaggagtaacactctcaggtttcccgaaaggaacaggaccgcagattgatggcgatctggagaatcccgcttcgagcgggtgccgaaggtgaaagcgcaaaagcgcgaatctctcaggcaaaaggacagaaccccgaatgaacccgaatcggtctgtttttttgcagaccgatttttttgtttcgactgttggagtatgtcggagtaaaagagtgggggcgtcgcggcgaggggatatttttttccgttccctctccgcgagtcggttcaaaaacgtgagccgaaaaaatttctcaaaaagaaagggagaaatatggattttctttacaaggtcgtttcgaccgttaacacttatctgactgactacatactcatttttctgcttgtcggaacgggtatatttttcacgataagaacgcgttttgttcaggtgcgctgttttggcgagggcatgaaaagcgttttcggaaaaatttctttgcacggaaagggtcacggcggcaatctgacttcgttccaggctcttgccacggcggttgccgcgcaggtcggaacgggcaatatagtgggcgcgtgcggcgcaatacttataggcggtccgggtgcgatattctggatgtggataattgcgtttttcggtatggcgaccatttatgcggaagcggttcttgcgcaggaaacaagagttgtcggcgaggacggaaaagttatcggcggtcccgtttactatatcaaaaaagcgttcaacaacaagttcggaaagttcttggcgggcttttttgccgttgccgtggttcttgcgctcggctttatgggaaccatggttcagtccaactcgataggcagcactttccaaaccgctttcggcgttccctcatggatagtcggaatagtggttgcggtgcttgcgggcataatcttcatcggcggagcaaagcgtatagcgctcgttgcggaaaaactcgttccgataatggcggtgcttttcctgctcggcggaattgtggttctttgttcgagaatcaaattcattcccgaaacgttcgcaatgattttcaaagaggcgtttgttcctaaggcggcgataggcggcgcgctcggcgttgcaatcaaaaaagcgataagtcagggagcgaaacgcggacttttctcaaacgaagccggtatgggttcgacccctcacgcgcatgcgctggcacacgtcaaacgtccccacgatcagggtgttgttgcgatgataggcgtgtttatagatacctttgttgttttgacaatgactgcgcttgtcgttatcactaccctttatacgggtgacggtatccttgcaagcgaagttgctcccgcaggtatagacaaaaccaatatggcacaggcggcgttcagcggagtgttcggtcagggtctcggtcaggcatttgttgcaatttgtcttttcttctttgcgttttcgaccatcctcagctggaatcttttcggcagaataaatatgaattatctgttcggcaaaagatcaaatcttatatattccattcttgctatgggcttcatcgttctcggctcgttcctttccaacgaccttgtttgggaactgacggactttttcaactatcttatggtgcttccgaacgttatagctcttatcgcgctttcgtcgtatgtcgcaaaagagtcccgcaaacccggaaaatcgctcaaagaaaaagccgagcaagcggaaaaagtaactgttgctgcagagtaatgatattgacgaaatcataaaagacacctaaaaataaacgtattgcaaaaagcgtcctttcttttcggagaacgggcgttttttgcgaataaaaatccgcttggaacggttctgcccgcagcggatatacttttgggtttataccgcagttttcgttttttcgctgtttcgcggttcggcatactctgcacgcggtataatttattgaaaaaaatgcaataccccttttcttttcggttgttttgtgctataatgcttaataggatattatatacacccgaaccgggtgattttgaaaaaagacagaggaaaaaagatggaaaaatatatcggcggcgtgtacgactgcgccgttatcggaggaggacacgcgggtatagaggcggctctcgcctgcgcaaggctcggtctgaaaacggttatgttcacaataaacctcgacgccgtcggaaatatgccgtgcaatccgtcgataggcggcacggcaaaaggacaccttgtgcgtgaaatagacgctctcggcgggcagatggcaaaggcggcggacgaagtttttcttcaaagccgaatgctgaacagaggaaaaggacccgctgttcattcgctccgcgtgcaggcggacagagcaagataccgtgttttgatgaaaaaaacgcttgaagcgcaggacggacttgatataaaacaggacgagatagtcaggataggaacggaaaacggaaaagtttcggaggtcgagacccgtctcggtgccgtttacaaagtccgcgccgccatcgttgcaacgggcacgtttctcgggggcagaatctttatcggagacataaactatgagggcggccccgacggaatgcacgcggcgaccgaacttcaaaaaagccttgtttctctcggactttcgctgcgtcggttcaaaacgggaacacccgcaaggatacacagaaaaagcgttgatttttccgcacttgaagttcagcacggcgacgaccccgttgaaccgataagctttgaaaacgaaagcgtcggcgaaaataccgcagattgctggatagcgtatacgaacgaaaaaacgcatgaaataatcagaaaaaatcttgaccgctctccgatgtattcgggcgatattgtcggcgttggaccgcgttactgtccgtccatcgaaacaaaaatagtacgctttgcggataaatcgcgtcatcaactttttgttgaaccgatgggaacggacacggacgaaatgtacctcggcggtatgtcgtcctctcttccggaggatgttcaggtcgaaatgatacgttccgttaaaggacttgaaaacgcaaagataatgcgaacggcttacgccattgaatatgactgcgttgacccgcaggaactgttgccgacgctcgaaacgaaaaaagttgaaggcttatacggcgcgggacagttcaacggaacttcgggctatgaagaagccgccgcgcaggggcttgttgcaggaataaatgcttcgatgaaaattctcggcagagaacaggtggttttcgaccgcgcaaattcgtatatcggcgttatgatagacgatttggtaacaaagggtacggaagagccttacaggataatgacttcgcgctccgaatacagacttttgctccgtcaggacaatgcggacgaacgtcttacacctttgggacattcgataggtttgatctcggacgcccgttacgaaaagtttttggaaaaagaagcgcgtatcaacaaagagatagagcgttgcggaaaaactttcattccgcccaatgcggaactcaaaaaaatcgttgaagagcggaacaccccgcttcccgcaaccggaataacgctttcggaactgataaagagacctgaactcgattatgcctgtctcgaacccgtcgataaaggaagacccgaactttcacggcgagaaaaacaggaagttgagataaaaataaagtatgacggatatatccgacgcgaaaaagcgcaggcggaacagtatgcgcgccttgaacgcaaaaagattcccgccgatgtcgattattcgcagataaagggacttaggatagaagccgcgcagaaactgaaagaggcgcgtcccgcttcaatcgggcaggcaagccgcctttcgggagtcaatcccgccgatgtttctgtgcttttgatatacttcggaatggtttgatttatttgaacggagatgcttttatatgaatctggacggaattaaaaaagtatattttatgggtatcggaggctcttcgatgtcgagccttgcggaaattcttatcagacgcggctacacggttgcaggctccgatatgcaggaatccgcaacggttgaacatctgcgcaagttcggcgcggaggtgactgtgggacaaaaagcggaaaacgtggaaaagtttgctcccgacattattgtcaaaaccgatgcgataatggacacgaaccccgaactcgtatatgcaaaggagcataatatacccgtttatcgccgcgcggaactgctcggctatatcatagacggatataaggacgcgataggcgttgcgggaactcacggaaagacgaccacgacttccatgataacctccgtattcctttccgcaaaaagggacgcttcttccataatcggcggtcacatgaagaggatagatagttcgtatcttgtcggaaaaacaaatgaaatgtgcattttcgagagctgcgaatttaagagttcttttctgcacttcaagccgagaatttccgttatcctcaatgtaaaagaggatcacatggagtatttcaagactcttgaaaacctgataaacactttcaaaaaatatctgctcaacacacgagagggcggaaccgttgttgcaaatgccgaagacgaaaacagcaaaaaaatgcttgaagactacacgggtaatgttgtttatttcgggctcgaaaaaggcgacttcacggcgcaaaatgtgacattgacgcacggtctgccgtcttttgacattcttcataacggcgaattttttgcacacgtcgatctttccgttcccggcagacataacgtttacaatgcgcttgccgctgcggcggcctgcttcacggcgggcatagatgcggacggaatagcgcggggacttcacgattacaacggcacgggcagacgctttgaatatcattgcaaactgaacggcgccatcgttgcggacgactatgcgcatcacccggacgcttaccgcgtaactttcgcaaccgcccgcgatctcggattcaagagaatcattgcgatacatcagccgcatacatattcgagaacaaaaatgcttatggatgatttcgtcgcggttctttcgaccgttgacaaagtgcttatacctcccatttatgcggcaagagaaacgaacgacgattatcatatatatgcgcaggatgttgtcgcgcgcctgaaaaatgcggaatttatgcccgatttcaacgcgatcgccgacagggtaaaagaacttgcgcaaccgggagatctgtttataacgctcggctgcggagatatttataaagcggcggaacttataacggaaaaatacggcgaggaaaaattctgatgtttaatcccgacacggtgcttgacaaatcgtattacgcagaaactctcccgcccgaaataaccgatgatatcataggaaaaacggtatttcccggaataaaggacagcggaaaaaaggctgacgcaatagtttgtctcggctgtccgtccgcaaacaaagtcagagttccacacgctgtcaagctgttttttgacggaagagccgaatgtattgttttttccggcggtgtttatcgtgacggcgaatgtgaagcggagcgcatgaaagaacaggcgctactgctcggtgttccaggagatgcgattttgcttgacaaactttctcttacgaccgcagataatatgctcgggtcgcttttggaactttcccgaaccgtcggactgaaagatattcattcacttataatcgttacggcggattttcacatgccgcgtgcgctgttgcttgcggaaaagttcattcccgattttatcgaggtcattccgtctcccgccaaaagcccggttgatgaaaaaacttgggtcggaagtgcgtatgaggatattgttcgcggtgaatttcgcggaatgtattactgttccgatataaaaggcggctacggctggtggtcggaaagcagagttttcaacggcacggaaaagaaatgaggataactttatgagaacgggcataggctatgattcgcaccgcttcgcggcgggcagaaaacttattctcggcggagttgaaattccgtttgaaaagggatttgacggacattcggacgccgatgtcctcgttcacgcggttatcgacgccgttatgggtgcggcaaaactcggcgatatcggaaaagcgttccccgacagcgatgtgagtttcaaagacatttcgagcattcttcttcttgaaaaaacggcggagcttcttgcggaaaaaggttatggggtcgtaaacattgactgcgtcgttgttatgcaatctccgaagataggcgtttatacagaaaaaatgtgcgagaatatcgcttcggcgctcggaattttgcccgaatgtgtaagcataaaaggcaagaccgaagaggggcttggctttgtcggcaacggtgagggagtgaaagcgatagcctccgttttgatagaaaaaatgtagggttgttatttggcaaaaacaaaaagttatcaacaaaaaacagagacctctgcggaaaactccgcagaggtcttaattgcatcatagacaagtcagcattattgataaaagctgttttcgtgtcaattctcttttttcttcgcggcattctccgcaagaacagccgccgcggccatatctatctttttcttgtcttctttgtatgaggctttgagaagaatcggcgtcacgaggcttgaaaccactatcaaaagaataataaacggcataatgtcggcgtgtatgagccccgcgtcaactcctttttgggcgcagacaagcgcaacctcggcgcgagccatcatccctattccgacgcggaaagagtcttttttgctatacttgcaaagaagagcggtgccgccgcagccgataaccttgccgagcagcgccacaacaacgaaaacaagcccgaagatgagcatattcatatcggggaggctgaatttgtttgcgatagcgatgtttgcgaagaatacgggggtaaacatcatatatcccataatttcggagcggcgttcgatatagtttgcctcggggttcgacgaaagtaccatacccgcgacgaacgctcccgttatatccgcaaccccgaaaactttttccgccgcgtacgcaaagaaaaagcagagagcgacgctcataacgggtaaaagcctgtggtgcggaaaatttcgttcaacggcggcaaaaatctttcttgcaagccagccgacaagaactgcggcaatgaagaaaagcacggttttcagcagcactatccacgggttttccgcttccccgccctctttgccgctcataccgataacgaccgaaagaacgatgatgcctacaatatcgtcaagaatagccgccgtaacaacggtcgtgccgacatttgaagaaagctttccgagctcctggagcgtggcgacggtaacgctgaccgacgttgccgtcattatgaccccgtaaaaaagatttgtaaaatactggtcgtgcgtcagacctatcatcgttccgtttcggataaggcaagcggcaataaagccgaggatcatcggcacgaaaacccccgccagtgttattatcgttgcgggcagtccgacggatttgatctgcttgacgttgatgtcaagtcctgcgttgaacattataagaacaacgcctattttcgcaaaaaagccgagccccgtcaacgcggggcttccgcttgcgaaaaaaacctgcataggtcccggtatatattcgacaacgctcacgagtatacctgcggcgataagccctatgacctgcgggatgccgatgcggacgcatatcttgccgaatatttttgatattacaagaattatcgccaacggcaaaagaacctgaaagtattccataattccgttcctctttttcggagccgagagaacgctcgttccctcggcttcgattagtttttttatttttcgggtgcttccgagaagacgtaattcattcttccgtaaggcgcggcgtctccgtttttatagaagtcgaaaatactcagagaacccgtttcgggatcgttgcagttatccgtccatttgaatcggatatctacaaggcgtctgcccgtatattcgggagaatttatcgcttctctcgaaactgaaagcataactttattgcccttgcacctaatttcgcagtcgccgaccgttctccattttccgcccgttccgcttgccgctttgagaaccgctttgtccgccgccgttatttcaacggcaaaatcgtaaccttcccagttttgagaagagccgtttccgctgtctatgaacagcgtcatcgggtttcctccctcaaaagttatgttttcagcggtttccgcatagaaatatatgttgtcatcgtcgcggcatgtctttatcgaaacaaagtcgttacgtccggtcttgttgatgtaattgtttaaagccgagccccaacctgttccgtttctgtcttccgtgtcatttttgtaatccgtgtattttgcggttatttttgcgtcgttccattggtcgaaagaaccgagaatgtctatggtggttttatccccgacataaacacggttttgtgtgcccttgaaccggcggataccgtttatcaactgcatatagtagttgtctccgaaaccgccctccatgggctcaatgtctctgctgttgtttacgtctgccgcatcgacaaatacgacctgcgaaccgctcgtcggctgtcttgatgccacccattcgttccaaccggttacgaatattgattttatatcgcttctgaaattgttcgaaagcgcaaaattccattgatcggcaaagttatagccgtaaagatacgcgttttcgtccttaacgttgattcccgccgcaggattgagccttgcaaatatatcgttgcaaaggaacgaacgcgttctgtttactttgtccggctcgctgtaccaacttgcggaaaaacgcacggacggataatgctgtgctgccgatacgtttatcacagcctcaccgctttttccgtatatggcggaataagagtaaagacgtgaaaactccatccacgggaaaccgttttgaaggtctgcgcttccgacgtcgttcggccagacatacgaccttatcgtgaaatagtcggtcacttttttccagttcctttttgttgcggatgtcgccgttgcctcaagattcgcggaaccgattataagcggtttgttgcttccgtcataagaccatctgtaccaaagttcgtcaagtctcggataacgctttttgagattcgcgttattataaaaggaactgtatattttatacatcgtgttcgatgcatcggagtgcgtataaaacgcaagtttcggaacatcataacccgcttcgagatattcataccaaacggagataagagttcttacattctgctcgtagacaagtccgtttgtcgtgtcaaaaacaatgtagtcaacgcccgcgtccgtcagcatctggcaatgttttctgtatacccattcgtcggatgaagtatagtaatcaaaaagcggtttgccccaatatgcctgttcgccgatatatgcaccgccgagtttttcccatatcgcaggcgttaaagtcgtgccttccggatattgctctttgaacttttgtataatgagagagttgtcatatggaccgtaattgctcttgaaatttcctcccgcatcggttcctatccaaagaaaatagaaaatgccgacgcttctttcggagtcggtcgtttcttctttttccgtcagaactctgccgagatcgtccgtgcccgaataaacgccgtcaacttccgcatacggaccggtatatttttcaaccggtttgttgtaatttgtgaccgtgcatcccgatattacggatactgaaaccgcaaatatgaggagcagtaaaattgccgtctttttcaaatcttacctccgcgaattgagaagaaaggtggaggcgcttttcacgcctatgattgttcgtcgagtgtgagtgaataactttcaagaaattcgtcgataaagacccgaacgcttttgaggggtaactgttcaagcctttctcttatcgacttcgccgcgccctcgaactcacggttgcccgctttgagttcttcgacgcatttgatgtacgcgctcaatgtgtcagccgctttaacgcatctgtgttcgggggtatcctcttccgaaagcagatccgaatatgtcggctgcatatcttcgggaagttttttgacaagtaaagcgtttgcttctttttcaatgtctttgtacacgttgcgtatcccgtcgttataatacttgacgggtgtcggcatatcccccgttattatttccgaagcatcatggaaaagtgcgatgaccgccgctttgtcgggatccgtctcctgcctgaaacgctctttttcaatcaaggcaagcgcgtgggcaatcacggcgacctgaaaagaatgttctttcagattttcacggtcggtgttccgcataagaccccagcggtttatgtacttcatcctgtttataaaggcatagaagtgatacatcttaaatgtttccgttcctgtatttttcaagcagatccgcgatcttcttgtgtgggtcgagaagtgtggttatggattggtttctgtgaagcgcgaggatgaaataagcgatatattttgacatatcgacctgaatgtaccaatctttagcaagcagttcgggcatacggtatgtcatgtttgttgaaagaactcccgaaataagacccttgtccacagctttctggaatttgtccaacccctcggtgaaaagtccgtaagtcgcaaacatgaagattctgtttgcgccctcttttttcaggtcttccgcaagacggagcatggagtctccggaagcgatgatgtcatccgcgacaagaatgtccttgcccttgaccgacgctccgagatattcgtgcgcaacgatggggtttctgccgttgacgataacggagaaatctcttctcttatagaacattccgagatcgacgcccataacggaagcataatacatgtttctgtttatcgcgccttcatcggggctgactaccataaggtgttctttgtcaattttcagatctttgacttttctgaaaagtgctttcagaacctgataatagggcataacgttgtcaaagcccataagaggaacggcattctgaacacgcgggtcgtgcgcgtcaaaagtgataatattttcaacgcccatcgcttcgagttcctgcaacgctatcgcgcagtcaagagactctctggaagaacgtttgtgctgtctgcctccgtaaagaataggcattattacatttatacgggaggcttttcccccaacggcggaaataattcttttcagatcctggtaatggtcgtccgggctcatcggaacgcttctgccgtacatattgtattcgcagctgtaatttccgacgtcggtaacgataaaaagatcgtcgcctctgacagtttctgaaagtgttccctttccgtcacccgacgcgaaacgcgggcactttgcggaaacgagaagcgtttttttagcgtcaggctcgtccgctacttcgggatttgcttcataataccattttataagatattcgtttatcttgttgctgagttcgaccgttccgactgtcggaacgattcccataggaaattggtcgtccttcattttaagcattattgcggcttttgactccataaaaataccatcctcttattaaacttcacaggtatatcttttcctataattattatagtatatatctctgaaaaaatcaaggcaatttagtaaaaaatatcttattgtgttgaaatgtccatatttgtgtgttagaatgaaaccgaaaagtgcaaaatgcctgaaagaggtggaaaatttgggcgaatacaacaatttcagcgatgattttcgcaaagaaagaagaagacctaaaaagaaaagaacaaaaaaaatctgtcctttgccagtcacaattgccgcggacattctgcttgcgggttttattcttcttttgttcgcatacatacatcacggacgcgcttatctgcgcaatgaaagtaccgtggacgggtccggcataacggatctgaccgaaaaaccgaaagaactgcaactgacgctttccgctcctgccgcaaatgtgggcgaaacggtaaaagcggaacttgccgttgtttcgtccgcgaacataaataaaactacgattgtcttttcttacgattcaacaaaactgacgcctgaaggctcttatgcccccggtgacggaatttcttccgatgcggtttttgagttcacggacgccgacggggaaaacggcttgaaaacggttacgttgatcgcttctgcgggcgcatcgggttcggtctttgcctataaaggcacggtgttctccatgtctttcaaagtcaaagagcctttgcagggtgtgacgcctgttacgatcgaagtcacagacggcgcaacgctcaaaaccgacggaactgcgccgacgatgaaagttgtcaacaacaacggcgataagacctccgttacagacggtgatttcagcacagtattcaagaacaaattcacggacggcgaaccggtacagacggaaaattcgtacatgggcaaaaacgtcagcgttacatggcagcgttatgaagataaatcgaccggtggttttgttgtttactatgttgccgatatatacatcagaaacaccgattatttcaagaccgcgcgctcttcgggattctcttccgatgtcgcggatatggcaaaagcgaataacgcgatagtcgccatcaacggagactatttcggcgcaagaaatcagggcacggttgttcgtgagggacaactgatccgcgaaagcaggttcaaagatgttctcgttctgttcaaaaacggcgttatgaaaacgtattcgaaagaagagttcagccttgatgctgttaagaccgccgcagatggtgccggaacgtctatcctcgatatatggtctttcggtccgtcgcttttggatgcggacggaaacgcgaaaaccgagttcgacagttccgtaacccctgcaaatccgcgctccgcgataggatattacgaacccggccactattgccttgttgccgtcaacggcagaggtgaagagaacagcgtgggattaaaaatggctgaccttgcgcaacttttcagcgatctcggctgtaccgtcgcatacaaccttgacggcggaaaatcttccgttatggtatgggacggcggctcaacaacgataaacactcccgacggcggcggtcgctccgtcagcgatataatttattttccgaaagattgaggtgactgctgatgaaaaaggtttgtgaaattgtcaaagcggtcgtgccgcatatttcgataggtttttccgttgcttttatcgtgattcttgttatagatatgtttatcaatgacgcaatgggctttatcaacagcggaacattcaagtggatgtgccttatcaactgtgtgacaaccattctttcctgcggttttctgatttcgaaaaacagaaaagacgcacgccgaaagatcagaaaagaagcaaaaacacagcgtaatctgtaaaaaatgaaataaatcgtatggggaagagttttgcaaacggcttttacgtcgtctttgcgtaaaactcttccccaaaattttccgaatatcctttctccgttcgacaaaacactacggaacatatctgctataataaaatcaagacagggagaagcgtttgctgccctgcgaggaaagaaaactttcccgaatatactgtcctttcaccgaccttatttttggaaaggacagactaaaaataatcccgaaagggaaaaatatagattgagagctgtaaaaaaccatgttttttgcagctcttatttttcgtgaaaaagcggtgccgtgacagcagttataactcctgccccgactttttcaaattacaatccctgcaaagcatctgcaaattttcggggacggttttaccgcctgcgtgccaaggcgtaatatggtcagcgtgcatatgttcaagttcaaagtgttttcgacaaatcggacaaattccgttttgctttgcataagcggtagctttctgattgtcggtaaatgctctgatacttaaagctttttctttcccgcttaaaagatactcataaataccttttttagaagttacatcgtcatctgccataagttctgatattttttgttcaagcagagacggattataagaattgttgcagaactcattgtaaaacaaaccccattcaagtcctttcatttccttccggtattcgggaaaaatcgtcttcacccatgaaataacattctgaaagtaaagccacagcgcagaaccgtttgaatcatgctgatgttcagacatatattcctcaatactcttgttttcttttgaagcaatccactttatcgccttttcaagataatcttgacgaatcatttctccgctgagatatttgtttccgattctatacgcgggacaaccgttctttgaaaaatattttttgacatcggtcagccatgagcctgtatatacggcatttctcaattcttgttcggcaagttttacgccggcaatatttatagtcttaaaccattccatcttttcaaggtcgtttcctttgcatatgtaaatcataagcttgtaatcaagaatgtgttgcttttcggtattggtaagattgttgaaagttctgttatttattgaaaaatctccgctgcaatactgacaaagactgatagttctttgctgaccgtcaagaagttcatagtttttattgtcatcttcgcaccaatacatcacattcagagggaaaccttttgtaacggtatcaataacagcattgcgctccttttctttataaacaaattcacgctgaaaagcgggtctgacattaagctttccgctgaatgcgacaactccattgtctgcactgtctttgtagccgtcgaatatttctttgacagagtgttcttcgagtctgatttccattattttaccttctttctgattagaattcttgcatatgtgggcttgccgcagatagcactgtctgcatcttttattaagtaagtatttttgtttctttgcttatcgaacaatgcatattctcttgcgtctaaaatttcaaattgttcaggattgtatttatcaagaaatgtaataggtactcccattgttccataataatcgcatgggatttctgaaaccttgcccacttcaatagcatcataattatcataagtgggatattcttcttctgaatagtttttataaagaatcaagtcctcatgtcttttgctgtggtcgagatttgtataccaacagatatttccgaaacttctccatttctgtcctttttcatcaatccaaaatcttgtttctcttgcttcatacgatgccggaacagtaaatgccatgtctccgcatttaaaccccaaccataatctgttttcttttataaggggaaaaatttctttatatgtaatttcattttgattccctataatgataaactttttctcgtactttataagatgtgcaacaaattctctgaaaagtgaaaacggagggttcgttacgacaatatcagcttctttcaaaaattctatacactcatcagaacggaagtctccgtctccttttaatatttggggtttgttttttcttaaaatcaactcaaaatcaattaaatcaacggcaccgtcaccgttttcgtctgtgacttcggtgatttcaattacatacggctttttccctttgtcaacggtatatttctcttcatcttcttctccaaaaaggttaagttgagtatacatcacgggagaagtcgcataacaggttgcaataagttttttcaagccgagagcattaaaattcatggcaaagtattttacaaaattgctttcataagggtcgtcacaattacagaaaaccgttttatccttgaaatgctccttgtaatgtcttaattcgttttctatatcaactaattgagtataaaactcatcattctttgcttttttcgccgccgaaagattttcgtttttgtttttcattttaattattcctttcagtttgaaaatatatcatataatttcgtcgctaattcgtttatgtatcaagtagtataacacaaacttgcacatttatcaagtagtttgaggtataatttgaatataccacaaattcatgaggtgcaaaatggacgaaatatatgatttcggaataattcttcaaagactgcgaaaagaaaaaggaatgacacagaaacaacttgccgacaggattcataaagagagttcaataataagtcgatacgaaaaaggattgcaaaacccaacttttgagactgtaaaagaattcgctgcaatatttaatgtttctatggattatcttgcgggaatggagagagattcaaatatttcgactttgggtttgaattccgagcaaattgctgttacgaaaaatcttgttgaagctttcagaaagaaaaatacatctatgcctcgaaaggcagatgccgaaaattatcaaatcataggaagaatagcagtcgaattgtcaaactgtaaatgaacagtgatacaggaaaaactgcggacaataaaaaaatcccgacaaaccggaataaaacatccgatttgtcgggattttctaaaaaagtattcttgttattttccgtttttcgaacggcggcgaaagatttcaaaagagatccccgccgccgcgcccg

SEQ ID NO: 3064 - DNA, 12945 bp, Unknown
  16S sequences of unknown bacteria
ggaaggcggtgatgtccgccgcctgactgatggggtagcagaagaagcccaccgggatgctggcttcgaaattccgctgctggatttcggccttcaccgtggggttgcgctgcactcgggacaccgtgaccagattcatgtagtagaaggtcagctccgtcagttcgggcaccatggactgaatgaaaatggtggatttttcgggatcaaggccacaggccagataatccagcgccacctgcagaatgttgctgcgcaccttctccgggtgctcggcgttgtcggtcagggcctgagcgtcggcgatcatgatatagatctcgtcgaactggccggagttttgcagccggacccgctctttcagggaacccacgtaatggccgacgtgaaggcggccggtaggacggtcgccggtcaaaatgatctgactcaagaaaatgcacctctttcagcaatgaaagcctgaaaattagtgaatgacaggaaatttgttccgaatggcgtcgtcctgcacggtgaagttaaaattcatgaagcagtggcttcccacccgggtgtgacagccgtagtggaagcggatgggccccagcatgaaggtgccttcgcccacgatggccagcaggtcatgtaggatgcgttcccgttccgccgtgccttcttcgaacagatcgctgtattcctgactgagccggtgggctttcagctttttggcgaccagctccggcacttcggatgcgaaaagctcgcctttgaaaattcgttcttcttccgtcatgacggttccttcctttgcaaacgaataggataaacgtatgatagcacggcccgcggaaaaggtgcaagagggaaaaacaacgttcgtacaagggagtcggaaaagggggcttgacctgcctgtagtcgtggtgtttataatatgaaggaaaatcagggaggggactttacgatggaaaagaagctgaccacgggcagcgtttggaaaaatatagtagagttttccctgccgtacctgctgtcttattttttgcagacgctctacggcatggccgacctgtttattatcggacagtatgagggggtagcgggcaccacggcggtgtccatcggttcgcaggtgatgcatatgcttaccgtgatgatcgtcggactggccatgggcacgaccgtgtccgtgggtcaggcggtgggcggcggcgaccgaaagaaggcggcgggctgcgtggggaatacggccgtgttgtttctgggtctttccgtgatcctgacggcgctgctgctggtctgcacccggcctatcgtcgccgtgatgtccacgccgcaggccgctgtagagggaacggtgcgctacctgaccatctgctttttgggcattccgtttattacggcctataatgtcatcagctcggttttccgcggcatgggggattccaaaagccccatgatcttcattgcggtggcctgtgccgttaatatcgggctggacattttgttcatgggcttgctgcggctgggccctgcgggtgctgcgcttggtacgaccctttcacaggccgtcagtgtggcggtgtccttcggcatgatgaaaaggcagaaaaacggcctttccctgcaaaaggacgatttccggccccaaaagccggtgatgaagaagctgctgtccatcggcgtgcccatcgccctgcaggacggcctgatccagatcgcctttatcttcattaccgtcattgtcaaccagcgcggcctgacggatgcggcggcggtgggcattgtggaaaaggtgatcggctttttgtttctggtgccctcgtccatgctgtccacggcgtcggcgctgggagcgcagaatatcggcgcgggcaagccggagcgggccgtgcagaccctctggtatgccatggccattgcggcgggcttcggcctgatcgtctctttgttgatgcagcggttcgccgagccggtggtggggctgtttacctccgacgaagcggccattgcggcgggcggcccctatctgcgcggctatatctgggactgcatttttgccgggatccatttttgcttcagtggctatttctgcgccgtaggaaaatcgggcctttcgtttctgcataatatcgttgccatcgtgctggtgcgcattcccggcgcgctgctgacctcccgtatgttcccggacacgctgctgcccatgggccttgcgacggcgtgcggttcgctggtgtctgtactgatctgtctgcttgctttttcgctgcttcggaaaaaggaacgggaaaaaccgataagggaataagcatttgtcttagaaatagaaaaatagagcgcagcgtcccgcctgtttgaaagacagggacggaacgctgatttggtattcgtcaaattatgataaaagaaatggaaatttcacaacaaattctaaaaatacagtagaaaaaatagaatgatatcgttataatatatgtgaaagtccattgggaaattttgacatttttcgtgcgtaccattttctcaaattgtgaatcaaaagtatatttaaggaaattccatcataaacttgaagggattctatgaggagaaatggagtgcgaaacgcaggaccgttttcggcatggacgaggaactttcattttggaatgatccccaagggctgaaatctccgaaaggcaaggaaggaaacggacgatgaaggagaaaaaattacggcggttggggcgggcggatctggtggagattctgtaccgccagcgagaattgatcgaccagctggacgagcagaaccggcggctgcaggaacgcgcggaaaaagccgaagcacaggcgagagagtacgccgtccagcggaagaaggaacaggaacgcgccgcagccgacgaggcgcttcgacgagatatgcggcggactatcgagatcgtggagaaaatgacggattccatgtaccgctgcgccgcccggtagaaaccagaagccggcgaagggagaacggggcttagcggaaagcgccgccgccttcgcccggcagaaaacaaggagacgaatcccaatggcaaatcacgacgggctgcctacgctggagatgcttcaagcggaaagaatgcgtcttcagcacaggcggcgatatcgccgggcccttttcaggacccttgcggtgctggcagtggtggcggctgcagcagtgctggtctctacaatcctgctgcccgtctttcggatcacgggcaccagtatggagcccaatctgaacgacggagacattatcgtcgccatgaaaaccgaccatttccaaagggggcaggtatgcggattttacttcaataataaactgcttctcaaacgggtcatcgctacggcgggcatgtgggtggagatcgacgacgagggttttgttttcgttgacggcgaaaagctggaagaaccttacgtgaccgaccgcagcaaaggaatttccgatttggagtatccggtgcaggtgccggatggatgcgtgttcgtgttgggcgatcaccgctccacatcggtggatagccgaagctccgttctcggtttcattcaggagagtgaaacggtgggtcggatcgtcctgcgcgtctggccgctggaggactttggtctgatcgagtaagcggccccaaaggccgccgaatctgctggggggataaccattgaaaaatgaacagagaaattggaaacgcttcgcggaggaacggctgcggctccaaaaacgccgccgcagactgtatgcgctggcagcggcactggcggtaacgatggcggccggggtgacggcggaactggtcagacccgccattaccgcaacggcgcagccccaatgcggcatggaagaccatgtccattccggggcctgctatgagcaggtactgacctgcggacaggagacgggcgaggaacacatccacggcgaggaatgctacgccacggtgctgacctgcacaacgccggagcacacccatacggagggctgctatccggcgacgctggccgaaccgacgctggttcccgaagaatcgaagcctgacgagagcaaatcaacgccggaagaaccacaggaaccggcaaaggtcgaagaaactccgcagcctacggaagtaacgacgccggcccctatggaagaacctgcttcgggaccctctgaaaaacctgcggaaaccccggaggaagcaccgacggcagagccaacggaaagccctgaggagaccccggaagcgacggcagcgcctgaaacgcccgaaccttccgaggagcctgtggaaacggaggagcctgccaaagagaaaaccctaaaattggagaacctgaccggcccagagcggctgcttgcgggacaggagggcgaatggagctttgcggcggaaaatgccgaaaggctatttttcacgcttctgaaagcgaatggctctcaggcggcacggcaggagctttcgcccgaaagccgttcgttccgatatgccgtgcctgagtccggcctgtataccgtccgggtgacggcggaacggggcgagggagaaaatctttccgtggaacagaagctggccgtcagcgcgggagaattacaggcggctgtcagcacggcaagccgttcctgcttcggtggcgatacggtcgcttttgccctgagcgctcagggcggcgttgcaccgctcaaacgcagtgtgacgatctggcagggcggcgaaaacctgctggaagaagacaactggacggaaaacgagctgcgcgtcaccgcccggccagtcgcgtcgaacctgtatcttcggctgacggtgacggacgcttgcggcgaccgggtcgaagcggatcaggcagttccctgcgctgtacatacgacggaaaccagccgggattgggaagcgacgtttgcgtccgtgcatctcagcggccgctggccggacgatctgctggccattgccagaacccagctggggtatggggaaagcccgacagatttcattgtggatgaaaacggccagcagaagggctacacgcggtatggccgctggtatgggtcagaatacgctgactggtgcgccatgtacgtttccttctgcctgcactatgctggcgtgcctcaaagcgcgttcccgcaggaggcgggttgcggcagctgggtgaacgcccttcggagccgcggcctgtaccacgcgcccggcgaatacacgccgaaaagcggtgatctgatcttttttgactggcagcaaaatggacagccggatcatgtgggcattgtggaaaaagcggacgggagcagcctgacggtgatcgagggcaactccgacaacagcgtacagcgcaatccttaccgcctgacggatgggacgatctgcggcttcggcagcctgaacgacgcgttcgagcgtttccagagcgccgaagcgacggaaacaccggagcctgccgccgagccgtcagcggaaccgcccctcatgcccgacgaaaatccggcggagagccccagcccgggcccctcccttgagccggaaaacaccccggaagtatcgccggaacctgtgctgacggaactggaaaagctgacggcactggtcgacagcctgaccgatgcggaggaaggacccggcggcacggaaagcgcgggagaagcggaagcttcctttgaagaatgttatgctgcggcgctggaagccgtactgaccgcatgggacggcggaaatatcaccccggaagaagcgatcagcctgctggaacggctgatcgccttgcagcccggcggcacgtccccggcctacgagaccttgcgggaaggctttgcaaatctgcaaagcccggcagaggatgcggcggtcaatgaaaaaatggagtatatccatcaaatttccgcactgcgggagcagctggcagcagcggacggcagcggcgaactgacccgccctgagaaactgacgctgcaatactggctggatcatgcgtctgcctgtaccgtggattgcgtgtatacggcgctggacggcgcagtgcgcgtggtccattcggaaagcggcgaatggcagcagagggaatggagcgcccgtatctattcgcccgaggaagcggaagccactgcccttcgggaagaactggccctgcgtctggcgctggaagaacgcggcgcgctcgcggaactcatgctggtagacgttgactttgacgcagacgagaacggcgcggaagtgacccttcgtctggacgaagccgtggcggcaggggaagacctgctggtggcgcaccgcgggccggacagctgggaatggctggactttgaacgccagaccggcgaagacgggcggcagtacgtccgcttccatacggattccttctcgccctttgcggtactgtccctgacggaagcagaagggacgggagctgatctggaaacctatgtgacgcggcgcggcggccgcatgacgttccggctgatctgtgaggacggcacggagccggaagccgatgaagaaggcgtgtacaccgtggagcagggcgtggagttcctgctgcatatggatgtttcctgccccgaaggcttcgccggggggctgtatgcccttgcgtttcccgatggggtcgttccttctctcggagagggcacgctgacggcagacgaaaccgagatcggtcaatggagcaccgacggcgaaagcagccgtgtgctgctgcggctggaaggcgccgaggcagtcacggccttcccagtggaaattcgagtctcctttgtggaaaacggcggcgagatgatccatctgggcgatacgatcaccctgcgctgctatgccgttcccgacgggcctgtgtctgagctgtgcgtcggcgatgcgtggatggccctgcgggacagcggctatttcacctattggagcgacaaaatcaaggaaacggaaacctatgagctgatcgcggcccgggcccctgcggcggtcgctccgcagatgacggagatgccctccgatcagcaggtgatagatcgcggcggcgccgaagaaagcccggacggcgtgaagatcagcaagaccattcagggcaccgaactggaaaacgtgttcgatatcaccctgaacgtgcagacccccaccaaggtctccgagttctatgaagagccggacatggccgtggtcatcgtcatggatatttccaatacgatgaattccaattttgggggtaaaacccgttatgcggcagccatggaagcggcaaatcaattccttgataagtttgcggcggccagtaaaggcgtaagcaaagtcggctatgtggcattcaataccaacgctcacaagatttttgacttgcaggagtgttcctcgacgacccaggctaaccgtctgaaaaaccagatgctgcaggaaacgggaaggattatcaatgcgggtggatatgcggactcccatgaccgctttaccaatatcgaagcgggcctgaagctgggccaggatatgcttgcgtcggcaacaaatcagaacaagtatatcatcttcctgagcgacggatttccgactacgtatgtcagcagcgggtatcgtggctacgacccgtattgcactgcgggaacgcccggccgagacggtgtcttctacgacagcgtaacgaaaaaatactgccagtatggcaccagttacagcgataaggcggcgatccgcgccagagaaatggccggtcagatcaaggcaggcggaatcaagattttttccatcggcgtggatgtgggcggacagacggtgcaaaagtatgtcgaccagacagtaaattctaacttttccgtggtggaccgcaccagcgaaagctacgagatcggcagcgccagcagcgcagacgcttataagggctggctgaaaaacaacatcggctccggggattactatgacagcaccaactcagcgggactgaaagacgcttacaatcagattttcgtggccatcaagaaaatccatgaggaaagcgcgacggccatatgggtcacaaacgaccatgtgccgacggcaggttcggggacggagggcatagagttcatcggcttctacacgaaaaacgggcagctggtgggcgatacgctggcaggaaacgacagcaacggcgaaaacaccgcgtcgttcaatgaaacttcatcggatattcggtgggacttgaagaactccggctacaaggagacccaaagcggcgatcagacactgtatgattactccattacctaccgcgtccgactgaaaaatgaaagcgacgcttttgtggaacatcagaagtatgtgaccaacggcgaaaccaggctggactatcagaccgtcgaaagtatcaacggggagaagactatttcggagatcaaaaaactttggtaccctgtcccgtccgtcaagggctatctggcggagctgagattccagaaaaacgatcagtccggcgagcctctatccggcgcggagttcacgctggctcatgataccgaacgctgcaatatttgccgtggagatcatcatcacagcgtgaccattgctccgctcgttgccgtgtctgacgcggatggcaaggtcagctttacccgcatcccttcgggccaccagtatgtcctgaccgaaaccggcgttccggccgggtatctgaaacgggacgatacctatgccgtgaaggtagcctacgacaagttgaccgtcaccgtgacccaccaggatcagaccaccgaggaatggaacggtacgaatcagaccattgtcaacgacagcaggccgcgcctgcccgataccggcggttccgggattcaaacttatacaatcggtggtatcgctttgatggcgatcagccttttgtacggatatgcgacgaaccgcaggcggcgtaggggaagcgtccgataactccccgacggcatttggaacgcctgcaacggaacatattcgattaaattgacccaatggaggaggaacggaaacatgaaacgggtaacatccagtctgcttgcgctggtgctgctgctggcactggcgggaacggcggtggccgaggacaagggaagcattaccattgataatgcgatcgtgggaaaaacgtacacgatctatcgaatcttcaacttaaacagtcacaataccgactatagcgcgatcaactatacggtcagtgaaaaatggacggcgttctttgcggaaggcgcgccgggctgcgcttacgttgatatcgacaagacctacggctatgttgtctggaagaccggcgcatccccggcaaatttcgcggctgaggcgatcaagttcgctgcggataaaggtattgcccatgacggtcaggcggttgccgctcccggcaccgtaaaatttgatgatctggcgcttggctactatcttgtgcagtccgatctgggcgcgctgtgctcgctggataccaccatgcccaacgtgaccatcaaggaaaaaaacagcgagtccaccgtggataaacaggtgcaagaagattccaccggcgattacggcgatcataacgatgcggatatcggccagacggtgaacttcagaaccaccattaacgtggtggacggcgaaccgaagaactacgtgctgcacgataccatgagcgccggtttgacctttgacccggcttccgtggccgtgaccatcggtgagcggacgctggcaaagaacacggactatacgctggtgacgagcggcttgacggatggctgtaccttcgaagtgcagttcaaggacggcgtgctcaaacccaacgatgttgtcgaggtggcctattccgcggaagtcaatgagtatgccgtgatcggcggtgctgggaatgataacaagactcagctgaaatacggcgaagataaaggaaccgaatgggatgaaacccatacctacgtctggcagttcgacgtctttaaatacgccatgagggacggtcaggagatcccgctggccggcgcccgatttgtcctgtataagactgtcaacgacgaaaagttctatgctcaggtcgcaaatggaaaaatcaccggctggacggacgatcagaagtatgccaccgttttcgagactcctgacaacggcaaattcgtcatcgccggtctggacgcggacacctactatctggaagaaatcaaggctcccgacggctataaccggctgaaggaacctgttaatgtggtcattacggcgaacattgccagcggtaaaacagttaccgccacgatcacttataacgaaaccgctaccggcactgtgagaatcgaaaaccagaccggcgtggagctgccctctaccggcggtatcggcaccactgttttctatgtgatcggcggcctgctgatgggcgtggccgtggtgctgctggtgacccgaaagaagatgtctacttccaagtaacacgcagaatggcatacagtccgccgggcgggacaatctcccgcccgggacggtatgtcctcccgaaaaaggaaaatcctcctttcttgggagggcatacctgaagcacataacggagcgtaggaatgaaaaaacatctgtcgaccttcctgctggtgctggttttcctgctgggagcctgcatcctcctgtacccgacggtgagcgattattggaactccctgcatcagacccgcgtgatcggcgcatacgaagatacgctggccaacatgactcagaaggactacaccgagtctttcgaagctgccaacgcttataacgccgcactggcgaagctgaattttccgatggcagaatacaaaagcctgaagaaacggacggaactgattccctatgaggaactgctggatgtaaacggtgtggggatcatgggctatatcgacatcgacgcgatcggcgtggagctgcccatttaccacggcaccgactccagcgtgctgaatatcgccgtgggccatttggaaggcagcagtctgccggtgggcggcgaaagtacgcactgcgtgctctcagcgcaccgcgggctgcccagtgcccggctgtttaccgatctggatcggctgaaaacaggcgataccttcaccttgagcgtgctgaaccgcctgttgacctatgagatcgaccagattctcatcgtgaagccggaagaggtggacacgctggccatcgaaccggggcaggatctgtgtacgctggtcacctgcacgccctacggcatcaacagtcaccggctgctggtgcagggccaccgggtggaaaacaccgccccaaagcctgaaatctttgtcccggcagatatggttcagatcgatccgctggtggtgactcccattgtggctgtccccatgctgctggtattgttgattttcctgctgatccgatatcgaaagaggagctgaacgctatgaagaaaaataaccttctgcgcggagtattgctggcgctgcttatttgcctgctgctgtgcccggcagcactggccgacggggtcgagctgaaccgcaatggttcgatcaccctgaagctgaccgacagcaagggcagcgccgcttccggcggcgagtactggctgttccgcgtaggcgatccggtggttcgcagtcacaacctttgttttgaactgaccggcgatttcgtccccaccggcgtttcgctggacgatctctcttccagcactgcggcggaagccttggccgcctatgcggagcttcatcccgaactgcgtctgcaaagccggacggcggaccgtcagggacgggtggtgttttccgccattccctgtgggctatacctgattgcccagaaaaatcccggctcccattacgctttcgagcggatgaacgcgtttatggccgccgttcccatgaccaacgaagacggaaccggctggctttttgacgtgaccgccaggccgaaggtggaaaagaagcccacccccgcgcccaccagaacgccggggccttccgttacgccggctcgggacaccaaactgcctcagacgggtcttctggtgtggcctgtactggtgctggcaggcgtgggcgttgggctgttcgcagtgggctggtatttgcgctttacaggaaagaaacatgaataacagagcggttcaaaatcgattcaaaagaagagttggcgcggtttgcatggcgctgggagcactgctattattgggcgcggcagcaataatctgcgaaaaccggcgggaagaagccgccgccgggcgggaggcctctgccgtgctggaacagctgcaggcggagctgaacgcagaaggcgcgggactccttttgccggaagacacagcaaacccggaacggcttcccgcaaccccgtctcccgatcagccgaaagccgcatcatcggacgggctgctgccggaaatgccgacattgaccattgacgggcgtcaatacatcggctatctggagcttcctacgctggggatcagcctgcctatcctgagcgactggagctatgccaagctgcgcgttgctccctgtcgctattggggcagcgtttatgacggctccatggtgcttctcggtcacaattatcttgaccatttcggccgcctgaaaagtctggaactgggcgatcccattcagttcatagacgcggacggcaacatttaccgctacgaagtcgttcagcaggagacccttgaaaaaacggacgtggacgcaatgctggacagcccctacgatctgacccttttcacctgcgcccacggcggcgaacgccgcatcgtcgtccgcgcaaggggcagtgccccttgaccccggactgcgcgctgcgcgcaggggcgtagagggacatgcggcttggccggggttttactgccgtggcacgacaggtgccacggctcgccggtctggtgtagcttcatgttacttgtattaggaaagaccgccattcggcgacaggcctcatggctcgcaataaaagccagcgtggatttaaaaccacgctggccttttacgttgcaaaaatatcaaattctatcgaagcatcctaagcggcactgtttgcgtatggg

SEQ ID NO: 3065 - DNA, 5561 bp, Unknown
  16S sequences of unknown bacteria
tcgcgcggcttggaaagagaagcgatgaatggaaataaaaagttcgatttcgcatcatgcgagcgctgcctcccgactataaaaacaaatcagattgattttgaaaagatacgcatctttctatgagcggcagaatgggcgctgtttcgtttgaaaaactaaaaacggataagttttggaaaaaatgtagtaagatttatatgcgataggcaataaaggaaaacttaaattttacgtgaaggccctttgtgcgaatttttaaagcgaggggatttttacgcgcaagacaggctggaaggatgatgcgccaagacttcaaaaacgcaggaaaaacgatgaaaagaaagacaaaagcgatggacgaaagacttgggattatgttatactgataaaagtaaggaataacgtccgcataaacgcggcgaaggggacaaaatgaaagaaaaaaagtttatcaatgaaaagttttcacaccttatgtacggcggggactataacccggagcagtggatagaagacaagcaggtatgggatgaagatatgaagctcatgaaaaaagccgcctgcaacgagatgactgtcggaattttttcctgggcgacgctggaaccggaagaagggaaatacgacttttcctttttagatgaaattatagaaaagatctatcagaacggcggcagagtcgtgctggctacccccagcggcgcccgccctcattggatggcggataaatatcccgaggtcctgcgcgtaaattctcatggagaacggcagcacttcggcgcgcgtcacaatcactgctatacctctcccgtctatcgggaaaaagtgcgggaaataaacacgctgctcgcgcagcgctacggaaagcatccggctgtcgtcgcctggcatatttccaacgaatacggcggtatgtgttattgccctctctgtcaggaggcatttcgcaattatctgaaagagaggtatcagggaagcattgagaagctcaatcgcgcttattggtcgacgttttggagccatacttataccggcttcgaacaaatcgaagcgccgtcggaaatcggagaaacctgtattcacggcttaaacctcgattggaggcgcttcgtttcccatcagacgctggattttatgagggcggaaattaagccgataaaaaaattctctcccgacgtccccgttacgacgaatatgatgcccgctttttacgatctcaattactgggagtttgcggattctttggacgtcgctgcttgggacagttatcccgactggcatttgcacgggcactttcggacggcggcgcagacggcgttttggcacgattttttccgttccctcaaaaaacggccctttatgctgatggagagcgcgcctggcttggtcaactggaaggaaatcaacaaacttaaacgcccgggtatggacaaactttccgctttgcaggcgatcgcgcacggcagcgacaccgtacaatattttcaatggcgcaagagccgcggcagcgtagaaaaattccacggcgcggtggtagaccacgtcggcacggacgaaacgcgcgtttttaaagcggtgaaagaaacgggcgaactgctgcaaaagatagacgaggtcgcgggaagcgcggtggagtcgaaagtcgcgattatattcgactgggaaaacaggtgggcgctggacgacagtcagggctttaaacgttatgaaaagcgatatgcggatacttgtgtggactattacgaaacgctttggcggcgtgcggtttctgtcgatatcgtcagcgcgcacggcgatttttcggggtacgatctcgtcatagctcccatgctgtatatgacggacgaagacaccgtttcccgcttggaaaaatatgtgcgggacggagggaccctgtatgcaacttatctgctcggaatggtggacggaacggacctttgctatctcggaggatttccgggcggaaaattaaaggaggtattcggaatctggaatgaagagatcgatacgctgtgtgcagaggaacggggcaggattgcgtcgaacgataaaaaagagtatgaagcgcaggatttttgcgaggtgattcatttgcggggcgctaaggctttggcggaatatgcggcggatttttatcggggcgcgcccgcgtatacggtcaacgattacggcaagggacgcgcttattatcaggcgttccgcgatacgggcgaatttaaggggtgggcgctcaaaaatattctcgacgatttaaagataaaaggggcggtcccgaccgcggacggaaatctgccgcagggcgtcacggcgcataggcgcacgaacggagaggacgagttcctgtttgtggaaaactattcgggagaggaggtcgaaaatatatcgctcggaaggaagtatacggatatggaaacggcggaaacagtatcctcgatatccctgtttccttatgggataaaagtgttaaaggcggataaataaaaattaaaaaagacacggcggaatttcagtttcacgctgtgttttttagtatctttaaaaaaaggaattttccgatacattggtgaaagaatttaggataaaagaaagtgaaagtttgctcattctatgatataataaaagaaaagccgcaaaaggagaggggaaatgccgacatttaaaaaagcctcctggatatggaaagaaaatccgcgggcgggagaatatatccgcatcgaaaaaaaacttcccaaaggaagctatcgcctgcgcgccgcgtgtgaaagcggttttgccgtatacgtcgggggaaaaatgattttttcggggggatacgacgcgccttacggcaatgcgggggcggacgaatttttcttcgatttggaaaaagaggaaacgactttaaagctcgtcgctaggtacgtgggcgtgtcgtcttccgtctatcgggcgggaaaagcggggcttctctatgagatagagcgagaggggaaaattcttttcttttcgcaggcaggggagccgctcattgtctgcaagggtatcgtcacggaggaatgggcgataacgccgcagctggggcgcgccgtgtcttacgacttcacggcgctggaaaataccgtccccgctgtacccgcggataggaaggacgagatccttttccgaccttttccccgctgcgtttttcgggaagagagtccgaaaatcacaacgcaggggagttttactttaacgaaaggcaatacgcccgccgaaaaaattgaaaacacgcgcttggaagaatcggcgcagacgggaaaatttcctttggaacttttgccgaatcggttttttatcgctgatttgggtcgggaaagcgcggggtatctcacgttcgatatttttgcggaggaagaaacggaaattttggtcggctacggcgaacacctcgcggacggacggccccgctgtcgcatcgacactcgcaactttgccttttcctgtcgtttgaaaaggggagggaacgtatttacgcagcccttttggcggctcggatgccgatatatcgtctgcctctcgctcggtaaaatcagggtaaacaagttctcttttgttcattccgaatatcccgtgaaggagaagaaaacggagatttccgacgcgcggacgcgggcgatttacgaaacggcggtgcgcacctcgcggctctgtatgcacgaccatttcgaagattgtccctggcgggaacaagcgctctatgccatggacgcgcgcaatcaagcgctgtataactattatattttcggcgaaacggagttttctcgcgccaatttcgagttgtttctgagtacgcaacgggaggatggtctgttcgatttgtgcgctccgtcggagatctccgttacgatccccgtattctctctttttctgctcctcgcggcttgcgagtattacgaatttacgggcgacagtgcgtttctcgaaaaacaccgcgggaggatagaaaggtgcttttccgcctttttggaggaaaaggaaagcggactcgtgccgagattcaaggacacaaggtattggaatttctacgagtggacggaaggtttggacggcggcgaaattttccgctcgaaagaacaggaccccgttctcgacctgcctttgaacgccgtgctcgtcatcgttttgaaaaaagccgcgcgggcgtatgaaaaactcggctggaaaaatgagtttcaaaggcggagcgataccctctataccgctcttttaaagaatttttatgacgaagcggagcaggctttttattcgttttcctatgcgggaaagaaatggggaaaacacggactttctcaaatgttgatgctggcggcgggtgaaacgcatcgggaagaattgctgcgcaatatcctgacggatagattccctcgcgtgacggtcggatttttgagtatagaatacgatgctgtgttggaacgggatataaaattaaaaaattgggtccgaaaagacatggagaggatcttcggcggaatgttggaaaaaggcgccacttcttttttcgaaacggaaaagggagaagcggattttaacggggcgggcagtctttgtcatgcctgggcggccgttcccgcctatatttaccgcaaatattttatggacgagagtaaatagaggacagagaaaagaaggggcttgcaattatcgcaagctccttcttttattgtcgatggaaggaataaaaggctcgacaaaaaaagcccgtttaaaaatgagcttcaaaaaaatatgcggacgggcgcaggagaaaagcccttccgaattcttctcgcacaggagaaagaagggaaaggattttcaaaaagagcaaacaaaaaaagcccctcatgcgtcgtcttttgagatgggaggaaaaatgttgtttttaaaacttgcctaacgggatttggagagcttgtcctcaatcagctccggcaattttagggtgatgccgtaagcgttcatgctgttcatcgtttcccgcagcatttcgtatacgttctcgtatttgcgaaaagaaggagcgtctttacggtattcctcttcgcagacgggaatcatcgtcgccgtatccaaaaggcagttcagagtttgtttgaaaacttctttattttttttgtaaaagttcctctcggcgttttatgtaatccaaatcgtccgagaaacagtttttgtaatttgaattcatgagcgttaaaaataaatgataaataattagtcttcgttgtcggaaaggttttccagagtgaacgtttcgtcgtcgaaaaattccttcaattcgatgttcaggcctcggcagagattgagaatggtgctcagtttgacgtcttttactttctgtcggcagatcatcgagatcgtggagcaggcggtgccgctggaaccgaatagattaaactgcgttatttcgcgctctttcaaatatccctttatgcggccggcaacagcttcgttgagttctataaatgaaaatcctcctagtattaacgatatctctattttaccgctttccaaacggtaatcatttcaatagattgaatttttagaagaaatattttattatt

SEQ ID NO: 3066 - DNA, 10306 bp, Unknown
  16S sequences of unknown bacteria
aaggaaacgatttttgctctggaaaatgggattttccgacgcaaaaatcgccccgtccccgccgtacacgccgccggggacgattgaaatgcgaaagggcttcgttccacaattcggcatggtcgtcccgcaccttcgcaccgtgccgcctttagcggcccggtgttccgtggctgcgcactgcgcttcgctccgtgtgctcgccacttcagcccttcgggccttcggacgctcgcaagctcgcttgtggctctccctgcctcattgggcttactatggcttgtttcgcgcactgcgcgcggccttcgtgcgcccctctcgcgctctccccctggggtttttgacaagctgacgatattgctttgttgcaatatcgtatccattggcgcggaaaattattcgcgcgattcgcgcgttatacaaagcgacaacaaaaatggcgcgaaaagttctttcacagcctcatgattcaatctccaatggcagcattgggttagaaagcgttagtcgaagatggtgcaccagtccttgtcgcggtgtgccgcgaaacacatgcgaatttgctccgcgttgttcttttctgcggcgagcgtgggcagttcgttttccgcaaaatagccggattgtgtggtttccgcgttgggctggaactggccaccggtggcggtgcagagcacaaagattttgcacacaccgtaggcgtaaaggggcaaattgtgcttcgagcgatcttgcacggcgatgattttgtccgcggtcacgttgaggcctgcttcttccttcacttctttgatggtgttttccttgatggagaggtttacctccacccagccgccgggtagcgaccaggttccgttggcttcccgcaccaaaaggattttgtctccctcaaaaatggcggcccgggtatccaatttgggcgtttggtagccggtttcattgcaaaacagattttgcaccttttcgaaaggcatttccgcctggtgcgccaccatttcagcggcgatttcccggatacgcgtatagcgctcccggtcgtaaacatcttttccataggtcagccccgcctgggccagcgcttgcaattcgatggcccattccagccatttttggctcatgccattgcctcccgctcgtagaaaaatggttgctagccgtggagaatttcgcttgcattgtagcaaaatatggcgggtttgtcaagtttgcgccatcaggtttaacgaaatccggctttgcgatgccattcttttctgttataataatacaaagattatagagaagcggggcgatgcagtggataaaaggctcaaggaaaagattgtggaatccttccgttcggtgttgcccatcacggcggtggtgtttctgattagcatcaccatagcgccgctggaaacgggatcgctgaccatgtttttgtgcggcgcggtgatgctgattttgggcatgggcctatttcaactgggcgtggatatggccatgatgcctatgggcgaaggcatgggtgtgggcatcacaaaatccaagaaactttggctggtggccgtgctttgctttgcgattggcgcggtggtgacgattgccgagccggatcttacggtattggccaaccaggtgccctccattcccaatcccgtgttgatcctcacggtggctgtgggcgtggggctgtttttggtggtggcgctgctgcgcatccttttccagatcaagctgttgcacatgctgtgggtttcgtatattctggtgttcgtgatggccatctttgtgcccaacgaattcattgccgtggcgttcgattccggcggcgtgaccacggggccgattacggttcccttcatcatggcgttgggcatcggcatggcctccatccgcagttctggctcgcaggacgatagtttcggcctggtggcgctgtgctcggtggggccgattctggcggtgatgctgctgggcatcgtctaccacgcggcggaggcgtatttcacgcccgtggtggtgccggatgtgaacaccacgcaggacgcggccatgcagttcgcgcaggggctgcccgcctatctggaagaggtggccatcgcgttgctgcccatcattggcatgtttgtgctctatcagctcatttcccgccgctttcgcggcaaggcgctggggcgcgtgatcatcggcgttttgtatacgtatgcgggactggtgctgtttttgacaggggtgaacgtgggcttcatgccggtgggctatttcatcggcggcgaggtggcggcgagcaacttaaaatggctgctcatccccatcggcatgctgatcggctatttcatcgtgaccgccgagccggccgtacacgtgctcaacaaacaggtggaagagatttccgcgggcgcgatttccgccaaatccatgaatttgagcctatctttgggcgtggcggtttcggtgggcatcgccatgctgcgcgtgctcatgggcatcccgatttattattttctggtgccgggctatgccatcgcgctggtgctgggcttctttgtgcccaatatgtttacggccatcgcgttcgactcgggcggcgtggccagcggccctatgacggctacgttcctgcttccctttgccatgggcgcgtgcgaggcggtgggcggcgatattttgatggacgcgttcggcgtggtcgccatggtcgccatgacgccgctaatcaccattcagatcatgggctttgtctccaagcgccgcatgcgggccgccgagcgcgtgttgctcatcgatgtggacgcgctggccgaccggtttgtgtactacgatgaggacgaggagggatccggcgcatgacagaccccattcgcttgttggtgaccattgtggagcacggcaagggcgagcgcatcaccaaccttgccaacgcgcggcacgttcatttcaattttattttgcacgggcggggcacggcttccagcgatattctggatatgctgggcctgggcagcacggaaaaggacgtggtggtttgcgcgctgccgcgcagccgggtgcggcaaatgctgcacgatgtggcggaggaaatgcgcctgaagcggccaggcacgggcgtggcgttttcgctgccgctttccggcatcaacgaattgattgcgcgcatcatcctcgaagagcataaggaatccaacccagaaaatgcgcaggacggcgcgcggacagaggagggaacggcgaacatgggcgcggaaaagcactggctggtgttgacggtggtcaatccgggcataacggatcaggtgatggcggccgcgaaagaggcgggcgcgacgggcggcaccattttgcacgcgcgcggcgtggggcgcgaaaacgcggaggcttttttgggcgtttccattcagtccgagcgcgaaatcgtggccattttgtgcccgcgcgaaaagggaccgtcgatcatgcaggcgatcaacgcctcctttggccccaagagcggggcgaagggcatcattttctccttgccggttcgcgatatgatggggatcggcgtgagtgtggaagagagcaagcaacccaattaaagaggagggcatggatatgccagagctgcgtttgccgtttttcgcccatggcggggactacaatccggatcagtggcggcacattcccggtacgctggaagaagacgtgcgcctgatgaagctggcgcattgcaacttgatgagcgtgggcattttttcctgggccgcgctcgaaccccgggaaggggaatacgatttcgattggctggagcgcgtgctggatacgctctacgccaatggcattcatgtctttctcgccacgcccagcggcgcgcggcccgcgtggatgagccagaaatatcccgaagtgctgcgcgtgagcgaccagggcattcgcaacctgcacggcgagcggcacaaccattgcttcacttcgccggtataccgcgcgtttgtacacaagatcaacgccgcgctcgcagagcgtttcggcaagcatccggcggtggtgggctggcacgtttccaacgagtattcgggcgaatgccattgcgagttgtgccaggaggcgttccgccgctggctgatgaagaaatacggcacgttgaacgcgctcaaccaggcgtattggacggggttctgggccaagacgtatacggactggagccagttgcattcgccgtccgcgcgcggggagggtagcatccatggcctgtatctcgattggatgcgctttgtcaccgaccagaccatagattttatgcgccatgaggtggaggcggtgcgcgcgttcagcgatttgcccgtgaccacgaacctgatgggctcgtttttcgggctggattcgttccgctttgcgcgggtgttggattttgctagctacgattcctatcccagttggggcgaaacgagcgattacagcgtcgcgctcggcgcgggctttcaatatgacatcacgcgctccatcttgaacaagccctggattttgatggagtccacgccgtccatggtcaattggaaagagatttgccagcccaagcggcccggcatgcatttggcctcctcgctgctcacggtggcgcatggttcggatagtgtgatgtatttccagtggcgcaagagccgcggcgcggcggagaaattccatggcgcggtggtggggcacgagcgctcggaacacacgcgcgtgttccgcgatgtgacggaagtgggcgagtgcctggagcgtattctgcccgttttgcacgcgcacaccgaggcgcgcgccgcgctgatgttcgattggaacaaccgctgggccatcgccaacgccaacggcccgcgcaaggataagcagcacgacgaaatcgtacaggagcactatgccgcgctggcgggcgcgcacgtgaacatcgatattgtggacgaagaaaagccgcttcagggatattccctcgtgagcgcgcctatgctgtatatggtgaagccgggcctggcggagcgcctgcgcgcgtttgtggaaaagggcggcacgctggttttgacctatttctccggctatgtggatgaaaacgacctgtgcttcttggatggcatgcccggcccgttgcgcccgctggcaggcgtgtgggctgaggagatcgacgcgctatatcctgggcagagcaacaaaattgtgatgcggccgggcaacgcgctgggcctggaaggcgaattcgcgtgcggctttttgtgcgagctggcgcacgcggagggcgcgcaggcgctggcggactacggcgaggatttctacgcgggcatgccggcggtgacggaaaatcgcttgggcaaggggcgcgtgatttatctggcggcgcgcgcggaacaaaagtttttggatttgctgtacgagcgcctgcttcgcgacgcgggcgtcgcgcccattgtggatgcgcccgcgggtgtggtcgtcaaggagcgggaaaaggacggcaagaaatacacattcctgctcaattttgccgggcaggatgtgcgcatggccgtgccggaagggctcgacttggtttccggcgcgcgcgtgcgcggggaaatggcgctcaagaaccggcaggttatgatcgttgagcgataggaggaaaccatggctgttttgtggaaggatcgaaagcgcatttgcggcctacccatcacgttcaccaaataccgcctggaaggcgagcggctgtatgtgacgaaggggctgctgcgcacggtggaggacgagacgctgctctaccgcgtgctggacatttcgttggaacgcacgttggcggacaagatttttggcgtgggcaccattgtgctgcattgcgcggatcagacgcatccccagctgcgcctggagaacgtgcgccattcagaaaatgtgcgggcgatgctttcggaaaagattgaagaggagcgtagccgcgcgcgtgtggctgggcgcgaaatgtatggcgcggcgaacagcgatttggatgtggacgtggatgtgaacggcgaagatgacaacgcatgaactgtgcggggcgctcggcgagcgccccgtgatcgccgccgtgcgcgacgaaagcgcgctggcggcagccttggatagccgctgtgtcgcggtgttttttctgggcggctcgctcttgtctttgcccggctgggtagaggcggcaaagcgcgcgggcaaggcggcgtttgcgcacgtagatcttttgcaaggcgtgaaggccgacgcggccgccatcgagtggtgcaagcaggccatgccgctggacggcgtgatttccacgcgcgcgccgctgctcaagatcgcgcgcggcatgggactgatcaccatccagcggctgttcctggtggattccagttcgctggccacgggcatccggctgatgcacgccagcccgccagacatggtggaagtgttgcccgggctggtgggcaaggccatccgcacgctcaaaatcgaactgggccgtccggtgatcgcgggcggcatgatcaccgaggaggaagaggccgggcgcgcgctgcgcgcgggcgccatcgccatatccaccagccgcgtatcgctatggaagtaggtgcaagggaatgggcaaagattcacagcgcattcgcgattttatgctcgcgcaaatgcgcgatagcgcgcacgacgcgcagcacgttttgcgcgtgacgcgcgcggcgctcgcgattgcgcgcgcctatccgcaggtagatgtggaattgttggaggcggcggccctgctgcacgatattggccgggcgcgggagttcgccacgggggagaaccatgcggaagcgggcgcgcgcatggcgcgtgaatacctgctgtccatcggctgggaagtggtgcgcgcagaggctgccgccgcttgcatccgcacgcaccgttttcgcggcaagcatccgccgcaatcgctggaagcgcagattttgttcgatgcggataagctggatgtggtgggcgcggtgggcatcgcgcgcacgctgatgtacgagggcgcggcgggcgagccgctgtgcgaagtggacgaacatggcgcgccgctgctggacgccaaggacacctttttcggcgaatacaaccgcaaactgcgccatttgtacgatcggttctatacgccgcaggctgcggccatggctgccaggaggcgcgaagccgcgcaacatttttacgattgcctgttgcgggagctttcgccggagggggaaaccctgtgagccggctttggaccaggccggattggcacgcgcagtggggctatcgcttgccgcaggtggaggagcatacggtatatttgcgccatgcgccagaaaactggccgggcgcgacggcgcttttcgtttctgatgtgcacctagggccgttcgcgggccgggaatttgcccgtcgcctcgcggagcagatgcgcgcgctggaagccgatttgctgcttttgggtggcgattacgcggaaaccagcgcgaatatgcgcttttttctggaagaaatttgcgcgttcgaggcgccactgggcaaatttgccgtgcagggcaacaacgacgcgcagtgcgcgcaacgcgaaaatttggatttgcccgcgatgatggcgcgctcgggcgtgcaattgttggtgaacgagcgcgcggaagtgcgcctgccgggcgggcggattctcatcggtggggtagacgagtgctatttcggtcatccggatgggcgcggtctattccaggacgcgagggagaacgacgcgcgcattttgctttcgcactatcccgtgcgcgcgcgagacggctttttcggcgcgcgagaagcggaagttgtgctttgcgggcacacgcatggcggacagctcaatttgctggggttcacgccctattccatcggctacgagcccaaagcgtgccccgtggaacacattaagggctggcgaggcaatgtgctggtgtcgccgggcattggctgtagcaaatggcctgtgcgcatcggcgcgcggccgcaaatccaccggattcatatggcgaaaattccgcgcttttgaggcttgacaatggcgggggaattcgctataatagaggacgtgaaatcacctggggtgtgcgtaacgctcttgcttttacccacattatcataaaaggattccgggtcggtatgcagatgtcaagcccccatcgcttcggcggtacgccaggggaaggcagtaagcagtcgcaggtctccgccctgccgagcggcgggtgataaggcaggagcgagcggcactttggggattcactttttttgccatgaaaaaggggccgttggccaggctggcgcaaaccagcccggctggcggctcttttgcttggagagatcatgcctccgcgggttcgcccgcccgcgcgcggatcaggcgcaggttttcctggatgcgcgcgtcgccgggcgcgaggcgcagcgcctcctgcgccaggcgggcgctctctttatactgccccaggtgatatagcgcgatggaggcgaggtcccagggcagcgggccccaggcttcggcggcgttgatgtagctgcctgggcgggtttggatttgtagggcgcgatgggccatataggccacgccaggccaatcctgccgttgatagaggaaccgcgccaggttgacccacggctcgcgcaggtagggcgcttcgccaacagcgcggtaaaaccagcgctcggcctcttccatttcgcccaggtgttccagtgccatggcgatgtagcgcatggaagcgcagcgctcatccgcccaggtggcgcgcggcagggacaggtgccgtttgagcgtttccacgcagtctttccagcgcccgtaaaagaagtattcccggcccagatagtgcatgttgcggtcgtcgtcgggatcttcccgcacggatagttccagaaggggcaggtattgtccgcgcgatttactcctgtctgcccggtggtcgagttgcacgccctcgcaggtgacgatcttttgtggtagcgggccctggtaggacaggatttcgtgcacggggtgtttccagacaaagccgccgttgcggtggattttgtccggccagaagacgacgccttcgctgccgtccggcagaaaattccaggtgtagcgatagcgcgcctgagtggcgtcgtccgtccaggccgcttccagcgcttcgcgccagccgggggtgaaggcttcgtccagatctgtggaaacgcagatgtcggcctgcggtgggatcagcttcatggcctcgttgcgggccgcatcaaagcgccagggatcgatggtcttttccgccacgatggcccccaggcgctccagcagttcgggcgtgccatcggtggagccggtgtccagcgcgcatacccagtccgcctcgcgcatggattccatccagcgtcgcgcgaatttcgcttcgtttttgcaaatcgcgtatacgcaaaccttgtattttcccaaaccgatcacctcgatacaatcctctccgccggagaagctgacggagagaacgataaacttatacaggctgccgaaaccattcgacagcccgtgcgagaaaagcgcctacgcgatgcgcaccgcggtgaggctaccggagaagccttcgcccgcagaagcagggatggcggtgagcgaaaccggcgcgccgctgcggttgacgagcgttacgctgccgcccgcaccgagcgccacaatggccgatccgctgaccagaacgggttcgccggcgttggcgccatacgcgccggaagcggcgtatggcgtgccgccgcccgccggttccagagagagcaggaggttcgcgcccgcgccgctgggctgcgccgaaaccgaccagaggaacagatagctgcccgcgtcctgcacggtgagtgcgcccgtcgcggggttgtaggaaagcccgatgctggtggtgcggttgatcaccggagtgttcgcccacagggccgcgccgtcggcgatgggggcggtgctggccgtgctttgcagatacagcgcgtcattgggcagggaacccgcggggccagtaggcccggttgcgccggtggggcccaatacgctcagcagtgaatagtccgcggaagcgtcgggcgtgccgccagggctgggaacttccgcccggtacaggcggccgccataggaaaccacttggccctgttgataggcggtcgagggcgtgtaactttgcacggcttccagacccgcgcccgtgagtcccgcggggcctgcggggccggtggggcccgtggggccggtggggcctgttgcgcccgtagggccggttggaccgccggaggggcctgtggggcctgtggggccggtcgggccggttgcgccttccgcgccggtcgc

SEQ ID NO: 3067 - DNA, 11545 bp, Unknown
  16S sequences of unknown bacteria
gcctgcctaatccgaggacacgcttcaaggtacccctatcaggagtagcggaaggctccttttttgttttattgtgatgcgcccctgtgccgctaccgcagcagctggatgctctcggcaatttttattacttcttcggtatcttcgtttgagagcaggctaagcatgctttcgccaacctgccatacaatcgaggtttctccgtcctttagattgtatatcccttcgctgtaaccaatcataatggggcgggtgatctgcgcgttctcggaatcaacatgaactgaaactgagcaatgtgtcccagaactagtctgtgtaaaatctatgtatttatcacctttctcataagacacaagcaaatcaatccccgcaagatcctcaaatattgccaactcatacccctccggcaaatatgttggggcaaagcagtgctcccaggtgtaaaggtccgcatcgatgaacatgcccggctggtgtggggccaccgttacattggtaaagaggtcctgcggggaaattatcatcttgtaaacggcgctcctaaccgacggggataccgcaaaagcggtgcttaaacagatgaaaaaggtaaggaacaccaccgccacccgggtaaccacccgcccggagacctgccaggccttttgcccgaagacctgccagcgctgccgccgcatggcacggtccacggcgtgctccgcgctttcccggtcctccggcgggtccggctgttcctgcatcctggcccgcaggcggtcattttcccgctccaggtagtggaaaagcgccagcttcagcagcagctcctcctgctctattcgcaggcggttcctattcagtggatattcgtagttcatatcagcatctcctccgcctccagcaccgcaaaggcattttttcgggcacggctcaggcacatgcgcacgctgcccggcttgatattcagcagcccagcgatctcctcatcgctcatctccagtatgtaacggtacatcaggatatcccggtcccgctgggggagcttttccagcccccggctcagcagatccacccgctccatatcaataaaagcgcccagctgctcctccggggcggcgctccacccctccgcaaagtcctcactggcacccacacgctcctttttccgccggcgccagcggtctatcgccgtgcttttggccgcaataacggcatacggcagcagctggccctggggcatggtgcgcagggccgccatgcggccaatgagcttgacgagggtatcctgcacggcatcctcggcctcgccgtggtcacgcagaatatcataggcctggcgatacatggccttgtggcactgctcgtaaagatttatcataaatgcgcggtcggcgtcgtcctctatcgccattaggatcatcgggatcatggtgggcctccttcatccacgggggggtggttttctctttggctaaatattagcagaaccctcccccaaaatcaatggcgcagaggcccgacgggccttccgctttacagggtatagctgctgtcccgccactgaatctcggtctcgcttacccactgcggttttgccctctcccagcggccgtattcatggccgcgcagaaagccgatcttggtccgctcaccggtggcgatctcataaagcatcaggttcatgccctcatcatcaatgagttcgtaggcgatatatttttcatcgggagaaaggctggcctccatgctcttggcgtccttatcggtagaaacaaaaggaggtcccggtgaggtaggggtatcctgagagacccaggtgtagctatcctcggcacagttataaataaccaccgggcggctggtgatcagcagccggttgctgtcggcaaaccactccacggtgggagccggcatgtcctcatagccaaaaaccctaacaccacagcggatgggctcctctcccttatcgagggctcttttgtggaaccttacatcgtaatagtctccctcgccctcgcactcttcggcctccaggtactgcacgatctccccattcggcgaccagatgggttcccggtagtggttttccccatgcaaatagcccaccgaagcaccatagaccgcctcaccggcctcgggatcggtataccggcgatacaccaggtaactgccgccattgcaggaaatgcaggccaccgccaggttttcatcggtggggcaggtgacaaactgatcatcgaactgcgaaaaatcaggctcctgtggctgtgggtcaggctgcggctgcggctctggctgcggcaagacattgatgttcccctgcgcaccgcaggccgtcagcagcatcagtgccgccgccagcagacaaagcacccttttagcgtgttttctcatttcttgtttcctccttgttgtatgttgtactgtttattgctgcaatggtttcaactccgttacaattcagccaatgtaattgacacgcctgccacgggggactataatatgttatgttattccaaaagagcctggagggtatcccatgaaactgttctgcgcggcactcaccgccgctcccgttaccggcgataacagcatcgtccccatcgccatcattgccatggccgttgtggtggtcattgccgccgtactgctgcttacctcccgcaaaaaataagtgccgcctacccaccgcttgccacgcgcaggcggtctttttttatttcggggcggcccatttcctccttatacctatataacggtttccggccgggaaatgcaacacctcccgggaaaattctacgccaaggtcaaaaaaaatcgtgcaatttggcaaatataacaaaattttccgtattttcttctttcgcttgtatcattcatcataattatggtatgctgggcttgcggcgggggcggagaatccccagccgcaggataaaaaacgaaaaacagctaaggaggagcaacagaatgagaaaattccgtattctggcactgatgctggtactcatcatggtactggcaggctgcggtaccggtaattctacccccgcggccaaagacatcgtgatcctgtacaccaatgacgcccactgcggcatcgaggatggcatgggctaccagggcctttccgccgccaagcgtgcgctgctggccgcaggcaataaagtcctgctggtagataacggcgacgccgttcagggtgacaccattggcaccctttccaagggcgagtacatcatcgacatcatgaacaagctgggctacgatgtagccacccccggcaaccatgagttcgactacggcatggaccagttcaataagctggttgaaaaggccgactttgactacatcagctgcaactttgtagacaaggacggcaaccccgtgctgaagccctatgtcatcaaggaagccgacggcgtaaagatcgcctttgtcggcatttccacccccaagaccatcaccacctccacccccacctacttccaggatgggaacggcaactatatctacggctttatgcaggatgataccggcgagaagctgtatgccgccgtacaaagcgctgtggacgccgcccgcaaggaaggtgccaagtatgtcatcgccatggcgcacctgggcatcgaggcggactgccagccctggacctcctcggatgtcattgtgaacaccagcggcattgatgtggtgctggatggccactcccactccaccatcgccggggatattgttaagaataaggaaggcaaggatgtcatcctcacctccaccggcaccaagctcgccaatatcggctgcctgaccatttccgccgacggcaagctctccaccgccctcatcaacgatgacggcatgagcgataccatcgccgagatcaaatccggctacgaggagatcgtcaataccgtcgtagcctccaccaaggtcgagctgaccgtcaatgatcccgtcagcggcgagcgtatggttcgccggcaggaaaccaacctgggcgacctgtgcgccgatgcttaccgggccatgtccggtgccgatatcgccgtggtcaatggcggcggcatccgtgtcagcattcccgcgggcgatatcacctacggtcagatcatcgcggtgcatcccttcggcaacgaaatgtgcgtggtggaagccaccggccagcagatccttgatgccctggagatgggcgcccgcaatgctcccggcgaatgcggcggcttcctgcaggtctctggcatgagctatgagatcgacctgaatgtggagcccaccgtagaggtgaacgccgatggcatgttcaccggtgtttccggcgaataccgcgtaaagaatgtcaaggtaggcgatgagccgctggatctggccaagacctacaccctggccagccacaactacatgctcaaatccgccggtgacggcatggccatgttccagggctgcaccctgctgcaagattccgtcatgatcgacaaccaggtgctcatcaattacatcgtggatgtactgggcggcgtggtaggcgaagattatgccgatccctacggccagggccgcatcaccgtgatcgagaagaagtaatttctctccaagcacaccaaaaagctcccccacgggggagcttttcctttccttacaaaaatactctgcattttatgtgcagattatctgttgacaaaggtattacctttgttgtgtcctaatcctatcataggaaagaagatgaacacatgaaccgcgaacccatcaataaacagaacctgagcgacgccgtggcggaaaagctgcgggaatatatccgcagcagcgatgccccccgttccctgaagctgccgccggaagccgtcatcggggaatcgatgggcgtcagccgcatcaccgtacggcgggccctcagcgatttggagcaggaaggccttattcagcgcatccatgggcgcggcacctttatcaatcccaatatctccaaaatcaaggccaccatcacccctgggcaggatctgcaccagctcatccgggaaagcggctacgaatcccgcaatgaactcatcagcttggaaaccgtccccgccgacctgcaccacgccgaagcgctggagatagcgccgggctctcccctcatcaaggtcgtctgctcctactatgccaatgatattttggccattgtcagcatcaatcacatcccggagggcctgctgaaaaccatgccgagccgggaggaatggggcacccacaccagctacgaactgctgcgcacccacgccggactgctggtcaccaatgagtgcatcaccatccagagtaaaagccgggcggaggccctgaccatcactcccgccgccggggaatttgactgtgattcctttttgtgcatgaccggtacctccctgactacggaaaataaaccggccctaagcggccaggccatgtataacaccaactatgtccacttccagatgctgcggaatatcaaggcattctgacgcaagaaaactgccctgcgtaaacagggcagaaatttgcaaacgcatttaggtaataccatattatcttttatggcttgccgccagcggccagcacatcgccccacacccctgctggagtccgcactttcccccttatttccctcccttctcaaaaagcatacccatagccatgcacttctcccgtccaaaaaagaaaagagaagcctcttctatttactttttatatcttttataaggtaataccataatatcatatctctaatgtaaaggaggaagcgaccatgcagacactgctgtatggcgcacacatcatcacacagaacgaacaggatgagatccacaaggaaggctggatcctgctggaggacgaccggatcatcggcatcggcgctggcgccccgccggaggtcccggagggcaccgtcaagcgctgccttcccggtcgggtcatcatgcccggcatcgtcaatatccacacccatgtaggcggcaccctgttcaagggcctcgccgaggacatcaaaggggccttctacgggctggcttttcccatggaacgctttatcacccgggaatccatgtacagcatcagtatgctgggggccatggaggccgtcaaattcggctccaccttcatcgatgacctgtaccacttcccggaatccaccgcccgcgcggcggaggagctgggtctgcgcggcatcatcgcacaaaagatctacgacccagacctgcaaaacctgcacaataacgattattcttcggtgccggggcaggccgcccaaaagctgcaggccaaaccgttatcattgtggcgttctcgctgttcgccatcatcctggtcaatatcggcggcttcaaatccgttgcctggaccgactttttgcagggcattctcatggtcatcttcatcgcggcgttcaaggccgtcggctggagttttgccgatgtaaacacccagctttccgccatcgaccccaacctcgtccagcccttcaatgagagcggtctttacagcctttccggcgtcatcgccatgccgttctatctgtttgtttcgctggtggccaatccctactgcaccatccgcctgatggccatgaccaatgtgggccgcaagagctttaagaagttcggcctcaccctcatctctgtcggtatgatctgcatgctgatgtatatgtccggcctgtttgggcgggtgctgtaccccaacctggccgatgccgacagcgtcatccccaccatcgcccagaacctgctgcccgaatggggcctggccattgtggccgttggcctgttcgcctccatgatggcctgcgtggattccatgatccactgcatcagcgccatgctctcggtcgatatctataagcgcaccctagcggcagctgtcttggcggtcattgtcacagtcgcggtcagccttttcaccaagccggtggaccctgctgtactgaaccgcatgaagggcctgaaatccgaaggatgacctcccctgcggcggcctgcggccgggccgccccctgctatgacattcccattccctatttcaatttggctcctcaaggaaagtatccctgccccggcggggatatttttctgctccacgcaaaaagctccccatacaggggagcttttctctatcttatccaatattatagatcatccagcgtcatgccaaagggcggtaggaactgcatcataaactgctccgcctccggcagctccatctcgtggatcgcctgcagcagggtatcataggcccggtcaaattcatggttgcccgcccggcgctcctcggtgcacttgatcagggctgaaagtttatccgccgccttaatatagggcctgtactcctcggtaggggtaaaccacggggtcatttcctccgccatgggtaccggcaggcggctcagcagcgccgtctgcgcttccttttccaccgccttgtatgccgttttaatgctctcgttcttatatttcaccggcgtaggcaggtcgccggtcagtatctcggtacaatcatggtacaaggcatacagcaccgccttttccggctccagtgtgccgccccgttggcggttcagcagagccagcgcatgggcaatatacgccgtttccagcgtgtgctcacacaggttctccggccgggaggaccgcatcaggcaccagcggtcaatatatttcattcgccccagcaaggcatagaaggtatttagcatggctttctctcctcggtttcattggtttacagggtacaggctccggccgccccctcggcccgcttcgcgggcctgcgcggctccgccgcgcgggcgcaccgcccttcggggcggcgccctgggggcggccggagctcccttcatctctgccactattctaccacgccaaaggcccccctggcaagcaccctctcattttgcaggagtccctgcaggaatccctgcaaaatttgcaaaaatgcaggaaaaattaaaaacgattcatatttgctcaattttcatctaacaaaaaggctattttcttgccaaaatgaataaaaaacaaaaaatcttgcaaaatggggttgcaattccattttgcggtgctataataatgaccatagtccactgtgacccagattaaaatgaatattgataaggagatcccaccatgaaaaagttattcgccctcttgatggccgccatgatgctgctgtgctgtgttgcctgcggcggcggcaatgacacccccaatccccccaccgataccaccgcttccatcaccattggcaccggtagcacctccggcacctactatgcctataccaatgccgtcggcatgatcttgaaggacgccaccggctacacctacaatgtcatttccaccggcggctccgttgccaatatcaatggcatcgaagacggcgactacaatatggccatcgtacagaacgataccatgatcaaagcctacaataaactggatgacttcaatttccctgttgccatcacctccttctcggttctgggcgaggtttactccgaggtcatgcaggtcgttgtccgcagcgacctgaaggacaccgtcaagaccctggccgatgtcaagggcctgcgcgtttccatcggtgatgccggctccggcaccgaggccaacgccaaagccctgcttgccgcttacggtgtttccaccgatgatatcaccgtacagaacctttccgtcaataacagcgccgatgccatgaaggatggcaagctggatgtcttcttcttcacctccggtgctcccaccaccgccatcaccgagctgcaaaccgccatggatatctacctgctgggcctggatgacgccgtaatggatgagttcatcgccaataacaaggtaggcgactatgccgtttacgccaagatggccgtcacccacgatcagtacgcgtgcatccccgccgatgcccccatcaccactatcggtgttaccgccacctacatcgtttccaattccctctccgaggatcaggtctacaatatgaccaaggccctgtgggagagcaaggatgagatcgctaaggctcacgccgtcggctccggtatggatatcaacaatgccttcgtcaccatcggcaatgttccgctgcaccccggtgccgccaagtactacaccgagatgggtctgaatgtaggctgagctgcaaaccattaagttccccatacgcctgcggcgggaggagttccactaagactcccgccgcggctttcctcttttatttgccgggtaacaaaagcgaaccggccctattccatgctgttcctcttttgtgattcggtaaaaatccatatcagaaaggatgctgccccatgagccattccctgcaccacaccgatgctgccgataccgccaagctcctgcaggagctggaccgcgacagcaaaagccgcagcttgaccggcggctataagaccgccatgacggtgctgtttgttctctattccctcactatgatcgttatggcgctggtcgtttccggcgccacgcagtatacccgcctgcccgtttttgtgggcatgaccctctttgtcggctaccttaaataccccgccagcaaaagggatgccctgcgggataactacttcccctggtacgatatcgtcctcgcctttgcctcgctgggcgtgttcttctactatgccatcgagcagaaaaggatcatccagatggcaaaccgcatcggcaccacccagatcatcatcggcatcatcggcatcctgctgctggtggagctgtgccgccgttccaccggcattccgctcatcgtggtcgttgggctgttcaccgtctacggcgcctggtggctcaccaataataaccccaagaccgccctgcgcaatctcatctacaacctgttctataacctcaattgcggcatcttctcctcccccatcaccgtctgcgcctcctttatcgtgctgtttatcatcctcggctccttcctggagaaaaccggcatcggcaccttcttcgtggatctggcaaactccatcgcaggcgccagcgtgggcggccccgccaaggtcgccgttatctccagcgccttggagggaatgtattccggctcctccgtcgccaataccgtcggcagcggcagcatcaccatccccaccatgaaaaaggtgggctataagccggaatttgccgcagcggtggaggccgccgcttccaccggcggtcagatcatgccgcccatcatgggcgccgccgccttccttatggcggagatcaccggcatcccctatgcttccatcgtcgttgccgccatcctgcccgccgttctgtacttcaccggcatcttccttatggtgcattttgagggcaagcggctggggctcaagggcctgcccaaggactccatcccccacttcttccgcctgctggcaaaaagcggctatctgctcattccggtcgtcatcctcgtcatctgcatgaactactacaccgccgggatgtccgcctgctttgccatcctgttcgcccttatcatcagcctgatcggccgggataagcgggatcttctgcgctccgtcgggctgccgcttatcccgctggccgtcctcgtcgttctgtggcaggtcatcaaaatcgataccggtaccgctgtctttgtttcgatggtggtcgccgtcctgtgcagcttccttacccgttccgccatcctctccccccgcctcgttgcggagggtctgcagggcggcgccggcagctccatcggcgtggcggtcgcctgcgccatggccggcatcatctccggcgtcgtctccatgaccgccctgggcaccacgctggtagcggtcattgtcccccttgcccaaaagagcatcttccttgcgctgttctgtaccatgctggcatgcattgtgctgggcatgggcgtacccaccaccgccaactatgtcatcatggccaccatcaccgcccccatcctcattaaaatgggcatcccgctgctggcggcgcatatgttcgtgttctacttcggcatcgtggcggatatcaccccgcctgtggcattggccgcctatgccggcagcgccatcgcccactccaatccccttaaaaccggcatcaccgccaccaagctcgccatcggcgcgttcatcatcccctacatcttcgcgctcaatcccagcctgctgttcattgatgtggagtccgtctgggctcttatcggcattatggtcacctcgatcatcggcatggcgggcatcgccatgggtatgaccggccatgtatacgcccatgttccgtggtacatgcgcatcatgctgctggccggtgggatcttccttattgatcccagtcctgtcagcgacctcatcgggcttttactcatcggcattccgtttgcgttccagctgctgcagaaccgcaagctgaaagctactgccgctgaataatacttgcatcaaaagggcagtccctgcgggagctgccccttttcttatttctgccgaaccccagcatgggccgcaggccaagccgccctccgggcggcttatgcgggcttcgcccgcatcggcggctccgccgccgggcctgcg

SEQ ID NO: 3068 - DNA, 30324 bp, Unknown
  16S sequences of unknown bacteria
cggctctgtgagaccgccccggcacaattacggcagtattattataattacacatacatatattttatacaaaaatcgtctctctgtcaagaggataaacacatttttattgatgtgcattaaattttatacaatctgacggtcattttgtccgcaaattgcgctttgacgcgccgctcagtcgtcgatcctgacgtcgatcgtgtcgagcgtcgcgaaagcgtcatcaacgagagcgtcgaaatcgagcttactctcctccgccttgaccttttcaatctccggacgggtcctcggatgcctcggggtgaagacggtgcagcagtcctcatacggcagtatcgaggtctcaaaagtcccgatctttctcgcgatctcgacgatctcttccttgtcaagcccgatacagggtctgaagacaggcatattaacgaccgagtcggtgacggctatcgcccgcatcgtctggctcgcaacctgcgcgaggctctcacccgtgataagcgcgccgcagttgttgcgtctcgcgaccttctcggcaagggtcatcataaagcgccgcaggagcagcgtgaaatagtcctcgtcacacttgtcgcggatctcctcctgtatcctcgtcagcgagatgacatgaacgcggatgcgggtcgtatactcgcagaggagcttcgcgagctcgaggaccttttccttcgcccgctcgctcgtgtacgggaagctctcgaaatgaagcgcctcgattgtgacgccgcgcttcgccatcatgtatccggcgaccgggctgtcgataccgcccgagaggagcagaagtccgcgtccgctcgagccgagcggcattcctccggctccctttatctgtccggcgtggatgtacgctccgtgctcgcgtatctcgacgcgcacaacgacctccggatgatcgaggtcgaccttaatgcgcggcattgcctcgagcacggcggctccgacctctccggcaagctccggcgaggtcatcgggaaggtcttgtcggcgcgtctcgcgtccgccttgaaggtcttcacaccggtgagaaactgtgggatgtattcctttgtcgcggcgaatatcgcgtcgatattcttctcgcagacgcaggcacgacctatcgagattataccgaagaccttcttcgcgctctcgagcgcggcgtcgaggtcgcaggagtcgtcgagcggctcgacgtatatggtcgactgcgccttgtatatatcgaaattcccggcgcgctttattctcgttttcagctctctgagcagcatattctcgaaatacgagcggttcgcgcccttgagtatgagctctccgtatttcaggagaagtacttctttcattatttggtccaacctttcagtgttttttatttgccgtcggcgagcagactgtacgccgcgtgaagattttctatcacggctttcccgctcgtctcgcagcactcgccgtcgagcgaccacgcgagcttcttttcgtctgtcgtgatcgtcccgcgcgagaagctgccgaagctgacgaatttcgcttccctcggctgatccggattctgtagctttattatctcctgcgcagcctcatggaactcgaccgggttcttcggggttctcacaagcagatactcgtgaagcccgtcgcagaaatcgacctccgtcggatcgagctttatgacgccgccaatcgacagggtgttcgcgaacgcgccgaagatgaattcatcctcgatgacaacgccatccgacatctcaaacctgagcctcgtcggtctgatgtctccgaagcgcatcactccctccaggatatacgcaagatgtccgagcatattcttgagctgctgcggcgttccgtaggaaacctcggtgaacgcgccgaacgacgcgacgtagttgaaaacatgaccgtcaagccgtccgcagtccatctgtctcgctttcgcgttcatcatgaactttgccgcttccccagggtcggacggaagccctatgctcgcggcgaaatcgttcgttgttcccgccgggatatatccgaccggcggtcttttgtcccgcggcagtgagcacagacccgcgacaacctcgttcagggtgccgtccccgccgatacagacgacaaggtcatctccggcgtccctcccggcgacaaacctttcggcgtcgcccgcggactgtgtcgggcggacgagacagtcatagccgcctttcgttatcgtgtcgagtatgtccagcaggtcagagcggagcttcggtctcgccgtgtgctggtttactatcacaagtgctttcttctgcatcaataatacctcctgcggcagaaacgaggatatcctcctcgttcgcgagctctccggatattacccgggaaagcagcgacgtgaggatctttcctatccgttcgggtttcacgccgagctctttcagacgctcaccgcctattttcaactgcccgacagagatacattcaccggatccgagaatatcgtcaagatcagacagacgctccggaggtatcgtcccgagcgcgacgccaagaatgatcgtatcccgcgcgtgatccgtgccaatacgcgcagcgagcctttttgtgtctgctctgccgtcaagcggcgcgtggacgttcagcaccgcgcggcgggttctaagcgaaactcttttcggcagtttcaagccggcgagcgcggtattgagagcccgctcaggcagaccacagaacagtccggcgagcgacagcgcgaaatcaccctgcccgctcagtttcccgacgcattccgccgccatcgcgaaattctcacactcaagctccggtattgttgtcaggaatacaggctcgtatccgagcagtatattgacaacatccacgccggacaacagtttttcaagctccgccgagacacgctccctcgatatgtcaagtatcagagcgcgcagtctgacggcggcttcagccgtttgatcgtcgatctcaaacccgagcgtcgacgcgaagcgcaacgcccgcagtatcctcagagcgtcctcgtcgaaccgtctctcaggctcgccgacgcagcggatgatcctgtccccaaggtcgcgctcgccgccatacgggtcgataagccctctctccggagagtacgccatcgcgtttatagtgaagtcgcgtctcgcgagatcttcctcgagccttccggtgaatcccacgctgtccgggcggcggtggtcggaatattttccatcgacgcggaaggtcgtgacctcgaccggttctccgccggagattacagtcacggttccgtgagctatgccggtgggaacagccttgaacccatccgcgcacgaaaacagcgagagagtcgtctccggaagcgcgctcgtcgtcacgtcccagtcgttcggagcccgcccgagcatagcgtcgcgcacgcatccgccgacagcgtaagcctcatacccgtccgcgcagagcttcccgatgaccgccgcggcgaagggcgggatgtgtatcttcatcagacgagagccggttccggcttcacgtcagcttttctgtcggttctgacatccggctttttcgtttcttcttccttgtcaagctgctcgcgcgcgaccgagagcatgagctttatgcggttttcctgattgactctcgtcgcgccgggatcgtagtcgatcgggacgatgttcgcctcgggatgaagctccctcagacggcgtatcatgcccttgccgacgatgtggttcggcagacagccgaaaggctgagcgcagactatgtttccgtagccgttctcgatgagctcgagcatctccgccgtcagcagccagccctcacccatcttgcagccgtacccctcgataccgcggatgagctccttcagatgtgaatacctcgtcggagccttgaatattccctgcttctcgacgatgtcaattatgaactcctccatgcccgcaagataatcgagcagtatcccggcgatgaccttcttcgccttgcttccgccgtagagcctgacgtcctcgatgcggttgtcggtcttgaagaggatgaagctcatgagcccggggaccatcacctcacagccctccgactggaggaactcctcaaggtgattattcgcgagcgacgcgaacttgacgtatatctcgccgacgataccgacctttaccttcctgacgctcctgtcgaccgggacagcggcgtagtcggccgcgatcttctccatatatgagcgcatgacgcgcttagcgaagccccttcccttcgcgaactcgaccgtgagcttctcgacccactcctcggagaccttgtccgccgcgcccttcacggtctcatacggacgaacctgattcgcgagaagcatcatgaggtcgccatacgccatcgctgcgatcagctttctgatcataccgagcgtccagtggaagccggagttcttctcaagtccggagagattgagcgagatgaccgggatatgcccgagtccggcctttatcagcgccttcctgagaagatgtatgtagttcgacgcgcggcatccgcctccggtctgggttatcatcagcgccgtcttcgagaggtcgtattttccgctcttaagcgcgtcgatcatctgacctatgacaagcagcgccggatagcaggtatcgttgtggacatatttaagaccggtctcaacgacggcgtggctgtcgttcgtcaggagctccatcttgtacccatagctgcggaagacgttcctgagcagcctgaaatggatctcgagcatattcgggatgaggatggtgtagtccttcttcatctcctttgtgaactcgacccgctccggcgcggttccgaactctttcccgcagccggacgcgcaaccctcacaggggttcttttcgttttctgacatttatatgattacctttcctcaaattcaagcgacgatcggcgctctgcctgccggtcatcagatttttctgtacacgggtattcccttcgtcgaaaccttaatgtgtccgctctccaccttttcgcctgtgaagtagtcgacccagttttcagagaccgggaggtacacgtcgcgctcgtcgccggtgccggacgctatcggcgcgacgagcaggtcatcgcagaacatatactcatcgtcgatgccaaaggtctcggcgtcgtcggtataatccatcacgagcgcgcggatcggaggctttccggtcgtgtgatacccgtcgaacgcctttttcagcatcgggacaagcttctcgcggagcttcagcagttcgcggacctcgtcctcgcagtcgagctccgcccacggcaccatctcgcagtaccaagcgtttatcaggcactgagcgctgaagacgatcgcctggagacgacgcatcaggtcgtccttatccttcgcgtgtctgacctcgggcgtccagagtataccggagaacccggactggactacgccgcggatgaagtccttgtgatcatacagatcactgtagaggacgaacggatagcttgccgcgagcgcgcccatatttctgacctcggagagagtcttcgtgtctccgagagcctgcatgacagcctgcgcgtagagcgttccgaacagcgagtgatactgctcgccgtcaagcccggacgggaatctcgcggtcagcgggaaactccatccgcctgtgttgtcgctcgagtcgcactcgtcgagcttgaagccgtcgacgccgttatctacgagcttctcgcggtgatagtcggcgaatatcttcttcgcctcgtcagtcgcgaaatccggaacgacgccgccccatacctcgtactcgccgctgtgctcagagagagcgctgtacacgggagacgacgggtggcagaacgcgtgctcccagaggctcacgtggaaaccgttgtcacgaagcctgcggagcatcttctccggctccgggaagcgctcgctccatacccatgagcaggaataagcgtgcgactgccagcccggctcaagaccgaggatatcgcaggggagatcgtgagaacggaaataatccgccatgccgagcacctgctcctgattgtactggccgcagcagcggtagaacacgccgagcccccattccggaacgtctgcgcctccgccggagagcatattgtactcggacacgatgtcggttatcttctttccctcaaacacatagacgtcgacgccctgcgcgcccgggatcagcacgctcatgaccgctccgcaggactcgcggaccgcgtaaagctcatcggtgctcgtcatgacgcggctctcgccattatccgccttcacggcgccggtgtgcttcctgtagccgcagtagacctcgatgtatctcgcggtgtcgaagtacattccgtagcctttgttcgtcacgaaaaacggaacgggcgcgtggctgtcgccgtttgccgacgccgggtcggcgttgaccgcgagacggagctttcttccgcgctggtcgaactgcttcagctggagaccgaagccgtaaatgtgcgcgtcgtcctcgatcgggaactcgatcagaaatccgcggggggtcatccgcgcctcaaagcgggattcgggataggagaccggagtcccgacataactgaaacccttgcagtaatatgatgggacgagtttttcaggggttccgaatgtgaatcttttcatgatgcttttcctcccggttactttttggaagcgagatctctttccttcgcctcgcaggcggcgaacaggcttctgagccttatctttaccgcgccgaggttcgttatctcgtctatctttatctgggtgtaaatcttgtcctcgcgctcgagaatctccctgacctcgtcggtcgttatggcgtcgactccgcagccgaacgaaacgagctggacgaggttcatgtccttctgccccgcgatatatctcgccgcggcgtacagtctcgagtgatacgtccactggttgagcacaccgaccctgaacttctttatgttgtcgctgaccgagtcctcggtcacgacgaccgctccgcactcacagataagtctgtcgatgccgtgatttatctccgggtcgacgtggtaaggacgaccggcgagcacgattatcggcagcttcttctcgcgcgcgagctttatgtactccctgcccttcgcgcggacatccgaaaggaacttgtccctctccgcgtaagcggcgtcagcggcggcggatacctccgcgctgtcaagaccgtcgaagtacttcgagagtatctcatatatcttgcccttgaagtccttcgggcggtgaacgccgatataatccttgatgaatttcgtcttctcaagtcccggcacgttcgcgccgatgacctccggatagtacgcgacgaccgggcagttataatggttgtcgccgagcttctcgtcaaaattgtaggtcatgcacgggtagaatatagcgtcgacgccctcggaaagaagcgcctcgatatgtccgtgtatcagcttcgccgggaagcacaccgtgtcggacgggatcgtctgctggccggcgaggtagagctttctgtcgctgcgcggcgacacgacgatctcgaagcccagacgcgtgaagaacgcgtgccagaacggaagcatctcgtacatattgagccccatcggaagacctatccttccgcggcttttctcagccggctttctctcctcgcccgcctggcggttcgcgccgtattcggagaggagcgagagcttgtactcatagaggtcgtagtgcgcgctctccttgcccctgagcgtcggtctctcacagcggtttccgccgatgaagcggcgtccgccgtcgaatgtattgacggtcagacggcagtgattctcacagagaccgcaggctatgaccttcacctcatgcctgaacgccttcagcttttccgcgtcgagaagcgtcgtcacatgggaaggatccgccctgtggcagtcgcgcgcgtagattgccgcgccgtacgcgcccatcagaccagctatgttcggtctgacgacgttcctgccgatctcctgctcaaacgccctgagcaccgcgtcattcaggaaggtgccgccctgcacgacgatatgctcgccgagagaatccggaccggacgcgcggatgaccttgtagagcgcgttcttgacgaccgagaccgaaagacccgccgaaatattgtcgatcgtagcgccatccttctgcgcctgcttgaccgacgagttcatgaagaccgtgcagcgcgagccaaggtcgaccggcgccttcgcgaacagaccctccttcgcgaaatccgcgatatcctgcccgagcgcccccgcgaaggtctggagaaatgacccgcagcccgacgagcatgcctcgttcaggaatatgttatcgattgcgccgtttcttatcttgaagcactttatgtcctgaccgccgatatcgattatgaaatcgacatccggcatgaacttcttcgcggcgaagaagtgcgccatcgtctcgacgataccgtagtccgcggcgaaagcgttcttcacgatctcctcgccgtagccggtgacggcggacgccgtcagctttatctccggatactcagagtagaatttctctaggaattcctttatgatcggcacggggtttccgctgttcggacggtaaagcgagcagagtatatccccgccctcgctcataacgaccgccttgacagtggtcgatccggcgtcgactccgagatatgcctcacctttgtatttctccggcaacgcgtactcgaccttgtccgccgcgtggcgggaggcaaactcgtcatagtcggctctcgtggcgaagagcggcgggcaggcaagatatttgccctcagtacggtatcccgctattctctcaataccatcgctgagcgtcgcgcgcacggtcccgatatccgagccgaacgccgcgcccatcgcgacgaaatagagcgaattttcaggacacctgccggtggtcttaagcgtcctgtcaaacgcggagcgcagaccgtccatgaacgtgagaggtccgccgagatagacgatatttccggttatcgggcgtccctgcgcgagacccgctatcgtctggttgacgaccgcgctgaagatgctcgccgcgatgtcctcttttctggcgccctggtttatcagcggctggatatcgctcttcgcgaagactccacatctcgacgctatcgtgtatatcttctcgcagccgtgtgaaagcgtgttgagctcgtccggcgtgacggcgagcagcgtcgccatctggtcgatgaacgcgccggttccacccgcgcaggagccgttcatgcggacctccatcgtgccgtcgaggtaaagtatcttcgcgtcctcgccgccgagctctatgacgacgtccgtgtcgggtatcagcctcttcacggcaagtctcgtcgcgtagacctcctgaacaaatccgattccgcacgcctcagccattcccattccggcggacccggacacggacaggaccgcgtcgcccgcgcccggtatgtccttctctatctctttcagcagagcgagcgtgctctcggttatctgcgcgaaatggcgcttgtaggatttatatattatattattctcatcgtcgagcacgacgcatttgagcgtcgtcgacccgacgtcaagtccgattctcatgttcatgaccatacctttcgtattaacttacagtgttgaggcgattttgaaaaacggcttgtccgtctttcaaaattcacgacactttgtcttgaaagcttcaaaactgtttggtctgaaaatttatttccagactttcccctccataatcaagccgtctccgcgtttacggcagagtcggcattatacatacattatattatatcacacccggttttctactgcaatgaatatagtgtaaattaatgctcacatatgttgtttttttgacccttacgaggtattttcatcctttcggctctgtcacgccgcaaaaaccgaccgccgcaagcctgtgacttccggcggtcatgtattcccgctcatttactgcccgggagtttctttttctttcactgtgtcagcgagcgcctcctcacgcacagactccatctgcgccgtggttatatgcccttttgtgcgctcgaaatacgctacgctgttgcgcgcgaggagaagaaactgattgttgagggttctcccctcgctcttcgcgacaaagcacagcttctcaagcagatcgtccggtatcctgaccgcgaccgtcttttgatttttcataaaataccgccctctttgtttttttcattaattctattatcctacaaaaatgcggctcggatatttccgcaatgtttctcagatgtaaataatttgtttatcggcccatcgtccccgacatcggaaaatttttcgcccgtttttttaaaaaaattgtgagtatgtattgtaaaaaaggacgtaatgtgataaaatttatttatagaagtattccggtcttacaaaaaacgacatgaaaggacaaaataacgaaaatgctgtcaaccgtatattcatccggcatctcaggtattaacggattcgtcgtgacggtagaatgcaacgcgagagacaagattccgacgttcgatatatccggtcttcccgacgccgccgtcaaggaatccaagaacagaataatgtccgccttagaaaacagcggcttctatgaaccggaaaaggcgctgaccatcaacctcgcgcccgccaaccgtaagaaagaaggatcctcatacgacctcgccatactcataagcataatgaaagcgacgctgatgcttccgcttgaactcgatctgcgtgactgctgctttataggcgagctgtctctctccggagagatcagaccggtaaacggcgtgctctgtatgaccatagccgccgccgagcacaatctgcgccgcgtgttcgtcccggcacagaacgccggagaagcgtcggtagtccccggggtgagcgtttacggtgtcggcagcgtaacagaactgtgtgatttcctcatgggcagaaagcgcattgaaccgaccgtatacgacaaatccactttttcggcggaatccacgtcatacccgatcgatttttccgacgtcaagggacaggaaagagtcaagcgcgcgctcgagatcgcggcggcgggcggacacgccgtgcttatgataggtcctcccggatgcggaaaatccatgctcgcgaaccgcataccgactatccttccggacattacgttcgaggaagcgattgagacaacgaaagtatactcgatatgcggcaagctcccggaaggcgtaccgctgataacaaggcgtccgttccgcgcgccgcaccatacgtcgtcagccccgagtcttgtcggcggcggcagcattccacaacccggcgagatatccctcgcgcacaacggcgtgctgtttctcgatgagctcccggagttccgacaggatgtgctggaggtactccgccagccgctcgaaagcggcaaagtcgagatttcaagagtcaacggaagcgagacatttccgtgttcgttcatgttcgtcacggccatgaacccatgcaaatgcgggaactacggaaaccctgtaaagccctgtacgtgtaagcccgccgacgtcaaaaagtaccattcgaaaatcagcggaccgcttctcgaacgcatagatatgcagatagaggtcaacgcgctgtcgttcaacgatctgtctgatacggatcgccgctacgagtcatccgcggaaatccgcgccagagtcaacaaagcgagaaaattcgcgatagagcgtttctggtccgctgcggaaaaggacaagtcattaaccccgatacgcttcaacgcggcaatgaacgatcggcatataaaccgtttctgccatcttgacggagacgcgcttgcaatcatgcagaccgctcacgaaaagttccagctctccggccgcgggtatgaccggatacttcgcgtggcgagaacaatagcagacctcgcggggagcgagaatatccagaagaaccacatatcagaagcgatacagtaccgcggtcttgagaaaaaatactttttctgagttgccgccggcttctcaacacaactgttgaaaagtcgtgtgacaatctgtgccaaaccatgtaaaactctgtcgcctgatgtcgcacggctgttgataaccatgttgaaactgtgcaaaaccgcgcatccatgcctcgaagttttccacagttccggagtggaacagtgttgataagcatccggcacggttgttggaaattaattttaatcatcgaaaaagggaacgcaaatgaaaacatacaagaccgcgcggctcatcctgcgcccatatgagccgaccgattttgacgctgtccacgcatactcgtccgacccggagaacctgacctacatgctctggggtccgaacacgccggaggagacgcgagagttcatcgaggacgccatagccgcggcagaatcgccgcgtccggaggaatatctcttcgcggtaattgaacgatcttccgatacgctcatcggcggcggactgatctcggtgagcggaccggtgagacccggagtgccggaggcggcgtcgcctgaatatcccggctacggctccggagagctcggttggataatccgccgtgacagacagaagctcgggtacggaagcgagctcggaagattcctcgtggatttcggcttcagtgagctcggactccacagactctgcgcgcactgtgacgcggagaactacggctcgagaagggtcatggaaaatatcggaatgcggcgcgaagggctgtttcttgaggcgagacgaccgcacaagaagagcgcgatgcgcttctcggatgagtattcatacgcgatgctgagacgcgactggacacctgagccgcgcgaatccgaagaaaacacttgacagagccgccgtgttgtgatataattatcagtgcgaccgggtcgggcaatcgcgtggtatgtcgccgaaaggtattaccatgaggaaagtccgggcttcacagggcgggataacggataacgtccgccgagggaaacctccgggatagtgcaacagagatataccgccgtgaggtgacaccgtcgccccgcggtaagggtggaaaggcgaggtaagagctcacccggtcccgtggcaacacgggagcgctgtaaaccctatccgaagcaacaccttacgggatccgccattttccggcggctgcttgcccggcagaacccgtttgtctgtggcagcggcattttgccgcgagcgcgtcggtaacggcgcgtcgagatagatgattgccgattacagaacccggcttacagacccgatcgcaggctgtcatgctcccgcatgacagccattttttcaggttgcgcccgcgtatttacaaattaatgttgaaaagcggcgggaaatgagtgtataatataaatgaaacactgatttaaggttgttttcgcagaaaaaagcccataaatctgggggctttttctgcgaaaccccgatttgttcggtgtttcctaaatccgtaaaatccgctggcggcgtaccgcctgtcaggtaaccatgaaaggtccgatcatatgaaaaaaacatccgcagccgctctcctgctctccgcggtgatcggcgcttccgcgctcgtttcgtgcggcgacaagggctcggcgcctatgggcttcaaggagatatccgacgagtccctcacatatcacctctacgttccggacgagtggacgaccgatatctcgaccggcgttacatcggcgtactacaacggagccgacccgtcgagcgtctctatgaccgcgttcgagctcgaccgcgacgtgacgagcgtcgacgactactgggcgctttacgaggaggatttcaaatccatcttcacggatttcgagtacgtcgataaatccgaatgcaagctcgacggcgtcccggctaagcagtacatctacaccgcgaccctgaccggtgagcagtacaaattcatgcaggtcgtcacgataaagaacaatcaggtgtatatcttcacctacgccgccctcgccgagaaatacgactcgcacatcgacgacgtcctcgcgatactcgactatttcgacttcaagtaagccgcgaaattttactgaaaaggaatgattcgttttggacaagatctattttgacaacagcgcgacaaccccgctgacacccgaggcaagggagaagatgctggaggcgatggacatctacgggaatccgtcgtcactgcacacgatgggtgtggaagcggagaaactggtcaacgaggcgaagcgaaacatactcacagctctcggtataaaatacctgacgacgctcgactgccgccagctcatcttcacggcgagcggcaccgaggcggacaacctcgcgctcctcggcacaaccggcgcgaagaactacacatcgcaaaagaacatcatcatctcggacagcgagcatccggcgatcatggagaccgcgaaggagcttgagcgccgcggcttcatcgtccacaaaattccgacggcggacggcatcccggactacgagatgatagaacaggtcgcggacagcgacacgatcctcgtgagcttcatgctcgtcaacaacgagactggcgcgatatatgacgtcagacgtatctccgacattgtgaaaaaggcgaaccccgccgccatcatacataccgactgcacgcaggcgttcctgaagatcaggttcaccgcgaaatcgctcggcgccgacatgataacgatatccgggcacaagataggcggtccgaagggcgtcggagccctctgggtctcgccggagattcttaagaaaaaagctattgtcccgataatcttcggcggcggtcaggagagcggaatgcgctccggaaccgagaacgtcatcggaatcgcgggattcggagcggcggcgaaggtcggatacgagaagctcgacgaacacatcgcctccatcaccgccgtacacgacaaaatattctcggtcctctcggacgcaaaacgtttccccggcgtcgagctgaacacgccggacggaccggcggctccgcatatactcagcatacgcatgccgatggtacggagcgaggtcatgctccacagcctgtctcacgccggaatatttgtgtcgagcggatcggcgtgctcgtcgaacaccggtcacggaagctatgtgctgagagcgttcgggctcgacaaccgtgaggcggactgtacgatacgcgtcagcataggcgcgcaaaacacgcttgcggacgcggacggattcgtcgaagagtttgcttccgcactctcgtcgctcgtgagaatgacgagataaagaccatcttgtgaaatggagaactaaatggattctttcagttacgttgaaaacctctgcaagaccgcgaaggctgcggctccggcattctccggagcaaaaaccggcgtcaagaacgcggtcctcgcgcgcatagccgagcttctcacaggaagaagcggcgacatcatagaggcgaacgcgtccgacctcgaggaagcggacaagaacggcgtccccggaccgatgcttgaccgactgaagctcgacaaaaagcgcattgagggcatcgccgcaagcctccgtgagctcatagtcctcgccgacccgatcggctccggcacacgctccgagcgtccgaacggacttgtcatcgagcatatccgcgtccctctcggcgtcgtcgcgataatatacgaggcgcgcccgaacgtcacgatagacgccgcggcactctgcataaaaaccggtaatgtctgtattctcagaggcggcaaggaggccatacgcaccaaccgcgcgctgacgctcgtcatgcgtgaggctctgcgtgactgcgggcttccggaggacgcggtgcagctcatcgacgacacctcgcgcgagagctcgacggcgctcatgaagatgcgcggatacgtagacctgcttgttccgcgcggaggtaaggggctgatacgcagcgtcgtcgacaacgcgacggttccggtcatcgagaccggcgccggaaactgccatatctatgtcgacgacacagctgacctcgacatcgcggtaagtgtcgcgctgaacgccaagctctcccgtccgtcggtctgcaacgcggtcgagacaatgctcgtttcggagaatgccgcggaagaattcctgccgaagttcgccgcggcgctgacgcacgagcttgagatacgcggctgtgagcgcaccgtccggatactggaggacaagaaaggttccttcacgctgaagcccgccgccgagtccgactggtccgaggagtatgacgattatatcctcgccgtgaaagttgtgtccggcatcgacgaggccatcgctcacataaacaggtacaacacaaagcacagcgaagccataatcacgaaaagcatggcgaacgccgcgagattcagaaacgagatcgacgccgcggcggtctatgtcaacgcgtcgacgagattcaccgacggcggcgagttcggcttcggcgcggagctcggaatatcaactcagaagctgcacgcgcgcggaccgatgggtctctccgcgctgacgaccgaaaaatacctgatcaccggcgacggacaggtaagataaatacgcagatttattcaacaggagaaacaatcatggaaaagcgcagaatcatactcgacacggatataggacctgactgcgacgactgcggcgcgctcgcgatactcgacagggcgtgcgcggacgggaaaatcgatctcctcggcgtgacgcactgcacgtccgaccttctcagcgtcgacgtcatcgcggcgataaacgactggtttgtcgtcagcgcaccgataggacagaccgacagaaaagaattcttcgcggacgcgacaaagtacacaaagccggtctcggacacttaccgcgcgtcaggaaagaacgcgccggcgaccgaaaagcctgttccgctcctcagacgcctgctcgcggagaacaccggagtgactttcgtcctgatcggtccgctcggcaatctcgccgacctgcttgattcagagccggatgaaatctctccgctcgacggcgtgtcgctcgtcaggaaatccgtcgacaaagtcgtcatcatgggcggcaatttcgagaacaccgctaccccggaattcaacatcgagtgcgacattcccgcggcgaagacagtcgccggaaagtgccccgcgccgatcgtctggtgcgggttcgaggcgggtctgaacgtcatcaccggagagacactgaaggactgccccgtggattacccggtaaggctcgcgtacgagaaacacactgacgagagcttcagacgcccgtcatgggacctcgcgaccgtgctttacgcactgaccccggactctgaggactggatagtctcggacgagcacaaagtggatttcgccgacaacggcgccgtgatgatctcggacggcaaaggctcaagatgggtcagacaccgcgacgagagggcgcttgagaagacgctgaacagcatcatcggtctttcagactgaatataaacgctgattcaagttttttctgctaaaacccgatttattcagcgtatcatcaaaaacctctgacaggaaccgcaccgtcagaggttttgttgtatttatctgagcgccgcgagcattatgccgcagagaccgatgatcatcccgcaaagccctttcttcgtcatcttctcgccgcagaagaccctcgccgccgccgcggacaggaccacgacgccgccgttgaaaaccgggaagaatatgaccgcgggtatcagaccggtgagtatcaggttgatgatattcgaggctcccacgcatatgccgcagccagcggatgccgcggcgtcgctttttctcattccgaagcttttcggggactgaccggaaaatataagcggcaggagcgaaagaacgaacgacgcccccatagacaccgcgaggaatccgccgacctcgcccgccgattccgacgttctgtgaattttctgtatcagtccgacggcgccggacgaagccatcgccgcgagcgcccatatgacccacgccgagcccttgttttccgtggcttttttctccttcacgtcctttgagccgcagaaccagaacgcgggcagaagcaaaagtataccgatgacaccgaccggagatatcacctcccgccagacgatgagtcccgccgcggtcggtatcaggaacccgcaggaatagaagaacgaaacactcgagacccgccccccggcgagcgcccgcatatatgaaagctgcgccagaacggtgaataccgcgtaaagcagtccgagcgccagcgtaagccccgacagagcgaaacttccgtaagcggcgcaatagacaagcgccaaaacgaacgccgtcccggatatcagtgagttaacagcgccgaacccggcgagagtcgacgtgaacgggctgagccgctttgatagaagcgaccgcgacgtcgaagacagcattgagacaacgagaaaaatatattccataaattacttccgcaaacgtattgattgagccgcctttttcatcggcagatatattttatcataccgggcggtttttttgaatagacgcgggagacatatatatggacgattgcgactttttttgcgtttctctattgacatggtgccgcggcggtgatataattttcttatataaaatctcagccgtaaaggcggaaaggcacacacaatgaatatctacaaaaatgtaaccgaactcatcggcggcaccccgctcatggagctcgtgaattacgagcggaagaacaatgtcgaagcgaccatcctcgcgaagctcgaatatttcaaccccgccgggagcgtcaaggaccgcgtcgcgaagagcatgatcgaggacgccgaaaagcacggcattctgaaaaaaggctctgtcataatcgaaccgacaagcggaaacaccggaatcggtctcgcgtccatcgcggcgtcgagagggtaccggctcatcctcacgatgcccgagaccatgagcgtcgagcgccgcaaccttctgaaggcgtacggcgcggagctcgtcctcaccgacggctcaaagggcatgaaaggcgccatcgagaaggcggacgagctcgcgaaagagatacccggcagcttcatcgccggacagttcgtgaacccagcgaaccccgaagcgcattttgaaaccacaggacctgaaatatggcgagacaccgacggtaaagtcgacatattcgtcgcgggagtcggcaccggcggaaccgtgaccggaaccggaaaatacctgaagtctcagaactcggacgtcaagatcgtcgctttcgaacccgagggctcaccgttcctgacaaagggcgtcgtcggcccgcacaaactgcaaggcataggcgccggattcagacctgatatactcgatatgaacgttatcgacgaggtacttacaatcggcgacgaggacgcgttcgcgaccggaaagaagatcgcccgcgaggagggtatgctcgtcggcatcacgtccggagcggcggtcttcgcggcgaccctgctcgcccgccgtccagagaataaaggaaagacgatagtcgcgctccttcccgacaccggcgacagatatctctcgaccccgatgttcgccgactgagaaaatcgggcaaatgtttttccacagatatgtggaacattttatgctctccgcacgtgacgggttctcaccgtccgtctgacgtgatttcattgaaaaataacgatgattgtgactttatattgacaaaagaagtagcataactgtcatatttgaaaataaattccgagattgttcacaatatttgtcattatgggtctttacttttctctcgaaaagtgttattatattagtgtgggctttccgcgacttccggagccgcggggctctcctgacaatgcataaaaaattaatatacaggaggatttccaaaaacatggcaatcgaaagaaaaaagatatccatggacggtaacacggccgccgcgactgtgtcgtatgcgtttaccgaagtcgccgccatctatcctatcactccgtcgagcgttatggctgagctgaccgacacatggtccgccaccggcctcaagaacatcttcggcgaacgtgtaaaggtcatggagatgcagtcggaggcaggcgcggcaggtaccgttcacggttctctcgcggccggcgctctcaccaccacctatacagcttcccagggtcttcttctgatgatcccgaatatgtataagatcgccggcgagctcctgccctgcgtcatccacgtatcggcacgctgcgtcgcttcacacgctctcaacatcttcggtgaccactccgacgtttacgcctgccgtcagaccggtttcgcgatgctcgctgagaccaacccgcaggaggtcatggatctcggcgcggtcgctcatctctccaccataaagggccgcgttccgttcatcaacttcttcgacggcttccgtacttcccacgagattcagaagatcgaggtctgggactataaggatcttgacgagatggtcgacaaggacgctatcgctgcgttcagggcgcgcgctctcaatcctgagcatcctgttctccgcggctccgccgagaacggtgatatcttcttccagaaccgcgaggcctgcaataaatactacaacgctctccccggtatcgtcgaagagtatatgggcaaggtcaacgagaagctcggcactgattacaagctcttcaactactacggtgctccggacgctgaccgcgtgatcgtggctatgggctcgatctgcgacgtcgctgaggaagtcatcgactacatgaacgctgccggcgagaaggtaggtcttatcaaggtaagactttatcgtcctttcgtcgccgacaagctcatcgaagtgcttccgaagaccgcgaagaagatcgccgtcctcgacagaaccaaggagcccggcgctctcggcgagccgctctatctcgatgttgttgctgctctcgcgtctaagggcatcaaggcacagatcgtcggcggacgttacggtctcggttccaaggatactcctccgtcctccattttcgcggtttacgagaacctcgcgaaggacgagccgaagaacagcttcaccatcggcatcgtggacgatgtcaccgagtgctccctcgaggagaagcccgctccggacacctccgctaagggcacaatctcctgcaagttctggggtctcggcggcgacggtactgtcggtgcgaacaagaactccatcaagatcatcggcgaccacaccgataagtatatccaggcatacttccagtatgactccaagaagaccggcggcgtcaccatctcgcacctgcgtttcggcgacaaccccatcaagtctccttactatatcactaaggctgactttgtcgcctgccacaatccgtcctatatcctgaagggcttcaagatcgtcaacgacgtcaagccgggcggaaccttcatgctgaactgccagtggactcccgaggagcttgagcatcatctccccgacgagtgcaagaagtatattgctgacaacaacattcagttctacaccgtcaacgctatcgacaaggctatcgagatcggtatgggcaagcgcaccaacacgatccttcagtccgcgttcttcgctcttgccaacatcatgccgatcgaccaggctgtcgagtacatgaagtacatggcaaagaagtcctacgctaagaagggcgacgctgtcgttcagatgaactacaacgctatcgacgccggtgtcaacgctatcgtcaagatcgacgttccggattcctggaagtccatcaaggtcgaggagaaggaagaaaaggtcgagggcgatcgtcccgagctcgtcaagttcgtcaaggatatcgttatcccggtctccaagatgaacggcgattccctccctgtctcgaagttcatgccgcacgtcgacggtaccttcccgcagggcgctgccgcttatgagaagcgcggcgtcgccgtcactgttcctacctggatccctgaaaactgcatccagtgtaacagctgcgcgttcgtctgcccgcacgcaaccatccgtccgttcgctatgaccgaggaagaggctgcaaacgctccggcgtccaccaagttcgccgcaaagccggttctcaagacgaattacaagttcacgatggcagtgagcccgcttgactgtatgggatgtactctctgcgtcaaggcgtgcccgatcaacgcgaaggccgctaaggacggaaccgacaaggtcgccctcaagatggtcccacaggagagccagctcgatcagcaggccgcattcgactacgcggttgaaaaggtctccgagaagaaggaactcatcaacaccaccatcaagggaagccagttcaagcagccgctgcttgagttctccggctcctgcgcgggatgcgccgagacctcttacgctcgcctcgtaactcagctgttcggcgagagaatgtatatctcgaacgcaaccggatgctcctctatctggggcggctccgcacccgcaactccttacaccgtcaacaaggaaaccggcaagggtccggcatgggctaactccctgttcgaggataacgctgagcatggtctcggtatctacctcggtcagaagaccatccgcgctcgtctcatcggcaagatcgaagagatgatggcttccgaaaaggcttccgacgagttcaaggccgcggctcagaacttccttgacaccaaggacgacggcgctaagaacggcgctgctaccgacgctctcatagttgagctcgaaaaggccgctgctgagggctgcccgattgctcctcagatcctcgccgagaaggattacctctcgaagaagtcgatctggatcttcggcggcgacggctgggcatacgatatcggtttcggcggtcttgaccacgtcatcgcttccggtgaggacgtcaacatcatggtcttcgataccgaggtctactccaacaccggcggacaggcatccaaggcatccaacatcggtcaggtcgcacagttcgcggctgcgggcaaggcaataggcaagaagaatctcgctgagatcgcgatgtcctacggctacgtctatgtcgcacagatcgctatgggcgccgacatgaaccagacgctgaaggctctcgctgaggctgaggcttatccgggaccgtccatcgtcattggctacgcaccctgcgaaatgcacggtgtcaagggcggcatgaccaactgccagctcgagatgaagcgcgccgttgacgccggttactggcagatgttccgcttcaacccgtctctcaaggctgaaggcaagaaccccttcactctcgactccaaggagccgaccgcaagctatgtcgacttcatcaagtccgagacccgttacagccgcctcgcactcgcgttcccggagcgcgcggatatgctcttcggcaaggccgagaagaacgctaaggctaagtacgagagactcaagaagctcgttacgctttacgcgcctgatgatcaggaaacgaagtaatttgttttccttttcggaataaaatatcgcgtccccgctctcaattccgatgggagcggggacgctttcttattcgacgaccttacagattatcatcgcctttggtgacgcggtaatcgctcggtgtttttcctgtgtacttcataaagacgcggttgaaggtgcgcagtgatgaaaaaccgctctcgaaggctatgtctgttacgctccccgacgtagtcgcgagcatccttcgggctttcgagatcctgaggttatgaagatgctcgataagcgtaaatcctgtggactgccctaccatatttgaaaggtatttgtaagacactccaagtgtttcggcggtatttttcacactgaaatcgcagtcttcataatgcttttcaagatatatcatcacattctgcaaaagtctcctgtctgacagacgcgcgtcatactctgtcactccggtatgctcaaggtgaaagagtatgacagaccggataagctccctgtaccagatatgatcatctatgtcaatatgcggcgggtaatcattttcttccagatccgacataaatggatatatcagcgacttcagcttgttcagttcatttccgctgtaaatataaaacggtgtcaccggcaaaaaacgagaataatactgatgctccggagtatcaagaagctcaaccggaactatgaaggcgagcttcttcccatgtagatttttgtctgtaacattataacagtgctcctgaaaaggaaacgctattccgacgcccccttccggcagttccatgctttcgtcaccgacactgaagacctggcttcctgacaatgtgataaccatttccaaagcagcgtgaaaatggttgtaaaaatcagtgacatcaccagtatgaaaagttttgtgatggtacagcatagtttcatagtacgccttcattcatatccctccatttgttatattatatcatttaaatcctcagctgtcaatagatttcgaacaatctgtatttttgtcttgcggttcttatgttttggcttgcagcattgtcatatatatgttataatttataaaaaaatggaggtccggataaatgaaaaagaccagattcatagcccttgcactgatgcttctccaactcaccgcgtgcggcggtgacaaaacgccccaagcggacgacagtacgcagcccgaaacatcatctgagacagtcagcgaagagacgaaaaacgaaatttcagacgaccttcctgacactgaccttgaaggatacgaattccgcataatggccttgtcaccgcgctatatcaaatacgtttattctgatgagcaaaacggctctcttctgaacgacgcagtctacaaaaaatgccgcgcggtggaggatcgcttcaactgcaagatcatgctcgcggatggtgccgcaagcattccggaggacgcgcgtgatgatttctctccgatcaaaactccggtactcgccggtgaggacgctttcgatattgccaccggtcatgacttatctatggctaatttctcgctcgagggttatttcgagaatctttgcgagataccatatctgaacttcgacaaaccgtggtggccgaagttcacgatggacagcctgacggtgaacggccgcgcatatctcttctcgaacaacatatcctatgagttcatgtccgacacccgcgtcatgttcttcaacaagaagatagtcaccgacatgaatctcgatatgccctacgaactcgtatacgacggaaaatggacactcgacagaatgggcgagatgtcagcctcagcgtataccgacctgaacggcaacagcgagattgatgaaggcgaccgcttcggatttgtcaaccagatgtggtacgcttacctcgaggcgttcaacctcgaatcttatcacgagggcgaggacggcaatctgtcatatgtatttgacaccgacaaataccagaagataatagacagcttccattcgatgacattctcgaacggcggactgttcaacgaaaacgcagtaaatatcttcagtgaaggcaaggcgctcttcacgtaccagatgctcgactgcgcgacgaccgatttcagccagagtgacgttcagtacggaatactcccgatgccgaagctcgatgaaaaccagagccagtactacggcggcatgaccgacagaccatacggtgttccggtcaccgctcacgagaacatagataagatcgggctcataatcgaagcgctcagcgccgagggctacaaaaacgtatacccggcatactttgagcaggctctgaaggcaagatactcagatcagacggacgacgcgaacatgatagatatagtctgcggaaacgacattctcgcgttctcttacatatacggcaaagacagccctttcaacagcctgatgtacgagctgctgaagccgggagtatcaaatccgagcgtcgcgtcctacgccgcgaaaaaagaaaaatcgcagaaatcccgtgtcgaaaaactcaatactttcttccacagcaactgatacgacatcaaattcccattcataactccccaaaaaccgaaaaacaataactacaggacttccacagtcctgtagttttttattccgaggtcaaaatgttcgaagaaataataaaatcgatatcaacaatagcgttcctcgtctgcacgctgtttctcggcagtatcgcgccgtcagagccgtcgccggcgaacgagccgtcggacgggatttccgactatgacgccgtcaggtgcgctgtcactgataccacgaccgaaaaggtcttctctctcgtcggagtctgggacggtttcggcgtcaggtatgagttcacgtcgtccggaaagctcatcgtcgggaacaccacaagaaagtatgaattctcagacggtacgctcacagtcgacggcaaggacgggaagctcgagatacttgacgaccgggtcatccgcctcgacgggcggaccctctatcgcatgaagtaggctcagatcagcgccctcgctgccatgacggcgaccttcgcggcggagagctcatccttcggattgctcccgtccatcggcagcccggcggcggcaatctcctgattccagagcgaccgcagaaccgctccggcgcgtatgccgaggcaggacgacacacagaacagtgccgccgtctccatctccgacgcgagagctcctcccgcgatatacgccctccacttatttttcagctcatcggctatcggcatacgctccggcgaatgctgaccgtaaaacgagtccttgcagtggacgatgccggtatgcgaaacgagaccgagcgctccggcggctctcctgagcgcgtctgtaacctcaaaatccgccgcggcgggaaactccaccggcagatattccctcgatgtgccctcggcgcggatcgcggacgacgctatcacgatatcctccgcgcggacatttttattcatcccgccgcaggtgccgatacgtattatcgtccggacgcccgccatgtaaagctcctcgacgcagatcgcggtcgacggtccgccgataccgtgagacatgatgattatccttttcccgtcaatctttgccgaataagacgtatactcgcggttcgacgcgagcggcgacagctcctcgcacagagcggcgatatgacaaactctccccggatccccgcagatgagcgcgagcggcgcgccgtctgacggagatattccgatatggaataatttttctttgttgttcactaccataaaatcacctgctttcgccgccgcgaaagcttccctatctcccattttgtggctggttttgcgcagcaaaatcgttgtcggatgacaacgaaagctgcaaaatgttggagtgaaagatttatctttcactctatcaccatccgatactgattatatcagaaaacagcggatttgtcaagtcaatatgaaaagcgaaaattcccgtgaagagaatcactcctcttcacgggaatcattactgcgttttttatttcgtcggatcaagatatttccaataagacttaagatagtttgccccggaccagacagtcatcacggtcatcagagccattgttacatagctgaagatgtgcatatccgcgatagcggcggtctccggaacgataacgggctcgagaagtatcgttatgacgcaaagcatctgtgtgacggtcttgaccttgccgagccaagcggcggcgacgaccacgtgcgcattgctcgcgacgatcattctcatagacgttaccgcgagctcacggaagatgacgatcagcgcgacccagagaaacaccgggcggatatactcatacttatagagtatcacgagcatggcgccgaagatcatgaacttgtccgccagcgggtcgatgaacttaccgaagtcggtgatcatattgcactttctcgcgatcatcccgtcgagcatatcggtgagcgccgtcaggatgaatatcgccgttccgataatccgcgaccagacgtccggcatgacgctctccgggagcgctatcacgatcatgaagaccgggaccatgattactctcgcgagcgagagcttattcggaagattcactgtcgtttcctcctttatatcttgtcgccgacgaggtcatagtcgaccgcctcggtgatcttcactcttaccatctcgccgtcccgaacgctgtttttcggcgccttgaaatagacctttccgtctatctccggcgcgtcattctcactgcgtccgaaatacgcctcggacacaggatcatatccctcgcagaggacatccatcaccgaacctatgcgcttctcgttgagctctgcgctgatgcggttctgctcgtccatgataatgtcgcagcggtcctgctttacctgctcgtcgatctgatccgggaaatcatacgcgggagtcccctcctcgcgggaataggtgaacgcgccgagcctgtcgaacttcgcttccttcacatactcgcagagttcgttaaactcctcctcggtctcacccgggaagccgactatgacggtagttctgattatcacaccaggaatgctgtcgcggagcttcttcacgacctcgcgcaccaatctgccgtctccgcgccggttcatgcgcctgaggatatcgtccgatatatgctgtatcgggaggtcgatatacttgagcacgcgcggattatcccggatcgtcgcgatgagctcgtccgtgatcttgtccggatagcagtacattatgcgtatccacgggatagtggtctccttcgtgatacggtcgagcagctccggcagtttgtactcaccgtaaagatccgagccgtaacgggtggtgtcctgcgctattacgcacagctccttcacgccgagcttctcgagatttttcgcctcctcgacaagctcatccatcgggcggcttcggaaatgcccgcgtatcgacggtatcgcgcaataggtgcagcgattgtcgcagccctccgcgacctttaagtacgcgtaatattccggcgtcgtgatgatgcgctcaccgccgagcctcaccgtctccttgtcctcatacgaggaatagcgcttgcccttcgcggcttccttgaccgccttgactatgttgtgtatgcttccgactccgagaacggcgtcgacctccgggagctcatcgaatatggtgtcgcggtagcgctccgcgagacatccggtcacgacaatgcccttgagcgaccggttcttcttgagccagcctatgtcgattatgttgtcgatcgactcctgcttcgcgctctcgataaacgcgcaggtattgacgacgacgacgtccgcctcgaaatcctcgctcacgatctcgattccctcatcatacagctcgcggagcatgacctccgtatcgagctgattcttcgggcagccgagcgagacgaagaagacctttatcttatccttcattactgtaaaatcttccttaaaaaataattattcgttttcgttgttttcttctataaggtcagcaatggcgtccttcgtgtccgaaaagccgtatccctgacgcatcatcgcggcgtagagcttctgtctgtatttcatgtcgtcaagctttgatatgtcgcacttgcggcgcagcacgtacatcagctgctcgtagaaatcaatcccgtcaagcagctcagacagtctctccgagacaacgtctcttgaaaagccgtgacgcatgacttcctgacgtattctcgacggaccgtaatgcttcttttcagcgagcgacgtgacaaaccgttcaagctgatccgcctcgtcgatgccgccctcttttactatataagcggcggcgtcctcggctacatactgatcaaacccgcgctcgcggagctttccgacgagccgtctctcggtattgtcgccgtaggacagaaggtcatagcccttcttgaccgcctcccacagcttctcgtcatactcgagaatatcgaactgctcacgcgtcagcttgtacgggagcacattcacgccgatatttccgatctcaaacagcatcttcgccgacacggtgagccgccttgtctcgcggcggagtgtcatgaccgacgggtcgtccccggatgggatctccctctcgatatttatctcaagctccgcttcctcgcccatgcgcttcggcgtcagcgcggcgatataaatgagcagaccgcccattatgaccatgcctttcgtacaaacttacagttttgaggcggttttgaaaaccggctt

SEQ ID NO: 3069 - DNA, 2333 bp, Unknown
  16S sequences of unknown bacteria
ttgctgaccacgccgtcgcccgcggccttgatgcagacctcagagtccagcgcgcacttgtgctccagaccggtcgcgacgatgggcgcttccgtcaccatcagcgggacggcctggcgctgcatgttcgcacccatcagggcacggtttgcgtcgtcgttctgcaggaaggggatgaacgccgttgcgacggaggtcatcatcttcggggagacgtcggtaaagtcgatcatctcacggtcgacagagatgatctcgtctctgtggcggcaggtcacacgggcgttggccaagcagccgttttcatccagcggctccgaggcctgggcgacatagtaatcgtcctcgacgtccgccgtcatgtagacgacctcgtccgtcacgcggccggtggccttgtccaccttgcggtagggcgcttccacgaagccgtattcattgattcgggcgaaggacgccaggtagttgatcaggccgatgttcggaccttccggcgtctcgatggggcacatacggccatagtggctgtagtggacatcgcggacatcaaaggaggcgcgctcccgggacaggccgccgggacccagcgcggaaagacggcgcttgtgggtcaactcggccaaggggttgttctggtccataaactgcgacagcggggaggaaccgaagaattccttgatgaccgccgtcaccgggcggatattgatcaggctctggggcgtgatcgtctccgtatcctgcaccgtcatccgctcacggatgacgcgctcgaggcgggtaaagccgacgcggaactggttctgcagcagctcgcccacgcagcgcaggcggcggttgccgaggtggtcaatgtcatccgtcgtgcccaggccgtagacgacgcagttgagatagttgattgaagcgaggatatcgtcccgggtgatgtgcttgggcagcagatcctcccggtattcctcgatggctgctttccagccaccgggctcgacggtatccagcagctgcttcagggcagcgaagcagaccttctcccggatgccgtattccgccgggtcaaagtccacaaaattggccatatcgaccatcccgttggaaaagaccttgacgcgggtgccgttcacctccacgatcgcttcgttgacgccgcgcgcagagatctcatgtgccttttcccgggaaatgacatcgccgggcatggccaggatctcgcccgtcatcgggtccgccaccggctctgccagcagctggccgcacaggcgggaccagatgtccatcttcttgttgaatttataacggccgaccttcgagacgtcgtagcggcgggcatcgaagaacagggcttccagatagctctcggcgttttccaccgtgggcggttcgcccgggcgcaggcggcgataaatctccagcagggattcctcacggctgtggcaggtgtccttctccagggtcgccaggatgcggggatcttccccgaagaggtccttaatggcggcgtccgtcgttacgcccagggcgcgaatcaggcaggtgatgggcagcttgcggtttttatcaatgcggacatagaagacatcctgcgtgtccgtctcgtattccagccaagcgccgcggtaggggatgaccgtcgcggtgtaggtgtgctggtcggccttatcgacctcgtggccgtagtacatgccggggctgcggacaatctgggagacgatcacgcgctccgcgccgttaatgacaaaggtgcccccttgggtcatcagcgggaaatcgcccatgaatatctcctgctccttgatctcgcccgtctctttgttcagcagacggacccggaccttgatgggcttggcatacgtcgcgtcgcgctctttgcactcttcgacggtgtacttcgccttgtcctccatggtgtagtccaggaaggagagctccagattgccggtgtagtcggtgatcgccgctacatcctggaatacctcctgcaggccttctttcaggaaccagttgtaggagttgcgctggatctccagcaggttgggcatgtcgataatctcctcgtactttgcataactgcgccgcagagttttaccgaacttgacttccttcgttaacgccattataaatcatcacagcctttcttttgttctgtgttgtagcgccacacagtagatacgcacggttgcgttgtagcttttttgttcttccacttgacccttcctgcgggatgtggtattctaatgctagaatctcatagtgggccagtttggcgcactcccgcagtatggaagcttattctaccatattttgcgcgcggcgtcaactgtttttgtgcggtttgc

SEQ ID NO: 3070 - DNA, 32759 bp, Unknown
  16S sequences of unknown bacteria
aataggatatcaaacacccgaacaatacgaaaaaaatcatacattcaacactcaactaaataacaaaaatattctccaagttttacattgactaaaaggggggcactacatatcctgtatcctccaatttaatgccttccgaggagcattgctcttttttatttctcattacttccctttgggttagtatattacaaatttgtgcgtactttacaaataaacatagtagtgctaccatattgagcataatcatacaagtactttaataacatattaggaataattcatgagagcaaaaattgaagagtataaagctgtagaggatgcggctatgaaatttgtcaaaagcgttgccgaaggaaatagcagctatgctaaggaattatttatagacgaggctgttttattcggctaccttgacggaaaactcgagcatggcaacatcgaacaattctatcacaatgttgatactgtgagcgcgggcgatactttcaaggcacgcattgatattgtcgatatcgaagaaactctggcggttgtgcgcgttctcgaagagaaatggggcggcagaattgactttacggactatctgcttctcatcaaaatagacggtgaatggaaatgcgtagcaaaagcttataatcaaaattcaaatacaataaaaaaataggactaaattatgaaaataaccgttatcacaggcagcccgagaaaaaatggaaatagttttgcaatgactaaggcctttatcgacgaggcggagcgcctcggacatacggtaaagcgctttgacgccgcgtttatgaatattggcggctgccatgcatgccaaacttgctataagactggcaaggcatgctcattcgacgacgatttcaatatcatcgcaccccatattcttgaagccgacgccgtcgtctttacaatgcccacatactggtactctatcccggcgcagataaaaggcgtaatcgaccgaatgttctcgttcgttgtgggcggcaagaaaattgaagggaaaaaatgcggagttattgcctgctgcgaggaaaatgatgtttccgtaatggacggcattcgtatgcccatagaaaggtctgcatctttgctaaaatgggaagtttttggcgaagtgctgttgcccggcgttcttgaaattggcgacataaacaaaacggacggatgtaagcaggcagaagaacttgctcacaaattgtaggctctaatgaaagtattattgattaacggaagcccaaacaaggaagggggcatctacaccgccttgaaggaagttgaatctactctaaacgccggcggaattgagacggagattctatatttgggtaaaaagccaattgccggctgtattgcctgcggggtttgtatgcggactggcttttgctttcgcgacgacatagtgcgcgatattcaaaaacgtcttgatgaatttgacgggttggttattggttcgcctgtatattatagcgctcctacggggcagctcgtcgcatttctgaatagattgttttatgcgactgaaagccgcatggcggggaaggttggggctgctgttgtatcgtgccggcgcgggggagcctccgcaacatttgagcagctgaatcaatacttcactatttgcaatatgccgatagtttcgtcgcaatattggaattctgtgcatgggtttacgccttcagatgttcggaaagacaaggagggtttgcagacaatgaggactctcggtcagaatatggtatggctgttaaaatgcatagagagcggaagaaaaaacggaattgaaaagcccgtttatgagccgagggtacgcacccattttatcagagactaatttttaataaaaacgcactgcattgatatttcaaattccccatgatttgttttcacgcgctccattgcggcaggcttttcgtcccccaaaaataaataagctaaaatttaagcagagacagcgtggggttccaatgctttttttagtctgcatttagttgtgatagagtgcgaatatttttttctaaaatctatcgggagactaaaaatacataactatcgctatcgatatagcctcaataaaggagtattatgtattttatattgcaatgaaaaatattaagattttgtatttgtagcatgaaaagattatcattcatattactattttcatttatttctgcaattatgacttttggcgcgaacatcagtgaattgaagaataaagctgaacaaggcaatgctgaagcgcaatatagtcttggagtttgctatcgctgtggagatggagttgaaaaaaatttagaggaggctatcaaatggtataaaaaggctgctgagcaaggctatgccaaagcgcaatataatcttgccgtttgttacgacagcgaatacggagttgaaaaaaatgtagaggaagcagttaaatggtatcgaaaatccgctgagcaaggctatgccagagcacaacataatctgggaatttgctattataatggagacggggtaattcagaataatgtaaaagctcttgcatgggtttcagcggcatacgcaaatggagataatgaggcaacaaaagcaatgcgtgttatcaaacaaaaaatgacatctactcaaattgaacaagctcttaaattagctgaaaattatgctaatggaatttttgatgaaaacaaaaaaaagtaagtttcagcaaaacaggtagcggatttgttgttgtaatagataaaaatactgtcacaactcgctgtttaatagcgtatagttcaaagatcctatctgtaagaaacagcttgtaatatatggcaatggctgtggtggatgataaaaataacggcattgctatataagaaacttctttggtaacatcgccagtacctttaattgcgagcggaaaggctaaagttgtcaacagcctctattcaataggttttgccaatgtataattgcagattccccctgtataagactctgcacgataatgtaattttattaaatcatgaatatggtttgtttcccgcaaaatgcttatgttttcaaaatagtatgttttcatgtctaaaaaattatcaaaccatatatacgcctaaactttaactgccgtttggcgcaataacttggcggcaacattttgtgaaactgcaaaagttatataataagaatctattttgtttcccctattttctccacttccacaaattgccgcgtatttctgtcacaatcgtcctatttattatcgcaaggataagaacaacgatgaggaaaatcgcggttacaacagggtattttaatattttatcaacgcaccatagataggcttgtaaaaataacattagggcggtaaacaaataatcaaaaacaatattacccgtgtcggggaaatcctttatagtttccatgacttccataacattttcctctattttatacggttagacgctttcttagaatttcaagtttatcgcttaaaaaagttcccgagctcatataggcttatgacgctgatattgagtaccccaagatctttaataatagattccgatatttcggattttagcggcactatgagcgcgattttttttaactctaaattatccaacaggatttttagtgttgtgaatgttttctcgacatcgcgagtggcgttaaatttgcattcaagacctacctgtccatcttcaagaagaaagtcgcaaacgagcccgttttttatataattctttttatatcttacgccgcaatctttcaaaatgccttcgacttcttcattaaataatatagacctcgctttcatctctatatacttgaatgcgcgttcgcggttttcctgatacacgcgaatagggtctttcggcgcggatttgtcctccggcagcgacgaataattttcaaacgtttttatgagcgtctgttcgtcttcgcgcgaaagatttagcagtttcattatcttggagattgtcgcttgccgcggtttgaccttcccggtaattatttggcttagggctgtgggggataaatcgagctgttgtgcaaagtctttctgcgacattccagcatttataatgcgtgtctttaaaaatttccctaactcgttactcatattctttttttaaaaaaaagcatatttatttatgtaatcaagctgaatttttaaatttatttaagttctcctgctgaatatgcggcaatgtagcgagtcaatttaacgggaatttatttttcttatgtggtgtgggcatttgcaaatgaggatattttataatattgggatatatagtgtaaaaattgcccttgcgttttatttatgtgaaatataattatgttatcaatccagataagtacatctgaatattcatctaatccacgtccaaagaaaaataacttttttttgccatgatagtaaacgcaatccagaaatccaattccatctacatctataaagataaaggccctgttatggttcgcggcggctttcttataagctttaattctacaacctattcttacattgcgacaaaaacctcaaaagtcatcatcgtgtgcgacgaaaagggccatagaataaaaagttttaattccccaacttacataaaatcaggattgggttggtaagcgcacaatattttgcgaaaaaattaaaggggctactttatcagccttaatgccaattccacttttacgtaaaatagtccaattctcagtatcgcacgatataagccgctgttgatgcgcgcgaaatcgcgccaatttttaattatataattttttactctggcaaatatcttagctctttttgtaagcctttatacatcctgcgcttttttaagagaaaagcgattgccgcatttataaaatagttcttttgcctgcaatttatctgcaaactatatataaatttttttaaatggaggaatggattatttccgtttttgcgttctgacgctttcgttccaatacggcatattagtttattgcatttctatattttctcttcagccggattctaagtttgcggttttttatattgctggacaacgtgtcgataaagaccgaggcggacgctcccaaaactatggcgactaaaattgatgaagctattatcccgttcgacattacagccataaggtattcctcgcgcattttgctttcgccgttttccgagagaaactttattacgcttagaaatgtctcgtaggcatagattccgggaatcattggaagcaccgctggaaacgtgaatatttcggacgggcacccctctattctccccattaaaaatccaagtatgccgataaaaaatgcgctgacaagggtggctacaaaaatatttaccgaatattgcgccattagcaaaagcctcagtgaatgccctgcgcctgcaaatagtccggagaaaataagcaccttaaagggcggattgaatactatgccaaaccccattcctgctattgcggaaaaaatatagtctatgattattttcgttatcatataattgagtgccctatgataattatcgcaatcaaaaggccgaagcttatggacaatataagttctaccgcctttatcagtctggaaaatcccgcaagaatgtgcccctcgaacaggtctatgatagaatttaaaaggggaactcccggaatgagccataggacgcttgttgacagggcgatgtcagtattaagattgaacacaaccgccccgactcccggtatcagggctgatatgagcgcggcgcaaacaaaagacggattcattccaagcttctttttcagtagttcgcgccttagaacatagccaataaaagtccctaaaaatatcagcggcatgagaagcgcgtccccgccccaaagctggcataatgcagagttgccaatggagattgtcagcgcgggaactatccagctcctcttcttttcggccattatttccctaaacttcgtttcacattcgcggagggaatatccgttgctcaaagcttcccacgacaaaatcctcaattccgatagcctcgtaaaattcgggctgtccggcgatatctttctgaccgatgtgacagcctcgccagagtttgtcgtaagggtcatgattattgtttttggcaacattatcaaattggcctcgcagccgaaaagctctgaaagccgctggacattccttactatgcgggaagtctgcgtcccggaaatcatgagggcgtcggcaaaatcaaggagaaactttgatatcctttttaggttttccccgctatcaattttttttgccatggctttattatgaatttgatgatgctttaacctgtgggaagaacttcatttattcaagctcatattctttaaccgtaaattttaaggctcttttaattgggactcgccaatccgtcccaatgcgcatcaaaaaacttttttactgcgtttttttagtgggaaactctgcgcaaactttttaatagccttgaagtttatggtttattgacggaacggagcggagacggtatgccgcaaacttttagcaactccatattacatctaaacggaacttttttacagttgcctaacttcacatgctcttgcgccataaaatatttttatccccgcctccgcgcatagcgcgcatgtcgagcacccgctggttggatgacccgcagaagggcagggaaatgtctcttagcgactccacatactctccgtcaacgagcacgtcgattgaatcgagtatttcgtctgtggcttcgcaatgcgcccgccctccttttagaaggtcgctttcgtaagtgtagcccgtatatgcccagatgtttttgccgtccattgccgcaacgcgttttaccaaggagagcagggctcgctggttgggcggttcaaacggctcgccgccaagaagcgaaagcccgcttacgtacgggcattccacaagttttgcgatttccagttctatggattccgtgtacgggcttccgtaattgaaatcccatgcgggggaattaaagcagcctttgcagcggtgcgtgcagccggaaacaaacaaagacacccttatgccttcgccgtttgcaatatccaaaggttttatcgccgcgtagttcatctttccaaaaagttaaaggtggagaacgcgctcgcggatttcctgggtgcgcccttggttccaatactgcgtgcctatgtatccgcatgtgcggcgggctacattcatcttattctggtctttgttgccgcattttgggcactgccagacgagtttgccgtcttcgtcctttacaatttctatctctccgtcgaagccgcatacttggcaatagtcgctttttgtattgagttcggcgtacattatattgtcgtatatatatcgcattacaagaagcaccgcgggaatattgttttgcatgtttggaacttcgacatagcttattgcgcctcccggggagagcgtctgaaactttgcttcaagcgaaagctttgcgaaggcgtctatcggctcggcgacatggacgtggtagctgtttgtgatgtaatttctgtcgctaaccccctcgacggccccaaagcggcgttgcagggctttcgcaaatttgtaggttgtgctttcgagcggcgttccgtacagggagtagtctatgttctcggccgctttccattttgccgtgtacgaattgagccttctcattatttcaagccccaattcctctccctctttctcggttagttttttatttatcaggctaaatacgcactcccacagcccggcatagcccaaggaaagcgtcgaatagcctccgtgcagatacttgtctatcttttctcccttttttaggcgcagaagcgcgccgtgttgccagagaatcggggcggcgtccgacaaggttccgcttagccgctcgtgcctgcattgcaatgccctgtggcaaagttccatgcgctcgtcaaatatcttccaaaatgcctcgatgtccccgtgcgccgaaagccctatatccggtagattgacagtcacaaccccctggttaaatctgccgtaatacttgggtttgccgtcttcgccgacgtagggcgtcagaaagctcctgcaccccatgcaagtatagcagtgggcgtcgccgttcttgtcgattttgttggcaagcattattttttcggaaatgtagtcaggtaccattcgcttggcagtgcattttgcggcgagttccgtcaaatagtagtaggggctctcgggctctatattgtcttcttccagaacataaattaattttgggaaggcgggcgttatgtaggtgccggattcgtttttgactcccttgaagcgctgtttcaaaacctcctctattattattgcaaggtcggacttttcgcgctcgttgcgcgcctcacccagatacatgaatactgtcacaaatggagcttgtccattggttgtcatgagggtgacgacttggtattgaattgtctgcactccgcgttcgatttcttcgcgcacgcgcttttctacgattctttcaaggcttttttcggacagcccaaattcgccaagttcttcgataagctccgtgcgtatgcggcgccgcgaaacatcgacaaacggcgccaagtgcgtgagtgttatgctttggccgccgtattggttgctcgcaacttgggctattatttgagtcgctatattgcaggctgtcgaaaagcttcttggcctgtctatcatcgttcctgatattaccgtcccgttttgcagcatatcttcaaggtttaccaagtcgcagttgtgcatgtgctgcgcgtaatagtccatatcgtggaagtggattatgccttcgttgtgggcgtcgataatttcgcgcgggagcagaattctggaagcgatgtcttttgaaacttctcccgccatgtagtcgcgctggacgctgtttacggtggggtttttattggagttttcctgctttatgtcttcgttgttgcattcgattagcgtcagaatttgtttatccgtgctatttgcctgcctaacgaggctgcgcacgtatctatacgtaatatatttttttgccacctcgaaggctcccgccttcataatttgcgtttcaactatatcttggatttcctcgacggaaagcgccctgtcgagcgcagcgcacacgccctctacgtatttgccgattgcctgaatttgctcgacagttaacgtgttttttaaatccaccgtctggttggcctttgtgacggcggcgataattttgttgatgtcgaagacggcttccgcgccgcttctttttaaaattttcataaaatccttctttcttttgcgataaattagggccgcggtatttccgcaaagccacttttttaactcccatggctcgtcgcgcgggtcggttttaaacgccgattgctttggcgagcctgtcaggttttagtagcgctttgccaacggttgcccttaaaaacaaaacgctagtcccatatggaacattgcctgcatttttgcgcgggaactaaactcttaattgagtcgggatttaatattccagcatttgcccgatagctttcctcaaaaaaataatcaggcgcagtgccgtccgataattgcaatcataagcctgctctcggttttaagcgtcaagctcccagccgctttacagccgcgcgggcgcgcataactgttcgtatatttctttggaaatagttgtgcgcatggcggctaaaactgtaaaattggcgcattcaaagccgcattcccaatcactttggcgctcttttaattcaaactctttcggataacccgcataggcgcacgattcgcccggccggaaattccgtaaaaaaggcattgccgccaatacaataaaatactttttcattttttccctttcgcgttgtctcgttgaaataagagccgcaaaggaaacgtaaactttggcgtgacatctgcggaccttattctggaacccgccaatatttgcagctttaacagtcagccataaaaagcgctgctaaaacacggcaatatttcgcgaatcccatgtcgtcgtttccgtttggacgtcttctggcttgtatccttaatcttcccgccttcccgatttaatcagtggcttatgggaggatttacggatcttacagcggcgcgtccgcgttcgaatttaacgaacttccgtttccaaacgaaatttactaaaaacgtgctcgaaattacccgtttgtcaagccgcaaaagttttttgttttatcgacccgctcttgcgctgcttcaatcggcaatttgctttataaaaaaatataaatctaaaaatgtagggcttgcggcaaaatgtttcgttcgcaagctccgcccccgccgcaaaatatcggattttttgcagaaaataatttttagccttcataagattgacattttattttgaaggcggacgtgcttgcggaataaattgaaaaaaatttcttttcggcaagatgcgccataaataatatcggcatattgcaccttcacgggcggttttcgtccgcataaaggtgcaatgcgccattcccacaaagaggcggaaatttatagcccccggatcattccaaaatagccgagccttggggcgcttccgcagccgctatgaaaagccataagtttcccgcttgcggcaatactcgcttgcggcagtggctgtgtctatgattcaagcagcttggcgtcgtcaatattgtcttttagtgcagttccgcctattccgagccttagcgactctcccaaaagcagcgccaatttccgcgcagcaattttcggaggcattccctgcattcgtatattggatatgcaattcctgtcggattctaccgattcccagcgcggcttgtatgtaaaatacgcgctcaggctgtcgggcgaccccaatccaggcctctctcctatcagaaccaacgagtgccttaccccaagaatctgcccgatgtagtcttgtatttttactctcgcaaacggaattatcattatgggggaaatcttccatttgtcggccggtagctgctttacaagctcggagactgtttcaagcgcgttctcgtttgcggctgtcgcggacaatccgtcggacactattagcgcaaagttgacgccatcccaagtctttgccgcttcgcagaggcgctttttcgactcctcgttcaattctttgccgccctctgcgttgcctacttagagcaagtattgttttttgtgctctacttccgagaggcctccctgttttgccgccctccgcgttacctacttagcggggggcttttgctgttgaaaaaaatcaattcaaccctcgcaattttttaatgcttgcggctggcgcgtcaccaatttttagcaatagtggcgttcttgacagtcacatttgacatctgaaaaatctgctaaatgctgtttgatgggactcaaaaaacttataaaaaatcccgaatatttttttaatggctatcgcctataaaacctaaactctatccatgagaaaaatggttagattaccccgcccaaacagttttttattctcagcgcaaatttttaaatgccgaaacagaaaaagattaaaaatccacttcgagtaggtttgagagtgacaacagcagataaaaatcaaaaaaaacaccccgagtattttcctctgagtgtttttaatggataataagaactccgccgaagatttatagtcggcagatttttattttgcaaagtacgggagaagcgccatcgagaagtcggaaaccgccttttgcaatgttgcagaggcattttcaagcctttccgcaatctcagggttgtcttttgcgtaggtttcaagcgcctttttgagggcctgtttgtcgtcgagctttatctccttaaatattttcccgagctcgtcgaggtgggttttcatactgtccacaaacgccttgaatttttctccaacttcggcggggcaggtagagatgtcaaatttggagattttttcaacagccccctttaaatcggctatgcttgaattttccccgatgttgtcgaaagccgactccaattctttcatcagccgcattaccgactgcttttccgaggatgtagcgccttttgccgcctgcagcttttccattgccgcttggccaatttccctcatttgctgcgatagttggcgctgttgtttcaaaagggtgtcgcggttggcctcttgctccttaatttgctccgagagctcagcctttttcttcagcagggcgttcttatcgagtatctgcgagtatgcgcatgtgacccctgcaaatagcagtgaaaatattatcgctttttttaagactgtgcgggctgtatttttgatttccataaatatccttccgaataaaatccgattacactaacaaattccctcctaattgaataggcgccgctaaaaaataaaagcgcgttccccattggattcaaaccactattttttaaatgatgtccaacgtcctaacccatgcaaggcgggaagttgcgcttttaaattgccggaaaattttccgacaaacaattcccattatttccgtatatacaaaaatcccgcatttttttgtcaagaactttccctgaccggcaatattgctgtctatcaagcaaaaattttaaaaaaaaggttttatttacttgaacctaaacccccaatttatttgaaataatccgtatggaaaaacgggcactaatttcagtaagcgataaaacgggagtcgttgaatttgcgagagaactcgttcgcaaacacggctatacaatcctgtccacgggcgggacggcaaagcttcttgcaaaggagggaatccccgtgacggaagtatccgactacaccggatttcccgaaatgatggacggccgcgtaaagaccctccacccgaaaatccacggaggcctcctctgccttcgctcgaatcccgcgcacatgcagcaggcgcaagagcatggaattggcatgatagacctcgtcgcggtaaatctctatccatttgaatcgacagtttcaaaaccggattgcacaatcgccgacgcaatcgaaaatatagatatcggcggcccttcaatgctgcgctccgccgcaaaaaaccatgcgagcgtgacggtagtctgcgacagctccgactacccaagagtcctcgaagcgctccgcgccggcggcgaacagcttcagaaattgcgcaggcagctcgcgctaaaagtatatcaacgcacaagctcgtacgacgcagccattgcaaactacctgaatgctaaatttaataacggcgaacttccctcgactctaaatataggtctccccctcgagcaaaagatgcgctacggggaaaatccgcaccagtccgcagccctatatggcgagtttaataaaatcttcaggcagctccaaggcaaggagctctcttacaacaacattatcgacatatcggccgcggctgagctcattgccgaatttgaaaagccgacagtcgcaatcctaaaacatacaaacccgtgcggagtcgcttcgtgcgacaatctcgtgcaggcttgggagcaggcgtttgaaaccgacagacaagccccgttcggcggaataatcgccgtaaacagaagaatggaagcggaactcgccgagataatctcgcacatattctgcgaagtaattattgcgcccgacttctccgacggcgcgattgaaatattctcgaagaaaaagaatttgcgcctgatgctctggaattgcaaaaaggtcggcggactgcgcgtaaagagcgtggtaggagggttgctcgcacaaactcccgacgatatcgaggagctgaaagccaatatgagagttgtgacaaagcgccagcccacggaagaagaatggaaggcgttgctgtttggctggaaagtcgtcaagcacgtcaagagcaatgcgattgtctatgcggggtgcgaacgcacgctcggaataggcgcgggccagatgtcgcgcgtggacagctcgagaatagcggtatggaaggcgggcgaagccaagctctcgctcaggccgagcattgtggcgtccgacgctttcttcccgtttgccgacggattgctcgcggccgccgaagcgggcgcgaccgctgctatccagccgggcggctcagtccgcgacagcgaagtaattgcggctgctgacgcaaataatatggcaatggtgttcacgggggttcgccacttccgccactaattattttacgacgatgggtgtggagtatcgcaggctgtccgacagggcaaagataacgcttacaatgctgtttgcggcgcttgcgtgtctctatatcctatccgccggcggttgcgatttcggaagcggcgaagtcgtaaaggaaacttccgagcccaactttctcagaggacaggaggagttgagaaggggaaatatatccgaggccctcagcgcattcttgaaagtttccgagaagcgccgcgacgctccggaatcgcactttgaattggggcgcatatacctcgaacatatggacgaccccaataccgccatttaccacttcaaaaaatatctcgaattaaagccaaattcgcaatcttcgccgatggtgaggcagatgattgaaacggcgcaaaagaaatttgcggaaaaattgccggagagcccatatgaaaacaatgtaaggcgcattgagcttgaagagatattgcaaaaattgcagaaggagaatctcgaattaaaacaaaaacttgctgcggctgccgctacaatagatcgtttggaggcaacgcaaacagttcgtgtccagagccagacgcaggttgcctcatcaggccggcaaagtgcgggaaatgccgcgcagcgcgttggacaggtgcgcgcaacttcagctgagcagagggcgccggtggtcagccgcgacgtgccgtcaacatacacggttcaagcgggcgatacgctgtcgagcataagcagaaaaatctatggtactccgaacaagtggcgcgaaatattttccgcaaaccgcgacaggctcgcaacagcatcttccctcaaaccagggcaggttttaaaaatcccgcgcaagtagtgctcgcttttgagtgcgagcgtttaacgtgggtacggataattttatagcttcgtaatatgttgaatattccgcagtgtggggaaagcgggtgtttcgcgcagattgtgcgcgttttttcagtaacgcaatatttgcaaagcaaatgtcgtcattatcaatggagaaggcgtaagatagttggagcaagggaatattgcggttaaaaatttgacatctataaaggcgggtagttagctcgcgacacgcatgaggggagaaatatgcgggcctgttatatataaataatagtttattttacattgacaattctttaaatccacttagggaaattatatatgaaaaataaattattttctatatttgctccgttcgtactttcgattacttgtgcttatggggttgatacattcttttttatcgcaggcgacgggggaacaaataatgccaacgacagaagccagtgggtaaacctttccacttacaactcaagcggagatactttcttatttcaacttttcccggtaggcacggacgaaagagtttcactcgacaagggaaattatcgcgccggtgcaataaatgccgtccagtcctcagttataacggcggaatctaacgtgattttcaaccgctattgtttgggcgatttgcagcctgatggttcagtcacttttaacgatgcaaatataaaaaatccggatcccattgtatttaacggggattttactgtaaataatatatttgcgcgtataaaccattacgttgacttccagtttgccgacgcagaaagcattactttgacggcaaaagaaataaatttaaattctataaccaacgcccattttacaaaaacgacggcaggcgaggtaaatatccatgttgacggcaggtttctatgggtcggcggaaacaacttatatttgggttcgtccaccggttttattgacagcttttatgcggatgcaattgatgtgatgggaaatcctaagacgttgcttttcgacttttatgtaaacaaaatagactgtgcatctacttcttttgtaagcgataacggcacgatatctgccaccgtaaacctgcacattaataaactcaacgcggatggaccaattttctattttggtacaacgaccaagcttaaggataacgttataaatatagatttctcctctgcagacgtcgaaggtttggacgcgggagaatataaaatactgtgtgttgattcttcgtggtcggaaggttttgccgaaggaggatcgcttacagattttaatataaacgacgatctcctaaacgcaatgggtatagagcacaactttacatgggacggcgagaatctcgtgctaaatgttgttcccgagcccgctgatgtagctgcgtttttgggatttgccgtcttggcgtttgcctttataaggcgtagaaaataatttggtatgtaatattatttcttggcgcagggaaataatctctgcgctttttagtagttaaacgtaactggaatgaaataataattagatatttatcttttaaaatgtattgacattcatatggttttggcattatataaatataaattatttatgccgtatgtacaaactatctagcgttaaattcttaattgcgcttgccgcagtgtgcccagctgttctaaacgcacaagaacagccaacctatacagacttatactacaataaagacctcaacacgaccggctggtctgcggaccgctatatgcaaaatcccgcggcttggaatgtgggctcaccggacggagaggttttttacggagttgtgaactcgccgaataataatctctatataaattccgacgcaattaccaaggacgagtgccttgtatttggttacgatgctaatacgtggaatatacataattatacggcgaatataacaatactgaatagccgatatagtgttcttctggttgcggcggaacataagttaaatgtcggcggcgacatgaacataacagtaaatagccagggaggttggtggtctccggatgtgagaatttatatggaagggggaactacaacttctatatccatagagggagatttcaggctcgtcaattcaacgccatcgccatcggaagacgcccctggatttggagcgaccggcttgaaattttttataggcaatacgaataccttggggggaagttttgaagtaaaagggaatgttttactggaagacttgtacaccagccctgactggaaaacgaatgacttgataacattcgcgactttttctcccgtatttaaggtcggcggatatgtcgatatgactgaaaataggtcaggaaccagaatctgggatatgttgacgaataccaatatggaatatgcggtttccgatatttcaataggcggtttgaaaggcagtggcgctttgcagacgatgtacggtctcaacggaatggttaatttaaaatttacaaattccgaagcgtttacgtataccggtacatacgcttcgagggttgattccgacaatacttttaatgtgataatggatgccgccgacgcgcaaaacggcaggcagtcactatatataaaagaaggcgggcatgcagagtacgacgatggaattgtggccgaagccgccgcaatttcctctgtgactgtcaagaacggcacgcttgattttgcgacgtatgatggaatggtgaacggcaacttggagatttccggaaccggcggaaggcttgaaatatcgtcgttgacagcgggcgatactggaaagttggcgtttgagacggcgacattcgaccgcggaacgatagaatttaccattacaaaattatccgcagataaaatagaaatcagcggtgcgctgacgaaatctgggcttggggaaataaatgtcgaatttgacgtcgacacctatgacatacgcgaatggatacttgcgagcggcggagattcgatagagtacgaattgataacttttggaagcacgaatatgaaagaatcggactttatagccgaagatttgggcgacggaatatttgcaaacctgtttataagggacaatgcacttgtggcggagtttacaaccgttcccgaacccgcgcatattgcggcggttttagcagctgccgccttcgcgcttgccgccgtgcgccgacgcaagagataagatattttgctatgttggtttagtagcgccgcagaatatcgcgtagagtgcaaaggcagaacgcgcgaaactttcgactatttcttgaaatcaaaaaaaagcccgcgtaataaagcgcgggctttcctattttcccttttttaagttttttatttattcagtatattgctgacccaaaaaaacggcattggcaattttgcgttgattcccaaacagagacgcagcggaaaatctttgcgcgcgctcgcttcgtgaaagcgcgttttgcatttatttatttttacaaattagggctgtttccgcctgactctgcgggattcggttcgccttcaatttcgggctccaattcggactcgtcgaatacgggggtgattgtggcgctagccgaataagaggcgcttacgccttccggagcttcggtaatgcttttgctcaccaacaagaaaatatcggttgtctttccgaatatcgttatcggaactgtccccgccaaatcgagcaaatggtcgggcccgtaaagggaatggctcgacaataaaacaagctcttcaccaaagtatatgtcgagagggaaggcgaacattctgtcggcgtagtcatctgagggattttcttgcggcagcattatggggtattcaagagtgaatccgtaatgaggtgtgtattggtcgcgctccatggtgagtatggaaagcgggggagctgtgcagcggcggtagggctcgcgggcggcgatgctgtccgcagacgggtggaggtcgttataatgggcttttatattcagggggtcgccatattctgtcgcataattcacagtcaggctcatatcgaggtcgagactttttagagaccaaaatattcttactgcttccgcgagcgtaaacggtccgagcgaaacctgttcttcgggtaattgcctctctatggggggagtcgggaatggtgacggatatataaatcttttcatgtctattccacttcctcggggtcggtcataagcgcgttagcttttgcaaggcgcgcgttttttgtgacgtatatctcgcgcatctttgcagtgtttcccttttttatagattcgctgtcgagctctattgaaccctgctcgtcttgggtgactacaaactttaaataggaagtgtcgccctggccgccgtcgttttcggaattaactcctgaaaaataaaccctgctcgacgccgatatcccgccgctttttgcgttgctcgaatacggaacgactcttggcctgccgattctgaacatttccgcaatcctgtcaggataaaggtgggttggtgggccgaattttactgtgagggtattgtcggagagattttcgcttgccgaatacacgggggaattcattgaaagccattcgctatttcctcctgagaggcagatttttgccgcggcgaagtctgccgcgtcgccgccaaatatttcgacggcgccttcgtattgcggagcggaggaggcgtcgtagattgcttttgcaagtccgcttgggacgggttcggcgtattgggaggccgaacgcacggcgtatgtaccggttgatgcgtttgtcgtcacaaatctcactcctatatttttcttaaccacggagccgtcggcgtctgtgtattttacaactgcgtcaacgcgctcccgcgccgccgaaaagttcattgacgggtggatagtccccgacgcaaggaatcgcggaagttttaggctgccttcctctctttccgatgaaagcacttcgagatcttccgcctccgacaatgccggaattctattgcgccaccattgcggggtgtttagttgaatcgactggcactctatttcgtatatttggcatgagcctttatatcccgccaactccacgctcattacaactgcgtttttgccgccgtattccgaatttggcgggtagttgtcttcggtgacggtaagccatgagttgtcgccgtcggaatgttcgctctcgtactttatggagactgatgaaacttggagatcggggcgcgggccaactttcacgctttttacgtttccagatgaaatatcaaccgtttgcgtagcgaggtttccgcgcggcagaactgagagctctggaaaccctggggctgaatagtcaaagtaaacgcccgtgtcgggcatccattttaaaatgcgcgataccgcctctgcgcacgacaaatctttggcttcgtcaagggggatatctgcggcggcgacaatattgccaatggaaaattccgcgccttttgaaatggcatagttaaaaatgtcgtagagttgtgtggcggcgtcgattttgttggattgggaatcctgcccgagaacgattttgctcctcacacagtcttcgagcaatacggcgccggagctattttggcgggcggccttccacgtttgttgatatactatgctttcaaggtcgaaccacggccctttcgcggtcattgaaacagagtcgtcatcgccgccgagagtggtgtcgagccgcacaatgcgccccctaaatttccggattccgtccgagtatatttctattgtttcgccggtcgaaaaagggtttgcgcctgcgggatctgtgaactttgcgcggaattcgtcggtggccgacttcttgcggataattaccgcctcagaaagcgacagattttcaagtggaatatccgctccgctatgcctgacaattatttgcatatcttacattccggattttagattttcaagctgcgacgatatttccgatattgtagattcaatgctggaaatgcttctttcgagcgagtcgagctgcttgcgtatttcttcgagagccgcgtccacggcgttttcgatgtcttcgttattcatagtttgcctttcttgccttaaattcgtatcttgagtttgtcacggagccgtccacggaaatccgtatttccgacagaacgcattgcggaagagaaatttttttgttttcgccagtctcgaaattcaggtccgccggtagcagagcctgtattttttccgcatgcgatagcgcgaataattccgccgcagccggtgttttatgcgcacgctcaatctcgaaactcgcggtaattgcggagttcccgcggtcgaatacgagcgctttttccgcattgattgcggactctgttttagtggagcgttttgtcctgacgaggaggtttttcggctcctcccctccgggatttagcgcggtttgtgagacgcttattttcattgcagtaccgattgcacgcgaaagcgtattgtgattttatccgattgcgattcgctttcctctttccatggggaactttcggatagggcgattcttccatatccgcattcaagcggggcgttggcgccgtgcagggcgcgggaaacgatttcgcaggcggtgagcagcgagggcgcattcggggcggcgaacttagagcggattgtctccactctcaattcaacatccgaaaacgtcgggcctgcggcgtattttgaggcggacaaggggattggcctgagcactttaatttcgaggccctccgccgaaccttccgcgtcggaaaaatcgttttggacgcgcacgcatgcgaatttcaagtcgtttatagcgcttagaatctcgcatacggcattttgaagtctttcgagcgttcccatattaaagcccccttgtagaacgccttgtagcgattcgcgcggcggcgccgaagtgggcgcccttttttggaaggccggtcctgatgcctacgagcggctctcctatcggaagctcacctcgcgcaacccgcgcgagcgtctcccgcgcgatgtctgcaagtttgcattggcgctcggttagctccatttgcggcaggcgcgtttggagggcttcggcggcgagcctcagggcgcattctttgagttctggggggattctcgaatggtcggggtcgattgagtttagcccggaggcggcgatttccgcgcgtattcggacaactatcgagtctataatttcggcggcgggctctcttcccggagtttttagcgactgcgccttcaatatgtcgagctgcggcttgtttagtacgcattcgaggtcggatggtgttatgttaatccagtccataagtacatgagtgcgggaggcggacgcatccgtctcccgcgattttattacgctcctttctggacagagagtttgcgaacgccaagcgagcttgtggcgactatgctcgaatagtgttcgactgtgatgtcggtgtacttagcgtgttcgtcgcagtaaaccctgaaagcgccgccttcttccgtgggcgtatagaagcgcttgaggtttgaaggctcgtcttttgacagcgagttttgcgcgaagaacgcgaatacggagtctccgagaatcttgcttttttcggacggcgccgactggtatcgggaggacaatacctcgcacgcgtcgagcataaatttgcccgcaagttcctctttcgccattgccgcgcccttgaatgcgaccgcgctgttttgcgattcgagggacgtcatgcgcaagtcccatgcgctttcgccgaaaagcaggcggtttgggcgcactccgctttcgtcggcggcttgcattagcatttcccttatgtcggcgtcggggttggattgggtattccaggtcttagtttcagcggatgccgccgcgattgtgtctattgcggcaaccgcgcggcggagctcgtttctaaggagcctttgcagcagcatctggacgtatctttcctgccagtcgtcgccggcgacttcgtcgtggtcaacgcgtattgtaaggcctttgtttattgtcttttcgtttacggattctcctgagtagcttacgcgcttaaattcggcgccaattgcgcggacgtcgtcgctttccgaatagaacgcctgcgcgttgtcgcttctcttgaattcaaaccttctgccgaccgcgatgggaggggcgatgaagtcgagaattttagcggtgttttcggggtcgttccatccgacagtgaatgcggtaagagcttccgagtagttgcccgcggagaatctgttttcgtttgcggatataatttctgacatatttttgccttagtttttgcgcagaatcatccacgctatttttgtttctgatgcagttccgtttgcgtcgagcgtgaatgtgattccgctttccgacgctgcggcagacacggacttagccgagccaccggcggaggtgatagaggcgaacacgacatcgtccgaagtgagctcggcggattgtagcgtttctgtcgcagaagcgccggtccaagcgtatatgccgcacgagtacacttgccatgcgcgctctccgaagccctgagggtctatctccacggggcagccggaggccgcggaacacagtgcgacgcctaccttgtatgagccgtcggcggccaccggagagacttttccaccggcggaggtatatagggagtcgcccgcagataccgaagcggcagtcttgcagacgaaggtgctttcggcgcatccgggcagggcgacgctcataatatctcctgcggaaccttcgtcgaggcaaacgccaataggtttttttgaggccgaggcgacggagaactctccctcgatttctcccgctgcgacgagcagattttgcgagtcgatcggttcggaagccttcatcgtcaccgagcccgcgtgcgtgccttcggctatgttgcagaaggcgtatttgcctattgccaatcgcctgaaagagcgaagggcaaaggcaatgttttcgtttattttcattttattccttttgtttaggggttgtgaaaacgtattgtttccgtatagcggaaaagcttttcagatatggctctccgagttccgccgagcgttttgaggcaagctcggcaagttctctgggggagattttgcgcgggcgggagtcttgaggggcgggggagtttgggcgcgaagcctttgcgagcctcatgcgcatctcgacaaccgccgcgcgcgacagatttttgagctcctttgcggatgcggcgcatttttcggagcgcgccgccgccgcatgcgcagctgctgcggctttttttatctcctctatctttgcactgcttcgcgctttggttgccgcatcttcgcgggacttaacgattcttccgctgtccgggatatttgggttgtttgtaaggcccgcagatatgagttttaccggcctgaattttccgtccggaagcttctccatccgccagcgcggcgacatagatttaagcttgccttcggagatttttctaaaagcttcgtcggagtatttggcttccacggcgattccgtcgccgagcccgaatatgcgcgatatttttccaaccggaacggcttttgagcgcggagattcgtcagggtggccgataaagattgggattccgcagccaacgagagttgaaaacctcgcggctcttttcattttttcgagcgatctttcatcgacgagctgcattccgagtttatggggccattcgccgtaggggctgagaatctgaacgatggatttttcaaatttcattttttttcgggtcgtcttgcgattgtgtggcttgggtttccgaatgggtttcagagagtggaaaagcgaattgccgcgcgagttcgagcgggtcgggctttaagccgattgcgcagagcctctctatgatttcaagctcgtgcttgcgctcttcgtagtccgggagtttcagcctgaattttgcgagcggcacggaatcgccgtgggcgagttttattacgagggcgtcgatttttctgttgagggtttcggcaatattggaggcgtcgtcctcctctatgagagtttcttcgtaccattgcatgcttgcgcccacgctgtcggttgcgctgaatgtggacaggtcgcttccgcgccaaagggcgctcatcattctgtcaaccctttcaatcagcgccggataggggagctctccgcgggttgaaacgtctatcgcgtccatttccgttccttcagaaaacactgcgtggaattccgccccgaattcgcgcacggcttcgcatacattttcccattgtggggttccggggaatgcgtcggttttagcttttatgccgggcattccgttgcgttcgcagtagatgagccagtctttgagcggcagttgtttaaatagataggcgattgacgatgcgaacataagcccgtcgccgcaggcaatcagccattcgtccgggtcgagctcccttccgtcggttagctgcccttcgcggtcgaggattctaaggcgcttttgggtgttttcaaaaagccacaggggatattgcgtgaaaatgcctttgacgatgccgttgtcgttttggaactcgactttatggatgctgtatttcattccgacgcaatccatcatttggcttattagcaggcggatgcctccttttttatcgaggtcgccgtatgagcccgcttggagtgtcgagtaaaaattttttagggtgcgctggtgttgaaccgcttttggggagtcttcgagaggtacgatttcaaagtcgaggcgcgatattgactttttgcgttttaggttgaggccgcagattgcgtcgtcgcgggcaagtattgcctcaaatattcttgcggctgcggcgggtcggccgttttcaaaagcttcgagtgcgcgggacagcgtctccgggcggaggtttcttatcgtgtttattcgccggccttcgatgcgcgaataagcgtttgtcgatacgggttgcgtgttcatgagttccacaatatcgcatttttgagaagatcgcaaatttactttgggaagtttggattggcccaaaatttttggaatttttgagtgcctttaaatattgcgcggatagcgggtctggaataaattaaactgtttaaaataatgggggtatatatggcttgaagggaagtcggggtgcggtattgtaagagaatgaaatatttcagtttacatatgggaaggagagcggttgccgcgctattttctatggcgctgtgcggctgtgtctatggggaagagcagcaggaaagcgcggatagcgttgaaaaaacggaaagcttgaaatacgacttatccgattacagaaacttttttggaatatgctggtcgagcgacacaaattccgacgtgctcgactatgcgcgccagatggggcatacgcacgttgtctaccgcagtggaatggagaagcttcctcaggcgaagggcatgagctttttcattgaggatcccgagttcggcgcgcgcctgcgtatgatggattacgacaagaaatattcccagaaggaaatagacgatatacagtcccattacgtggtgatataccacgataaggagttcccgtacaatatggcttcgtcttggtttattccgcccaaccagcgttcgttgacgctcgacttccagcagcagaaagtgatagacgacattgtcgggcgaatgatgacgcgcataaagcgcataaataaggtgaatcccgattttagctttgcgggttttacgtgggacgtcccccatccgagcggaaattttcgtctgccgccaaagccggaagtaaaggacatacacaaggcgcagggcaaggaggtttcgctcgcgtattggacaggcaaagacagcagcatacctttcaagggctgcacccacgagtacgagacatattcggaaggcaagcttgcctattacaacaagcttaggtcggaaggcgcgaagattaatcccaatataaagatgatgtcggagccgtacaagctttacgagggctggataaaaaagctcacgcctgaactagttgagaagatgaaaacgcgcggcatggagggctacaagttcgactttttgtggcaggaaggcgacggcgacgcgtttgtttcggacaagcgcatacaggaaggcggctacgaccacgcgcacgttggctcttcgactcccaatatatccgatactggcagaatgcttgccgaatcggttgcagcggctataaacggttcgtggacgtgctggtacggcagggccggtggcacaataaattcgccgaattatagatttataagggaaattcccgcgcggctaaaacttttcaaggcaatcccgacatgggagaatatgaacaatactcccttgtctgagcgcaagtgggacgccgaaaagaagagctacgacagcccgactgcccacatgggtgaagattgcatatggggtaagcatccgcgcgacgacaagatgtttatagtatttctgtcggaaaaggccaaggcaaagattcctgaaggcaagagggctaaggctgtgtatatggtggacggcctgttccgcgaacttatggatcttactgcctgcgaccgcgccgcaaagataaagccgcgcgttagaatgaccaagaaatccgtgcagttgctgtcgaacgacttgataaacgaaggccttatagttcacttggaagacgccccaaaggaaactgaggagcaaaaatagcgatatttctgataagaaaaagccgccacaatctggcggctctttttttgcgtttcttttctttcgagtaagcagcgtatttttatagtggaaagaatcagtttttatatatggatttagcgggagattagaatttgaaatgcgtggaaatgtttcaaaatcttagtgtaggcattaggcttaaaataaattctgcaaaaagtccactggcttaaaaatatttaagcttatagagggctaatcggcctgcggtgaagggctctaacgttagattggggcgaaatataaaaacgtgccattcacattatataattggcaaacttcaaggccaaaaaaaaagagagccgggcacggctctctttaaacgaatgaaaaattatctctttctcgacctgaaagccgcgaaggcagctaccaatgcaaatattgcggcaaatgtggacggctccggtacttgaacaaattgcaggccgattccggaaatattgtttgattcgtcgagaattgctatgagctcagcgtctataccggactgtgcgctgattttaattaaattgatatcgtcttgcgagatgccggaattggggtcgaaagttatgatagtgtattttgagccttcggatatgccccagcctaacaaatcggcggcgcttgcggatatttcgagggtagccgattcgagaattgagagtgtgcccgcgagttgcaagaggtcggcgccgtttttcgagaagtcaacaactaaggcgcctgcgccccaaacgagagagtttgccgcgagagtaccgacttcggaatcgaggccgatagcgcttagcttgccgccgtttagggatatgtcgcccgcgctcttgccattgaacattccgatgtcaattcgtcccgagccaactgtcactttagcgatgccgtcgtttgaaacattctttgttgagtacgattgggcttcatagaaagaagttgtagagctgcttgtgattcttagaatttgcctcgaattttcctcgcccgccatgcgtatatttagtttgccggtgttgttgtcggttgtgagcaatgcgcctttgaatgcgcttgttccggaatttgtgaaggtgagatatactggtgcggcgttgtaggtttctttattagtggtaatgtcttcagagaatttttttgttataaagattgaactatcgccttctaatcctccgaatgacaagtttacgctgtcgatacatttaggatcccagatatctactacgtttgccgcgaggtttataatgcctgagccaaggcgtacgacgccttttactgttgagctatagtttgaaaatacaaagttggtgttatttttatttattagatcgcctcctatttgcacattaagtccgaaagcttggtttccctgaattccttcttgtgcgaatctgaagtagtttgtaatgtccgaattgacaataaagtccccgccgacatttacggttgagttcccatatgcgtcgattcttgtccagatatagcctgttgccgatggggatttttggagatttatttctaagtttccggaaagatttaggtttgcgaatgaaccgagtaaaagaagcgcattgaaattatcccattgtctcttgtcggagaatacgacatttttcatatagtatgtcatattgtttgccgttatggaagtttcccccgttatgactgaggcgaatttttgtgcagaggacgaattgtaatcgtaggaaatatcgatattgtcagccgccgtcggcttttggtttggcgaccacactccgtctttatcgattcttacgatatttgaattgtactcttttgaatcgttaaatgtgccgttccaagaaatatctgttgcaaaaatgctattagcggcaacaaaagtagttaaaagtgcaggtaatttcttcatatgcgcatactattctttttcataagtataaatattcacccatatttaagcttcaataataaaagaatgaaaatttagttaactgtaaattaaaaaagccgggacaaaaaagtcccggcctcttgttaaagtttgttttagattattctatgtacaagccgtctttaatttgcggctttttatcgagagctttccattttgcgacgaagtcttcgcaattggttgcaaagagcggcgaaatctcgatatcgaatacgggcacgccgtcggccgatgtttcgatattttctccggcagcttttagccatcttgcggcctgttttttctggtcgtttttgcaggttgcgggagaatcgaccccttctgcgtttttcactggcgagaattcgtcaccgcgcgcgccttcgataatgaccggatttttagccatggggagggcgtcaaagacaaacatttcaaactttattccgtttggcttgtcgggttttacctgcgttccggagtcgtccacaaatgggatttttttgtctgcgcggtggaagggaagcttagcgccgccggacgagccgccgagtttttcgacgaagttgcggtcgagtatatgtattgcgacacttcctgcgcggaattcgagctggccgtttttatcgaggcgttcttgatattctttggggaggtcggagtattccacgacgcatgttttgccgtcgagcaggcagaagtggccgactttttcgagcggatatgcttttggtatcatttttgaggacatatccgagccgccctttatgtggaagccgaggaaatatgggtcgataatgtttacgagggggttgtcaacttggaagtagcttatgcaatcgactcctctgcgcttgagttcgtcgacagcgccgcttctgcacattccgcgaaggcagccgccgtgtccgtcgggggtcatggcgattttacccttttgttcgagtattatcttgccgtttttgtccacggcgggcatgaggccctgtttaaagaatattacgtcgtttttatcgaggccgaagaagttgttttcttcaaagaaggcgcgtgttgcgtcgttgttgatatggcttgtcataataagccacggaatttttactccgtatttgcgctgggctgaaaggattttttccgcgaatatttggaagaggcttttttgctttacaggggagactttataaagtcccttgggtgcgttaaacccgagcctcgtgccctgtccgccggcaacgacaaacgctgcgagccttccagcgcggatagcggcctctcctatttccttagcctctttccatactgggtcggacgccttgtcttccggcaggggagtgaagggtgccggagacaactttgcgaagtctataccagattccgctgtttgcgttttgaagacaagttcgtcaagcagagtgttgagctcgccgagatcgacctgttcgagttgcgcgagcaaacttttcttttcttcgtccgagagggaatcgaagaatttaaatacttggctttggcctgcgttggaaaatttttcctggatagtcatattttagtcctttgggaagccgttgggattgtttttatgccagcgccatgcggtttcgatgatttcgcgcacgtcgttgaactttattttccagtttagttccgtcttggctttttgtgagtttgcgtatagggcgtcggggtcgccttcgcggcgcgcgccgtacacgacagggactttcaagcccgtcacttcttcgactcccttgataatttcctttaccgagtttggggtgccggttccgaggttgtagaacgagcacgaagagggaatttcgagatttttgaaagcggcgatgtgcgcgcggcagaggtcgtcaacatgaatgtagtcgcgcaggcatgtgccgtcgggtgtgttgtagtcttgtccgaacacgttaatggacggaatcttgcccattgcggcgaatatagtgaggggaattaggtgtgtttccggggtgtggtcttcgccgatggttccgtcttcggcggcgccggaggcgttgaagtatctgagcgctacaaagctcaacccataggctcttgcgcacgctttcaagaagttttcgacgtcgagttttgtctgtccgtatggattgattggcagctgcgggtggtcttccgtgagcgggagtttttttggaactccgtatgtggcgcatgtggaagagaacacgaattttttgacgttgtgggcgatcattgtttcgatgaggttgatgacgcccgcgaggttgttgtggtagtattttatggggttcttaaccgactccccaacattgatgaaagcggcaaagtgcatgacgatgtcgattttttcggcgtcgagtattttgccgacgaattctttgtcttcgaggttgcccttatagaactttacgccctcttttaatgcggctctgtgtccgtatacgaggttgtcgagcacgattgggttgtgcccggcttcaattagctgtcttacgcaatggctgccgatgtagcctgctccgccgatgacgagtacattcatatttacgattatggtttaaagttaaaggttttgccggttttactggacgatttttgcgccgtcgcccgaggcgcatgtaaatatcattggctgtttgccaaatttcttggcgtagatttgcgagacttcgtttgcctgtgtttggctgaaagtgtcgtctgtgaacgccatgactgctccgccgaagccgccgcctgtgagccttgcgccatatacgccctcaatgcctgataccgtatcgacgaggaagtcgagttcttcgcaggagttttcaaagagcgttttagagctttcgtgagaggcgttgaggagctttccgacgcccgtgatgtcgccgcgtagaagcaggtctttggcttttagcactctttcgttttcctcgatgacgtgctttgcgcggttatagactttctgagtcattttcgatttagccgcttcgaggtcggagattgtgaagtggcgaagcaaccgcatttttccgccctcggacagaatttttgcggcttccatgcattctgcatgcctttcggcatagaggccgtcaacgagtgcatgctttttcgtggagttgaacagccagaatctgcatttgtgcggaa

SEQ ID NO: 3071 - DNA, 32759 bp, Unknown
  16S sequences of unknown bacteria
gaagagggtgacatcatcgatatcgatatcgaaaataaccgtttagaccttcgcgtggacgaaaaggagatcgagcgcaggctcgcagccttccgtcctctcgaaaagcccgtgacggggtatttaaagcgctaccgcgcgcaggtgtcctctgcgagccgcggcgcagtcttcaaaaagtgaagataaaggagggcagatgaacacgaaactacagatattcgattccaccctgcgcgacggcgcgcagagcgcgaacatttccttttcggtcgaagacaaactgaaagtcatcgaaacgctggacgagttgggcgtcgatttcatcgaggcgggaaacccctattccaatcccgcggaaatgcaattttttcagcgggtgcaggcgttgaaactcaaacgctccaaattggtggcgttcggctccacccgccgcaaaaacatttcctgcgaggaggacagcaatttaaaatccctgctcgccgcgaacacagaatatgttgcgatcttcggcaagagccacattctgcacgtcacggaagtcatcaaggcgacgcccgacgagaatctttgcatgatagaagaaagcgtgcgtttcctcacggaacacggcaaaaaagtcatattcgacgccgaacactttttcgacggctataaagccgaccccgcctacgctttgtccgcactggaaagcgcggcggcgggcggcgcgtgcatactgagcctgtgcgacaccaacggcgggctgttccccgacgaggcggaaacgatcgtgcgcgtagtggcggaaaagttcccctcgctcgtcgtgggcatccactgccataacgacggcgggctggcggtagccgattcggtggcggcagtctgcgcgggcgcgcggcatatacagggtacttttctgggattcggcgaacgctgcggcaacgcgaacctatcgaccatcatctgcaatttacaactcaaatgcgggtatttgtgcctgcccgcggaaaatatgcaaaagatctacgaatgcgccatgaccattgcggaaacggcgaacatcgccgtgccgcagaacgaaccgtatatcggcatgaacgccttcgcgcacaaggcgggcatgcacgcggacggcgttttaaaatgcgctaactcgttcgagcacgtcgatcccgctgtcatcggcaacaaacggcggtttttgctttcggagatctcgggaaagagcgcaatctacgataaaatcaaaaattatttcccgaaagtggataaaaacggcagagaaatggcaatcattgcggaagagttgaaaaatcttgccgtgcagggctaccagttcgaagcggcggaagcgagttttatcctgcgcgtttcgcgcattctgggacattatacgccttcgttcgaattgatcaactataaaatcatcaacgaacagcccgccatcgagggaaaagtcgcgaccgcggtcgtcaagatccgcgtcaacggcgtcacgcgcatcgccgcctccgacggcgaaggccccgtgcacgcaatggacctcgccctgcgctccgctttaacggaattctatcctgagatcgcaggcacggcgctcgtcgattacaaggtgcgcgtgctcaattccgacaaagccaccgcggcgaaagtccgcgtactcataaccacggtcaacagcacggacagttggacgacggtcggtgtttccgaagatatcatcgaggccagttggatcgcgctcaccgactctatcgattacgctttgatgaaaagaatgtaaaaatatgtttaaggatttagaatgaaattatttaatttactcttcggctgcgaactggaaggcacagaaaaactcttttatcagggcggcgcggcatacgacgcggagcggaaaagccttcgctttcaagcgggagaaacagcgtctttcgaaacgtatttcaatctgttttcctatgcgaaatacagaaaatactgcgggattcaaaacgcggacgtccgtttcgagggaacgggaagttttctcgcggaatttttttgcagaacgcagtccgggaataccctgccgctgcaaacggtgaaatttaccgattcttatacggtgcggctggatatttccgaactccccgataagggttatctatattttacgctgaccgcggagagcgaggcggaacttacgggcggcagttatcttgcggatacaaacaacgacaatcccgtaaaaatcgggctggtcatctgcacctataagcgcgaaacgttcgtaaaaaacaatttaaagcgccttttggcgggtattgccgcagaacccgaatggggaaatattctgcacgtttttgtcatcgacaatgcgaaaacgctggaacttcccgaaaacgaatattataccgtcgtacccaacaagaatctcggcggctcgggcgggttcacccgcgggatcaccgaagtgtgcaaagatccttcgttcacgcattttctgctgatggacgatgatatccatttcgaattcgaaacgctcaaacgcaccgcttatttgttgcgggcgctttccgatgagtacaaatacgctacgatcggcagtccgatgatgtatttggacagacctaccgagcagcatgaattcggaggatattttacggggctgaattataagccgcgcaattcccatctcgatatgacacaagcggaaagtttattgctgaatgaggaccctccgcagccgaattatacaggctggtggtatacatgtatgccggtacagacagttgcaaaatacagtctgcctctccccctgtttataaaagcagacgatatcgagtacggcatgcgcgccatagaacacttgatattattgagcgggattgccatctggcatcaggattttactttaaaatacaatcctgttatggattattacctcaaacgcaatgagttgatattatccacacttcgctttaagatcgggagttttaaacaaagtttaaaattcctttactcttctttcattcagttagcgctcaaacgttacttttgtgccgaactgatcataaaggcgtatcaggattttttcagcggttatcaattcttgatcgagcaagacatggaaaaactgaatcgggaaatcatgaattatcaaccgcaattttacgataaagcagaacttgaacaaagattccatgtcgatattgccgaaggattagaaaaagtaaaggtcaaaaatccgaagcggaatattttcagaaaagctatcctgacgatcgaaaattttatgccttcttttttatttcgaaaaaaacccattgtcgtagacgcaaattctacgagggcaaggcctctttttctgaaaaaaacatctatacattacgacacgaaccgagagcagggctacatttgtgaatttgattcaaaacgccgccgaaaaatccgccgccaaatcttcggcatgtattttcgaatactttttaaatatcgcaaattaaaagcagaatatcaaaaacattatccggaaacctgttccttggaagaatggaatcgtaaatttgaaatataaagaaagagcaaggtcaatgaccttgctcttctttattccataatatctataaattgtttgaaatcttgctctaaatagtaaaatttttcatttcgatttaataagcgatatttttcaacatatttcaaaagttctcccgcaagtttacctttacagtcttcattcaacgttttataatgccaaccgatgaattgaacgaaccaattacaaaacgatctttcatatctttgatatattcccttcgcattccaatcttcatatattttatccgctgccaaaagacaattattccaggatttttcacgcgaggaagaaattgactcgctgttgttttttctttgattcactaaaattttatccacataagtaattctttttgctaaggcaatggatgtaaacacaaaatacgcatcgttggtgctgcgtacgtcctgaaatttcagcgcgtgttttcttatgaaatcagtacgatataatttatcccatgcccaacccataaatgcccaacagacatagtcgccgagtttttttccgctgaatacggtttgtaacggtaaacaatctttatgaatgctccaattcatatcgatatatttttttgtcttatcgtcaaacccgcggcacgcgcagacggaaatatccgcccccgtcccttctgaacgaattaaaagagatcgaattaaatcaggttcaaaaacatcgtccgcatcgaggaaaattgtatactttcctttcgcatgggcaaatcccgtgtttctcgccacacctgcatataaatgattttgacgatacaagaagatattcttatgttctttttgataatgctccacgatttcataagtattatcggaagagccgtcgtccacgcaaataatttcaagattttgatatgtttgatgcagcaaactgttcaaacactcttttaagaatgccgaaacattatataacggcattactacgcttaccaacggctgagcgttttgtaatttcaaaagtcctttggcatcatattttactgatttttttgctattgtattctttacgtattttttgaatttgcggacaagccctcgcgctttgcggggaaaataagtaattatacgcccgaccttataggaccaggaattacgaatagaatttaaatcgtcatcgaagcgatcatttcccaacccgttcttctgcagccaaaaacgttgccactcgccggctgaaatcaaaccgtaatacagatatttttgcgagttataatctttcgtgagatcacagtcctctgatatctccgccgaatcagcataggcaaattttaagagaaaatcatagatatatccgttaaaaaaatcttccctcgtataattgctcaaattcaataaacgtataatatcttcccgacgcgcaaaagcctctgtaccgttttcacggatgatttgaaccaaatcctctgcgattacgtttaataccccgattttgccttgtccggtaatatgcaaagaattcaagtatctgtattcttccaatctcgaacaaaaatcaatattttggctgtttagcggattcaggcacaggcaattatttttttcgaaataaatattccgacaacgcaacagatactctaccacaaacgacaggctgtcgccgttatcacgatagtctttaaattctaatttgttttcataaatctgctgcacagataaaattttattgttcaaagaaattccgcatccgtatattactgcggcatcctgatgattgaaaacaatcccctctccgataaagtttttattataatcgaatacgtcataagcaacgtttccgcaactaagttgtatgtttgcaccgaacacataaatatctatatcgtttgaatcaaaacattccattgccgaagaatataagcaagcgttcaaaatcgcgccggaaggaacgatatgcaaatattttcccgttatttgctgcaaaacctgattgagcaatgcaggcattgaatcttttgattccatgataacggtgcggtcgtccttttgcaaatattctttttctgcggcggtaaatacatctcctatacaaaaaatctgtaaatttccgtacttttggtttgcaatgcttttaaatgtatcgaggaacatatggttcgtttttaccaaaactacgctgatacccggttgatcggagataatataattcaatttttgcaaaaaagcccgcggttcacgcatcaataaccgcacgcattctctttccgtatcattgaatattttaaaatcgatttcttttgtttcttttcctcttataaattctttctgcatgtattccgcaaattccagtttaaacatataagcgatgcggtttaacgtaaatacgtaattatgaaactttttcagccaataatatccgattatttctttgcggagcgataagtttccttttaaaaaccggtcaatgtatttatattcttcactgacgcagtaaactttattgctgtcataaaccgaagaattggggttgtcgcgacggttcatataaaaaatcgaatctaaaaagacaaccgattttgcgaggcaaaaggtctgaaaccaaaagccgttatcctgaaaggacgcccccggcgtttcgttatgacggatctgatttctcaataaaaaatcgcggcggtaaataccgctccacgtattcatcggaaaacgaaacacttctttttctttgaacgggcagattacgcgatgataatattttttttgttccgacaatcggacttctgtacgggaaacgaaccccgattcggaagaaaaacgacaaaaatccgttttgacgatttcagcatttttcgcgcgggcgactctgtaaagagtctcatacatttcgggaagaatataatcgtccgtttcaacgattccgatatattccccctttgccgcgtcaacgccgacgttgagagaatgtccgtatcccgaattctttttatcgattataatgacgcgcggatcgtctccctttatcttttgtacgatctttaaggaagagtcggtcgagccgtcgtttacaacgatgatctcgatatctttcagcgactgacgaattacgctggtcaaacattccgcaatatatttttcctgattgtacatcggcatgatgaccgatactttggggcgtctttcgttcatgttttttgaatcctgatatgttttaatctcttccatataaatctcgggtataaactttttcttttacgtcggaaaggggctcgtccagacggttggcaacgatcacgtcggcaaggcgtttgaactgttcaagatcggaaatcacgggactgttgaaaaaattgtcttcccgataggtcggctcgtagacgataacgcgaatccctttcgcttttaaccgtttcattacgccctggatcgaactttgcctgtaattgtcggaattcgacttcatggtcaggcggtatattcccacgacggcgtctcgattctcgggatatcccgcctttttcaaaatgcgttccgctacgaaatctttccgcgtgcggttagaatcgacgatcgcgcggatcagattctcgggcacttcgcggtaattcgccagcaactgtttggtatctttgggcagacaatagccgccgtatccgaaggaagggttgttgtaatgcgttccgatacggggatctaaactcactccgtcgatgatctctttcgtgttcagcccgtgcagttcggcgtacgtgtccagttcgttgaaataagaaacgcgcagcgcgagataggtattggcgaaaagttttaccgcctctgcctcggtactgttcatgatcagtacgggcacgtcctctttcagcgcgctcccgcggagaagttcggcaaattcttttgccttccgcgtcaggcgcgcgtcgcgcttgtctgttccgacgatgatacgcgacggatacagattatcgtacaatgctctgccttcgcgcaaaaattcgggagaaaaaagaatatttttatcggacaactgctctttcagcccgttcgtatagcccaccggcaccgtggatttcacgacgatgacagcctcccgattgacggcgcggacttctccgatcacgctttcaaccgaagaagtatcgaaataattggtttgaggatcgtaattggtgggcgtggcgatcaggacgaattccgcggcgcgatatgccatcgcgccgtccttcgtcgcagtaagacgaaggggctttcggacgagatattcctcgatgtctttgtccgcgataggcgatcttttggcgttgatcgcatctacgcgttcctgcgatacgtcgacggcagtcacctcatgacgctgcgccaagagtaccgcattggataatcctacgtatccgatccctgcgattgctattttcatgttttttccctacaaagtaattaagtatattttactgaacaaatatgatgattgtatgttatttcctgaaaagccttaaaattataccacattgcaacaaaatttaaaaccgatttcgtactctgtcgtcaatttggctgagaatcctctttcatcgtctgcaaaaactcgcaggcggcggcgttggtcttcgaataggaacaataagtgacaatggcgggggtagcgaaatcgatgagacggacttcttccaaaagccccgcttgcaactcgctctcggcgaggcggcagggcagaaaactatacccgaacccgtccgtcagatagtggatcagtttgccgctgttgtcgatctcgaacccgaacgcgtgccgcggcggaaacagcgataaaataaatacgcccacgtcgccgtaggcgaaattgcataagagatagtcgagattcgcaagttccgccttgcggatgccgtttttatattcgttgatgcgcggcgaagcgaagagcgccagacggtcggaataaaactcctcgcaggcaaagcccgccttttttaagggcacgtaggaaaaggcgacgtcgatgatcttatcctgcagcatctgcaacatgtccagcgaatgccccagcatcactttggtggaaatatctttgcgcttgcggataaaattgctgatgaccggatagagcgcgctctcgtataccgcgttgatggcgccgatcttcagcgtttttttgtatttcgccgaagaattgacttcctgtatgaacgactcttccagttccgtcatgcgcacggcgtagtttaaaaacacgctcccctcttcggtcagttccacgccgcccgcgcgccgcacgaacagttttttgccgatctccttttccagttcgaagatgcggttggtgaccgtcgactgcgccacgaacattctttccgcggtgcgcgtaaagtttttcagtttggaaagcatgataaatgtcttcaatccgtcgctcgtcatcttctctcctccgtgtcattcgttttttcgatgaaaccgattaaaattatctattttataaatcgtttacaaattatatcatatgtgctataataaagcaagaaaaacaaacgatcaaaaggagcgtaatcgatcatgggaatgacaatgtcacaaaaaattctcgcctatcacgcagggcttgacagcgtgaaggcgggacaactgatcaatgcggaactggacatggttctcggcaacgacatcacctcgcccgttgcggtaaaagaattcggcaaggcgggcttttcctgcgtgaaatgccgcgaccgcgtgagcatggtaatggaccactttacccccaataaagacatcaaggcggcggaacaagtcaagaccgtgcgcaatttcgccaatcagtacggcatagaaaactttttcgacgtgggcgaaatgggcatcgagcacgcgcttctccccgaaaaaggactggtgggcgcgggcgatctcgtcatcggcgcggacagccacacctgcacctacggcgcgctcggcgcattttccacgggcgtgggttccaccgatatggcggcgggcatgatgagcaatatgtgctggttcaaagtcccctccgcgatcaaattcgttttgaaaaacaaacccgcgaaatatatttgcggcaaggatatcattctgcatatcatcggactcatcggcgtggacggcgcgctgtataagtcgatggaattcgtcggcgacggcattcaatatttgaccatcgacgaccgtttcaccatctgcaacatggcgatcgaagcgggcgcgaagaacggcatcttccccgtggacgatacgacgcgcgaatatctaaacggcagattcaagcgcgagatccgcgtattcgaggcggacgccgacgcggaatacgagcgcacgatcgaagtagacctctccgcgctgaaacctaccgttgcgttcccgcacctgcccgaaaacacccgtacgcccgaggaatggggcgacgtgaagatcgaccaggtcgtcatcggcagttgcacgaacggccatatttccgatttgcgcatcgcggcggatattctgaagggcaagcgcgtcgccaagggcgtgcgctgcatcgtgatccccgcgaccaacactatctggaaacaggcgatgcacgagggactgttcgacgtgttcgtagacgcgggcgcggtggtctccacccctacctgcgggccctgcctgggcggtcacatgggcattctggcggcgggagaacgcgccgtggcgacgaccaaccgcaatttcgtgggacgcatggggcacgtggacagcgaagtctatctcgcttccccttacgttgcggcggcgagcgcgatcgcgggcaaaattgctacgcccgatcaagtgaaataatcatcggaggttgaaaatatgaaagtacagggcacggttttcaagtatggcaacgacgtcgatacggacgttatcattcccgcgcgttatttaaacaccacttccgaggcggaactcgcctcgcactgcatggaagatatcgataaagaattcgttaaaaacgtaaaacagggcgacattatggtggcggaagacaatttcggctgcggctcctcgcgcgagcacgcgcccatcgccatcaaagcgagcggcatttcgctggtcatcgccaattctttcgcgcgcatcttctaccgcaattccatcaatatcgggctgcccattctggaatgtcccgaggcggtggcgaacatcaaggcgggcgacgtggtttcctgcgaccttgccaagggcctcatcgaaaacgtgacgacgggcaagacctttcaggcggagcctttccccgactttattcagaacatcatcgacaaaggcggcctgatcaaatccattcagagtaaataaatcatgcgacgcgcacggtacgcgcgccgtcagggggagagattatgataaacaaactgcgcaccaaaccgcgcgacaaagccgtatataaagatacggtcaggagtattcccgcttttatagtatgtctggcgctttctgtctatagtcttatagcctacttttctttcgccgactttcccttatacagcgtcattgcctttcccgtcataacggctgtcgtcgttttgtttgcggttctcggtatcgtgcgcggaagaaaaaaggctttcagattttcaacggcgggcaaggatgacagataccctaccgtcatgatcatgcaagccatgccggcggacaaaaaaacgccgtttcccaccgcttatttggagtattatccctgcggcgccgaacccgtgaaacagtacgccgaactcgaagccgcattaaacgacctgatcgaccaggtatccgacagcgaagcggaaaaattatacgaacaggaagagcaactcagcgacgctttgggagattgcatcgattatcaggactttgcgcccgtcgacgtactttcgctgtaccgcaagaaaatcgtgctggataaacgcatttacgacgctttcaagccctatttcgactggaatactgtgcggctcaatcaaaatgagatcattctttttgaaaaaacacaaaacaaataacatatccgaggttttaacatgaaaaaacatattgcagttctggcgggcgacggcatcggccccgaaatcaccgacggcgcgatcgccgttttaaaaaagatcggcgaaaaatacggacacgaatttgaattcgaacaccttctgatgggcgtttgcgccatcgaagagacgggcgaaccccttccgcagtacacgatcgaccgctgtcttgcatccgacagcgtccttctcggcgcggtaggcggcgcggtgggcgatccacgcatcaataaccttcccgggcatctccgcccggaggcggggctcttgaagatccgcgcggcgctgggattgtattccaacctgcgccccgcaaaactcttccccgcgctggcgggcgcctgccccttacgcgcggatatcgcggcaaagggcatcgatttggtggtcgtgcgcgaactgacgggcggcatctatttcggcgagcgcggcagaggccaaagcgagggcggcgaatacgcctacgatacggaaaaatataacgtggaagagatcacgcgcatcgcgaagatcgctttcgaactcgctcagaaacgtaagaaaaaggtcatttccatcgacaaggcgaacgttctggaatcttcccgtttgtggcgcgagatcgtgcataccgtggcgaaagattatcccgacgtggaagtgacggatatgctcgtggacaacgcggcgatgcagttggtcaagaatcccgcccagttcgacgtggtggtgacttccaacattttcggcgatatcctctccgacgaagcggcgatgatcacgggcagcatcggtatgctcgcctcttcttcgctcggcgcgaccaagcgcgggctgtacgaacccattcacggcagcgcgcccgacattgcgggcaaagacctcgccaaccccatcgcgaccattctttcggcggcgatgatgctgcgcgacagtttcgatttgggtaaggaagcggaagccgtcgaacaggcggtcaacaaggtgttggacgaaggctaccgcaccgcggatattttcagcgaaggcaaaacgctcgtcaaaggcagcgagatgaccaaacttatcgttgacagaatttaacgaatggattataataagacccgtaccccaagaaattgcaggtacgggtctttttggaggttttttcatgatttccgaaaacgtaaaaaatattttgtccgaactttccacggggaacccctacggcgaaaaagtgacgctggtggcggcgacaaagacgcgcacgcccgaagagatcaacgaggcgatctccgcgggcgtcaccgatatcggcgagaaccgcgtgcaggaatttacggaaaagtacgatctcgtgcacggcgctgcgcggcatttcatcgggcatttgcagacgaacaaagtaaaatatctcatcggaaaaaccgaccttatacactcgctcgaccgtttcgaacttgcggacgaattgcaaaagcgcagcgaaaaagcgggctggacggcaaattgcctgttggagatcaatttgggaaacgaactttccaagagcggtttttccatcgattcggcaaaagaagcatacgaaagggcgataaaatatccgaatctgcgcatctgcggattcatggcgatgctgccgatcagcgaagatgaaaaatatttgcgttcattatgcttgtgtatgcgcgaaatttatgatacaataaaagcacgggacgaaaacgtgcgcgtgctctcgatgggcatgagcggcgattatcggctgtgcgtggaatgcggcagcaacatggtgcggctgggcacgcatattttcgggccccgcgcatataatctgaaataagggccgtataacgggaaacactatgggacttttcgatttttttaaaactgaaaaggaagacggcgcgcccaagcggccgctacggacggaaccgctcccccgccccgaggacaagggaggcgacggcgccaggcccatgcagatcagaaagccccgttcgttcgaggacatcgaagagatcatcgaccgcatgaaagacagactgacggtcatcgtgtacgtgaacgaactgaaccaggcgacggcactgcgggtgacggatattttaagcggcgcgatctacgcgctaggcggcggcatggcggagttggaaaaggatatgtacatattcacccccgacggcgtgaacgcccgataaacaggtattcaatttacacagtttccgacgaggaaactgatgcaggataataaaactttaaccggaaaagcgcgggtcctatttgctgagggtccgtgctttttccatgccttgcgaaaggggcggcgcaaaatttgcgccgccccttccaactgaaattaaggaacatataacgaatctatatgttatatcgtcattatataacacaattattgcgttcgtcaagtattttacgcaatttttgcgtaaaatagaagtatgtatggcgaaagattgcgggaattgagggaaaataaaaatttaacgcaaaagcagttggcgaagattctcaataccgatcagcaggcgatcagccgctatgaacgggaacagatcgatctgagcacaaattttatcttgaaagtctgcgattatttcggcgtgaccgccgactatcttttgggcagaacagattattaaagccgttccgaaaggaatggctttttttgtttgaccttatttttataaagaaaggagcagccttgatcggcggctcctttctcttttggaaaatggggagtacataagaatatcttatgttgcatacattatatagactattttagtctaagttaagtaatttactctattttggggtaaattatagttatgtatggtgatagattaaaaattataagaaccgaaaaaggactttcgcaaagcgaatttgcaaaaatgttcgaaacttcgcaaagaaatatcagcagatacgaaagagagcaactcgatttaagcacggattttatcgttcgggtttgtaaaactttcgatatatccgccgattaccttttaggtctcaaagattattaaagccgttccataggaacggctttttttccaacaatttcaacattcggattgtttatatagtgcggacaaattttttttattttttatcgtccgcctccagcgcgtcggtcgcgctgcccgaagcgccgatgccgaccgtcttatccacggggagagaaaatatgatgccgcccgcatccgttttcagtcccgccttttccgagatcgcctgcatgatggcttgcttgctttcccgattggacaaaatcagtagtatttccgattccttttgcagggatatgccgataaactgttccgctttggaattgcccaccgaacgcgcgcgcacgatggtgccgcccgccgcgcccgccgtgcgcgctacttccatcacttcttccacgtagcccgcctcgacttcgacgacgatcagatcgtatttcctgttttcgtctttcataattttactcccgtctattgtcttttccgaagaggcgatgcctttcgccactatctcggagatgcccgataaaggcaaggtaaaggatatgccccgccccaccagatagagcgccatctttttctggatctgtcccaaaatgagatcttcgtcgcattcgggaatgagcgaaaacatcaccgacttctccagaatatcgatacccagataatcgagtacgttcgagcgcgccgtacccgtgcccgcgaacgcgtaattgagcgatacggaatattcgttgaggatctgcgccattttctcgtcgtcgtcgggattcaatacggagatcagaagttttggcctgctcggccgctccgtgcggacgggctccgcgtttttgcggatccgcttgaccgccgtccccttttgcaaaaccgctttgaccgccccgaacggcgtttccgcattttttacgatcgtgatatcctgttccgccatcattccacctcgtattccaaaatcttgtcttccacgtgcaggaaattgcgcttgatacggtacgtcttgtgcttatagtgaatgcccaggatctgaatgctgatcagcggcgtgagcgcgacgaacgcgacgcagccgaacgcgagcgtcatgatgtcccccgttccctgcaacacgttgcaagcgccgatcgccatgggaagcacgaaggatgaaaccatcgcgccgctcgccacgccgcccgagtcgaacgcgatacccgtaaacagcgcgggcgtgaagaacgtgagaacgagcgcaatgacgtagcccgggatcaggatccacatgatattgattcccgtgatgatgcgtagcatcgccagccccaaagaaatcgaaacgccgatacataagccctttttcattgcggcggaagtgatcccgcccgcgctcatgcgctcgacctgcttattgagaacgtgcacggcgggctccgccgccaccacgaaataaccgatgagcattccgacgggaatgagcagccaaccgccgtacagccccgcgagcgcctcgccgatctctctgccgacgggcataaatccgacgttcgcgcccgtcagaaagagcaccaatccgacaaaggtatatataaacccgaaaccgatcttgaacaattgttttttatgaaaggaacgcgatacgatctgaaaaagcacgaaaaacgcgagaatgggcgaaagcgcgatgcccacttctttggcgtagtcggcaaacccgtgcatatattgcatgaaaacgccctgcgtgtcggaaaccgcgcccacgtgcagcgcgttcatatcgtattccaatcccgaaacgtgaaaggtgatccccaaaatcagaacggcgatgacggggccgatactggaaagcgcgaccagaccgaaggaatcgtcctgcccgtgcttatcgccgcggatggaagcgacgcccacgccgagcgccatgatgaacggcacggtcatcgggccggtcgtcacgccgcccgaatcgaacgacaccgcccagaaatctttaggcacgaaggcgatacagagaataaacgcgagcgtgtaaaagacgatgagcagaatattgagccgcacgcggaagacgatgcgcagcatcgcgatcatcagaaacagccccactcccaccgctacggtgacgatgaacagatagttattgacagcggacacctgattggcgaggatctgcagatcgggctctgcgatcgtgacgatgatgccgatgacaaaggaaatgagcgcgatgagccagatcttgcgcgaatgggtgatggtcgagccgatcttttcgccgatgaccagcatggacatatccgcgccgagcataaaactgcccagccccacgatgagcaaaaacacgccgacgataaacaggacgaaagtgcccgtttccagcggcgttaaaatgatgctcagccccatcacgatgagcgcgatgggcaaaatggaagtcagcgattcgaatatcttgtctttcagcgcgttggtcatggcggttctccgtttttataaaatgggtacggtttattatatcacataaacgcatttcctgtcaatgatttaaccatggtttactttctccccgcgacgatcaggcggtccatcgcgccgatatcctgcatggttttaaaatagtaatcattctttttcccttcgacggaggcgtaaatattcatgattttcgaaggaccgtcctcttgcgtcgaataggcgatcacgtcctccaatttaaatttcgcgaccgaaacgatttgctttttcttgaattttacgatgcagagcgcgccgtccgcgtaagagaggacgatttgcctcgagatcgaatagcctacgtccttgaacataccgaaaaacgatttcggtttcgcgccgagataaccctctaaaaaggcgttgttgtgatcgagatacccgccctctttcagagcgtctgcaatttggtttttattcatattctctccttttccgtcccgcttacgggcggaacatttttaatttatttttcacgatctccactttgaattcgagatcgtcgtacaattccccgtctacgttcatggtaaatttgttttcgggaaccacgattgcgcgctcgcagcgctcgaaacgggtaaatttctgttcgaggatcttacccttcatcagtttgaggaacgcgccggggatctggcggcgcctgacgtcgtccaccacaacgaaatccaaaagcccgtcgtctatttccgccgcgggacacatacggatcccgccgcccagcgtggtgccgttgccgacgcacgcaatgagcgactgatagcggtgctcctgcccgttgcattcggtgcgaacgctgtaatttttaaatttgaagagcgaaatgacgaggctgaaaatatattgcagtttgccgcgcaatattttcgagcggcggcaacgctgcaaaatttccacgtcgatgcccgtgccgatgatgttgatgccgcgcacgcctccgtccagttgcatataatcggtgtacttcgcctcgccgttcaaaacgaggtcgagcgctttgagcggatcgagcggaatgcccgcgcacacggcaaaatcgttgcccgtacccgcgggaatgagccccagacggcagttttcgaaattggaaaacccgttgattacttcgttcaaagtgccgtcgccgccaatggcgagaaggtcgcacggcccttcgctcgtgagttcgtgcgcgagatggatcgcctgtttttcgcgctctgtttcgaatacgcggaattccgttttgagggatagcaatttttcctgcaccttatggaaagcgcggcgcacttttccgccgttcgatacggggttgagaatgatattcagcatttttccgaagtacctcgttccatgacgttttatattttcattataacatgaaaccgcgccgatttgcaatttttttgcaaagatgttataatgattttatgaaagaactcattcccgaacaaatccaaattctggcacagggatgcccgttcccgctgtacgtgacgggcggcgccgtgcgcgactgcctcgcgggcttaaaatgcgccgcagactgggacctcgccgcgcccgtttccgccgaaacgttcgaaaaagcggcgtgcaaatgcgggttcacggtgcagagcgtatataagcacacgggcaccgtgaacgtatccaaagagggagtgaagatcgaattcacatccttccgctcggacaagtaccgccgcggcgagcacgcgccctgcgacgtcgtattcactgacgatatcgaaacggatgcgaaacggcgggattttaaatgcaacgcggtgtattacgagatcgcccgcggcgaattcgtcgatccgctgggcggtatccgcgatatccgcgataaaatcatttccaccacgagagaggcggacgaagtattttccgaagacggcctcagactgatgcgtctggcgcgtcaggcggcgcaactgggtttcacgcccgactttccgaccctgttcggcgcaaagttcaacgccgcgctcatcggcaaaatttccgtggaacgcgtcttttccgaactcatgctcattctgcacgccgacgaaaagtacggcataccctacgcgcaatataacgggctgaaagttttgcagtcgacggacgtactcagatatatcctgcccgaactcgccctcggcgacggcatgccccagcgcgccgatttccacgaccacgacgttttggaacatacgcttcgcaccgtgaaatatgcggatcggcgcatacggctcgccgcccttttacacgacgtgggaaaaccctactgttatcggaatttcggcaactatcaccggcacgagatcgagggcgcgcgcatcgcggaagaaattcttaccagactgaaagcgccgaacaaagtcatcgaagatacggtcgcattgacgcgcacgcatatgtacgatctcaataatcagaccaaggagagcaagatacgcgcctttatcgtggaaaattttgcgctttatccgcgcattttgctcgtcaaacaggcggattactcgggttgcaaggacgatctgcacgtatgccccaccgtgcggcgctggactgaaatttacgataaaatgaaagcggcgcgcgcgccgtttacgctgaaagaactgaatatctgcggcaaagacctcgtcggagaaatcgaggacagaaatatcggcagaattttgcacgcgcttcttttgcagtgcgccaaaaatcccgcgctcaatcggcgcaattatctcttgcaagaggtaaaacggctggaagaaacgggagaaatatagtcatggcggaaatattttcggcgatcgccgtcgcggtgagcgcgctcacgctgatcgtggcgatcgtcatttacaataaaataaaactttttccgacgcgcgggggcacttcggacgacacgtacagactcgaacagaaactggataagatcgggtacctcaccgaaaacaacgcgcagaatatgcagggcttcgccgaatattcggcgaaaaaccagagcgcgcaactggcgggcatgcaggcgaaaatggacgaactgaaccgcctgaccgaacagcgcctgaacgacatttcgcgcacgctcgcgggcgagatcaaatacatgagcgagcagaacgccaaaaatctggaacagatacgccagacggtggacgaaaaactctcctccacgctggaaaaccgcctgaacaaatcctattcgctcattaacgaacggctggaagcggtgtacaagggcatcggggaagtgcagcagctggcgggcagcgtttcggatatcaagaaagtattcacgaacgtaaaactgcgcggcacctggggcgaagtgcaactttcggcgctgttggaacagatgctttcccccaaccaataccgcgccaacgtgcgcatcaatcccctcgacaacgccgtggtggaattcgccgtgctcctcccttcccgcgaggacgaaacggtgtatctgcccgtagacagcaaattccccgtcgaggaatatcaaaggctcatcgacgcgggcgacgccatgaacaaggaagcggcggacaaggcgctgaaaaatctggaacgcgccctcaaattgcaggcggacactatcgcgaaaaagtatattctgccgccgctcaccgcggacttcgccatcatgttcctgccgctggaagggctgtacgccgaaacgctgaaaatacccgggctgagcgagtatttcgcctcgcgccgcatcatggcgtgcggccccacaaacttcggcgcgcttctgaccactttacagatcggttacaagaccgccgccatcgaaaagcgttcgggcgaattgtgggaactgctgtccgcgttcaagcacgaattcggaaacttcgtcaaaatactggaaaagacgcagaaaaaattacaagaggcgcaggacaccatcgagagcgccgccaaaaagacgcgcaccatagaaagaaaactgaaaaacgtggcggagatctccccgtcgcgcgcagatctgctgttaggcgacggcgacgacgagcccgacggcggcgagaacgaagttacctgaaatttactctatgcaatagattgcattcgcagacgttttataatataatatagatatgaaaatacgcaagatcaccgcggcgaccgcggaagaagaacagatcatacagcggctttttgcgctgaacgaaacgaacgcgcccttttcggaaacaaaagtgcagggcgcgaatatttttcagggagacgggatcgtgtacgcgtcctctcccagacgctttaaactctttacaaaaacgcgcgacgttctgctcgtgcgcgagggcgaggggcactttaagtgggcgcgcggcgaaatggatttccgctgcggcgaagcgtttgaaatagaacaagcgggcgaatacgaggtaaacggaaaatgcgttttcgccgtttaccgccaaaaataaaaggaggaaaagatatggtcaaggcaaacgtcattccgggtaaatttttatcctgtctgttgggaattttcatcggcatattgctcacactcggcgggctggtcggtggcgggttttacgtgtataaaaacgtcaaggtaggttcgcttctcgggctgctgccgcaggaaaccgacaactggctctcggacgaatacgcgcaaaacaccatcgaaggtctggtcaaagaattacagagtttggcaaacggcgacatcactttggaaaaagtcgcccagatttcccctgccgccggcgacaagatcgacgaggtgctcgacaacgtcaatcagaacggcatcgtcacgctcgatcgggacgcgctctataagacgccgatcaatcaacttacgtccaacctcatggacgtcgtcatcatcacatctacgctcgattccctttcggaaacgatgaatttcgccttgcccgatatgcccctcatcacgggcggcgggcaggataaggaagtatgggtatacaccgccgtcaacgacaacgaaacgcacaccatcgacaaggcgatcgccctcggcgactatacctattataccaggagttcgaaatacgagcgggttaccgaagaaaaaatcacgtccctctattctctttcgggcgttgtcacggacgaaaacggatacctcaaaaaggacggcaaattcatctacgcacgcgacgtcgtgcagggggattcgggcgaaacctatcgctataccaaactcgaacgggatagcaaactcatcgatgcggccgacggcgaaacgtatacgttcctgaccgatcagttatttttcaagaacggccccgacggcgaatatacgaaacttactttgacagacggcggaagccgcactgtgtatgccgttccctccgcctacgcctatcgcctgctgtacgccgaacagggtgacggatacgtgctcgccaccaaaacggacgagggcggcaatcccgtttcgggcagcggcggctttgaaattttaacgcagttcgaaaacgtgcacctgttcgcggaaacggacgtttacgacgaggtcacggagccgaccgaagagatcgttcgaaacaatcttctctttgtcaagacggacggcatcggttcccttcccgtcaattacggcatcacggcgctctcgggcgcgctcgacgtcaatacgctcaccctcaacaaagtgggcgaatacttcggcatttcgcttacgaacgacattttaaaagaaatcaccgacgtccccctcggctatatgtccgaatccatgcaggacgccatgcagaacattcaacttgcctccgtactcaaactcgacggttcgagcagttccattttactgtacctcgcctacggcgaaaaagggatcgattatacggtgggcgcggacaatcagatcgtacccgtcaacgaacccaaaaccattaccgaagtcatgaactccatcgacaccatcaagatcggcaacatcgtcgagatcgatgaaaattcccattcgctcatgcaggcgatacaggactggtcgatcgacgatttcggcaaggcggataagatcaattcgctcaaactgggcgacgtcatcgccgtgaccgaagattcgccgcaaattttgaaagcgctgaaaaacgtgacgcttggcggtttctccgaggcgatcgacgcgctgacgctcgaagatatgctcggcgaaatcgaagagagcaacaccattttgtacgcgctcaaagactgcaccatcaatacgctcgcctcctctatcggcagcctcgccgtgcaggacctgtttgcaaacgacatttacgaataccataaactgagcgaaaacgaagatttctcaaaatatccgaacgatcaactgttcgtatgggaagacggcagatatcagccgtacgatccttccagacacgacgcggacgcggtgtacgcgcgctatccgatcggctacgacggaaccaactatatcagcggctacgaaaatattcctctgtacgcatataaagacggcgaatacgtacttgcgactgaaacgacaggctggaaactgcccgtcggcgccgcaaacacaaactactattaccgcgatacgaacggcaaatacgtgcttgctgaaacgcagaacggtgtgtacacgcacgccgtgctctactacctcgacgcgcaggaagaacttgcggaaatacaacttgtgcccgcggaactttcgatcaaggcggaatttaaaacatccgtgctctattcgaagttcaaattcgctgtaaacgacggcggctacgactttgccaacctctactatttcgattacgacaattcagcctttaagcgcgtggaaacgacgtacgatatcaaaacgggcaaatatacggtttccgccgatgacgcggataagactctgtacacccacggcaaggccgtcggcgtatggaaatacctgctcacggataaagacggaatggaaatgatctgcacggtcaacaacatcggatcgctcgtcgccaacgtgagttataacgtgaacaacacgaaactcaaagatctgaatgcggacggactcatcaaagtgaattcggcaagcggcgcggacattttcggtacgcgcattcccgcgatcatctcgcccacgcatatagaaacgacgctgggagaactcaccatcggggacgcgatcaacgtaatcgtggacgccctcaaaatgctgccgtaattaaaatatgagcgcggaaagaaatttccgcgctcttttttgaaaaaacggcaaataaagttgacggacaagccgaaaagaagtataatattaaatgcacaaagtgcgcaaaccttgcatatctttttcagatatgccgaataagaccgggaggtgaaaacatgaaatacgaaatgctctatctgatcgactcctcgatcgcggaagacgcgagagaagcgttgatcgccaaatttgaagggctcgtcgccagccttggcggcaaggttctttccaccgataagtggggcgtaaagaaactggcttaccctatcgattacaagagcgacgctttctacgttctgatgacgttcgaggctgacggttcttccatcaaagaactggacagagtctgcggcattacggacggcgtattgagaagaatgatcacgaaagcgaactgatcggagaaaatcatgaacaaagtttttttaattggtaatttgacgcgcgaccccgaactttcggaaaccgcgagcggcatcagcgtttgccgtttcgccattgcggtcaaccgcagattctcttccgccgacgcggagagacagaccgacttttttaacgtgacggcatggcgcggtcaggcggaaaacatcgcgaagtttaccaaaaagggaagcaaagtagcggttgcgggcagtattcagatccgcaactacgaggacagccagggacagaaacgcaccgcggttgacgttgttgcggacgaagtggagtttttatctgcgagaaacgcggattccgacggcggttcggatttttccgcgcccgctcccaagaaaaaacccaccctgcaagcgttcgacgacgattcggatatcccgttttaatgaattaaggagttattatggaagagaagaccgtaaaaaagcctatgagaaagcctgcgcgcaggaaagtttgcgctttctgtgcggaaaaggtcgaggtgatcgattataaggacgtgaaccgcctgaaaaaatatgtgaccgagggcggcaagatccttcccagaagaatgagcggcgtctgcgccatgcatcagagagaactctccaatgccatcaaaagagcgcgcatcgtagcccttctccccttcaaaggcgagtaaaaacacaaatagtgaaagccccgtatcttcggatacggggctttttacgtcctgtgaacgggcacacacatgaatcgaaacgcacgtaatgataaatccgccgttttcggtgcagaatcgtgcccgtatgcgccgcaaagcatatgcaaagcggcggcagaaaacaaaacgcccccgcaggcaatgcctggggggcgccgttcagtgcgttacagcgacctattcggaaacgctgacctttacctgctttccgtcaagaaatgtaaggagcaagtctgtttcattcttttcgatttttgcaacaaattcgtcttcgaacaaaacctttaagtaatcgacaaattcattcaatttcattgttatgtacctccttgaaattttgtcggttgatttggacgtcaatgttttcatccatgcatttattatataacaaaatttccgtttggcactgtctattaatgtttgataaactcttgttttgtccctttttgtcgaaaacttctcgcggagatccattatctcccattcttcgtcaaaacaaacaaaaatgcatcacgatatttcagtctatgtaaacaaattctatgcggattttggcgaaacgcccgaacaggcgggaaatctgcccctccatgctgcggggcaggatcacgcgagtcaactttttacagcccgcaaagactttccttccaactttcgggataaaccgcgcgatcgtgacttctctgagcgccgcacaatttgcgaatgccttagagcagagcgtatttacgccttcaagccgcacgcgcacgagttgcggacagcacgaaaaggcttttttgccgatcgtcgccacttcgggggcaaacgacaccctgccgacgagcgcatctttatacgcggctttctttgcgacgatcttcacctcgtcgggcacgcgggcggcttcgcccgaattgcgggcgcgatagcgcacgagaacgccgtccctgaccgttgcgcccgcaagcaaagcgcgctcttcttccgcgccgtcgctttcgaaagaatcggacgcggcgcgcccctcggcaaagccgtaattggacgccacgatgccgacgcgttgctgtaaagaggagagcaccgtgtaaatgcctttgcccttttccgtcttttgtccgagatcgtagatcttaccgcagtacgggcagaccgctctgccgccgccttcggaaatttttaaattcgcgccgcacgtttcgcacacgagttgcgtctttttttccatattcttcgccccccgatcagccgcccagggtctttttcatcttgacgatcgcgtcgctcctgttctcgccgcccactttcaggtaaatggcgctgatataattgcgcgccgtaccctcggacaaattcagtgccgaggcgatctgacggttgttgaacccctcgtagatcatgatggcgatctccacttccctatcggagagattatattccttctttaagcgtatttcgcggtcggaagtgaccattttagccgcgtcggtgatcttcttggctatctttgcggggagaatggtatcgcccgcgtaggcgttctttacggcgcttatcagcgaatccgccgaaatatctttcagaaggtatccgctcgcgccgcccgcgatggcacttaatatataatcgctgtcgtcaaaggtggtgagcatgatcacttttactccgggataacgttttttgatctcgcccgtggtgacgacgccgttcatgttgggcatgcggatatccagaagcaccacgtctggcacttctttttccatcttttcgagcgcctctaccccgtccgacgccacggcgatgacgtcgagttcttcgtcggtcgcaagcaccgtcttgatgccttcggacaagatcacctgatcgtccacgatcatcactttaattttcatcggttttctccttttcctctttcgcacccgtcttcaacgcccccggaaggctcacgttgatctcgaacccttcgcccgcttccgacacgaaattgatcatgccgcccagtttttccgctttattgcgcatggcggacagcccgaacccctctttaaaggtatgcagatcagcgccgcagccgttgtcggagagcaaaatttccacaaaattccccatgtctttaagttcgaaaaagaaagccgtgctccgtccgtgtctgaggccgttggaaatgccctcgcgaaggagattccccacaaaccgctctgcgtcctcggtcatggaaacgtcgtctatcttgctgcggatggtcacgtcggtgccgttggtcgtttcccccacgatgctttccagatattccttgaaagaaacgttttcgcgccgccccgaaagaaggtgcacggaaaggcgcagttcttccagacaatttttcgcctgcacgttggcggcgacgatgcgctttttcgcctcctcggggtttttgtccaacatcagttttgccgcttccgtctgcatgatcaccgtcgtcagcgaatgccccgcagtgtcgtggatatccttggaaatgcggttgcgctcttctaagagcgtcgcttcctccaacttatcgtaggcgcgcaaaagttcgtttttgctctcttccagttcttccatgctcttttcgatgagtttgttctttcggtacaccgtcatggcgaaactgaacatgataaagtgcagtatgagaataatgaggtcggtaaaatactgcgaagaagtggcaaacgccgattccagcgtattgctgacgagcgccactaccgcgtattcgatggtatatacgccgatgttgacggcaaacatgatgatattgtcgcgcagcgtggggctggacaggtaatattcggagagaacgagcgcgtacacgagatagaggtacgaagtcgaggtctgcggcggtttgcgccaggtggcgaacagcgtcaaaagcaccagcagaatagagtcgagcacataaaaagggatttttttgtagaaatcgcgcacgaacaatgtctggatcgccatcacgacgacgagtacgaccgcggtcggcagcgtcagaagaaagagcgcgccgtccatgttcgcgagcgccaccgtgatgcacgtgacgacgagcaagatcagaatgatgaactgcaagatgcggatgacgctcttatccgttttcaggtcctttaacgtcatctcactttccgcccagaaaacccagcgcttttgaaatgcgttcgagcgagcgctctttgcccaggatctccgccatttcgctcgcgccgccgggcgtattttcccgccccgtgagcgccacacgcacgcaccagagcacctgtccgtttttcatgccgcgcgcagcggcaagatcgcacagcgccgcgtagatcgccgcgttttcgaacgtttccagcgaggacagtttttccagcgcgtcgggcaagacttcacgcgcgatattctcgtcggatttcatctttttattgaaatacagcgcgctgtcgaaaggaccgaattcctcgataaaatcgattttggagggtatatcgctcatcacttcggtccgcgtctttaaaatgtgcgcgagtttcagactgtcgtacttgccgtacgccttggacttttgcaaaaaaggctctgagagggacaaaaactcttcgtccgtcatcgccttgatatattcgcccgagagccagcggagtttgggttcgtcgaagatggagggcgatttattgatgcccgcgagcgaaaaattttcttccagttcgcgcagcgtcatcttttccacgttggatttgggactccagcccaagagcgcgatatagttgacgatcgcctctttcacgtatcccttgtccacgaggtcctgataactcgcgtcgccgttgcgcttggaaagtttttcgtggctgttcttcatgataggcggcagatggatatacgcggggcgctcccagccgaacgcgtcgtacatcagattatatttgggcgtggaagagagatactcgctgccgcggatgacgtgcgtgatgcccatgagatgatcgtccaccacgttcgcgaaattgtaggtgggcatgccgtcgctctttaaaagcacgccgtcctcgatgtccttgaaatccaccgaaacttcgccgtacacgaggtcggtataactgcccgtgccgctctcgggaatgttctggcggatgacgtaaggcacgcccgcggcgagtttttcccgtatttcttccttggaaagatgcaggcaatgcttgtcgtatcgcccgatcccgttttcgtctttcagagaatcgatgcgctccttatcgcagaaacaataatacgcgccgccgagttcgacgagtttttccgcatacgcgcggtagatcgcgccgcgctcgctctggatatagggaccgaaatccccgcccacgtcgggtccttccgcatagcggatacccgcgtctttcaaggtatcgtaaatgatctgcacggcgccatcgacgtagcgcttgctgtccgtatcttcgaggcggagaataaaatcgcccccctctttcatcgcgtacaggtagccgtacagcgcggtccgcaaattgccgatgtgcatatagcccgtgggtgagggcgcgaatctggttctgacttttttcataattttcggatgtccttatttttgatcaaattttcaaatttaaactcttcgtagatttctttcatattggtctgcatgaaataactgaaaatttcgcctttcgcgtagatgatatgatcgaacaaacttacgttgtgcatactcagcagcgccgacaacatgcccgtagcccgatcgtcttccaaagaaggctgcgcgctgccgctcgggtgattgtgcgcgaagatcacgctgcgcggcttgacggatacgagcgtttcggctatttccatcggcggtatgccgacgctgtcgatcttatagtcggtgacggtcttgacgagcatcagacggcgggaagcgttcaacagcagcatttccactttttccgtgtcgcagtcctcgaacaattcgcggacgatctctttcacgtcgtgcagccccatgatcttcggcttttttcgcacaacgccgccttgacggcggaacgcctcgccgatgacggcaagactgcgcgcggcggaagatccgatgccgcgcacggtgcaaagttgtttttcggttgcgccgagcacgccgttcagatcgccgaaagcgcttaaaagatcgtgcgcgatcgcattggtattgacgcgcggcaacaagggaaacaacatgagttcgaggatctcgtgatcggacagcgctttcgtgtcgcggctgaatttgtcgtataggcgctgtctgtgtccttcgtgcatcttttcccccgttcctcgtatattttttcgggtttacgcccataaatgatggaaaaacattaaaaattccgtcgatatcattttaccatattttaaaaaaagagtataattattttagcggcaaaatcaaaaaaattcgcaaataatccccgccgcgaacagataaggacgttatatggaaaaatatctgaacgataccgtaaaaaccatacaggaactgatccgcatagacagcaccaatcagcccgccgaagagggcatgcccttcggcaaaggcgcagcccgcgccctgcaagcctttttgtcgtgcgcggcggcgatgggctttgaaacgcgcaattacgacaattacgtgggagaagtacttttcggcgaaggggaacctttcgccatcctcgcccacctcgacgtagtgcccgcaggcagcggctggacgcacgcgccgttcggcggcgagatcgaaaacggcaaactgtacggccgcggcgcaatggacgacaaaggccctgccgtcgtctgcctgtatgcgctcaaagcgctcaaagacgaaggctttcagccccgaaagacgatcaaactcattgtgggctgcaacgaagaatgcggctggggctgtatcgaccactacaaacagtgcgccgagatgcccaaagtcgggtttacgcccgacgccgattttcccgtcatctatgcggaaaaaggcattctgcacgttaaattttattttcccgtggaaaacgcaccctttaccgccctgtacggcggcaaaggcgtcaatatggtgtgcgacgaggcgttcgcccaatgcgacaaaacggagggcgcggagcgctattccttgcgcgtcgaggacggcttgctcgtatcccgcggcgtatccgcgcacggttccacgcccgaaaaggggaaaaacgcgctggaaccgctcttcgcctatttcgcgcgcaccaatgaagatatgcggcgcgcccacgaaattctgttcgaggacaaattcgggctgaaaaacttttccgacgaaacgggacggctgaccatgtcgcccgacgttgcaaactacggcgacggtatattaagcgtatgcgcggatatccgatacccttccaccctgcccttgcaggcggttctggacgttctcgataagacgggcgtgcgctatgaagagatccaccaccagcgcgcgctgttcaatcccaaagacagttttctgattcagactttgcagcgcgtatacaacgaagcgacgggcgaacgcgccgaacccatcgccatcggcggaggcacctacgcgcgcgcgctcgaatgcggcgcgggattcggcccgcagttgtgcggagaacccgtgaccattcaccagaaagacgaatatatctcgatcccgcacgtgacctttcttttaaacctgtatcgccgcgccgtcgaagaactgaccaaatagccaatggaaaaatctatgcaaaaatggatgcgccgtgacgcgctgcaagccctttccgttttttatttcatcggtgagaacgatgcgtttcagaatttttccgcgcgaaattcggacgcggaaatgaaaaaatactggcggaaagaagtaaagcacattttgaaggaaaacaaatcgctcatccgcaaaagtttttctcccgagatcgcgcgctatttttatacgccgcacggctttatccgacgctgcaaaatcgacgaagagattttcgaagcgatcgctgccgaaaagcgagctatgcgacaaaagctggatgaggcgatcgcggccgaggggcttctccctttcgatggcgaaaactatcgggattttcccgcgctgaaagaccgcgccctgttcgaagactatcacgacgacgacatggcgcagccctcttttgccaaagacgaggtgcttttgacgatcaaaaagagcgcgggcgacatcgaactgcggttttgcggcgttgcggaatttcacgccgatctccgccctgcggatgtcgtgcaatttctcgaccgtgaactgtaccgccgcgcggacgggctgtacgaatacgatctggaatgtacttcgggagaggcgcgcatcgtctttcaaagcgcggacgcgcgctgtgtccgtcccgtatccaccgtgc

SEQ ID NO: 3072 - DNA, 4093 bp, Unknown
  16S sequences of unknown bacteria
tgcgcctgcgggcgcaccaaagggctttcctcggggcaaacaatcggcgcggttcgcactgccgtgcgctccgcttgttgtttgcctgaacgaccggtcgctaaccgccttcggcggttgtatccactggatacccgtttcccttcgttcccctttggaaaccttcggggcccgaaagctggcgggatttccctgtagggctgcaagcccaatcccccgcccctggcgggcttcccgaaacgccgggactgccgccgatcatcggggataggaacgcagtgcttccgtgaagggcagcgtctcggcgggagtgccttccggcgcgcggaactgcttgcgcatgtagaccgtggtcagccatttgccgtgcttgaaggccacgttgtccatgcgatggtgctccacaaagccgaagcgccggtgcagggcgagactggcctcgttctgggagtcgatgaccccaaaggcacagtagaaaccctgctcctccaagcaattcagcagggtcgtgtacagcagagagcctacgccctgccccttgggacagtcgggatgcagataaatggtcagctcggcggtgtgccgatagccgctttggggacggatgggctccgcgttggcaaagcccagaggacggcccgtttcatcctccgcgatcagaaaaggatattgtttcgaaagctcccgaatgctttccgcataggccgccacgggctttgcgcggtcgttgtagctggcctcggtgttgtcgatgtagtagcggtacacttcctgaagaaaggccgcgtcgctttcccgggcggcgcgcagatggatgtgttcgttcattttcccattcctccgcacagtttgagaatggccgcctgttcctccgggctgttgcccaccaatagggttttgaaattggtgtacgtcaccagacccgccggggagttggaggactttttcacatatttccgcagagtgtagtccaccggcagggccggatgattgcgccccttgctgaaataggccgccagcttggccgcatacaatagcgtcgcgtcgctgggctcctgctccgtatggacgatcacatgagagccgggaatgccctgtgcgtgaagccaggtctcgttgccccgggcgtgaagggtcagccggtcgttctggatggagtttttgcccacttcgatgaccgttccgtcgggagacgtgaagcggtagggcttgccctcctgcagcttcttctgcttgcggggattgccctccggccgcagaaagccgttctgcgccagcaggtagcgaatctcgcccatgtccgccgtggtctggcagttttccagatcttccagcgcgctttccagcagcagcaggtctttgtcgatctgcaccatctgctccgcggcatactgttctgccaccttggccttgcggtattttttatagtagttctgggcgttctgattgggcgttttgcgggcgtccagcggaatttcgacctccggcatcccttcctcgtagtagttctgtacgcggatgcttttctggcctttttccatcaggtaaagattggcggtcagcaggtcgccgtagattcggttcttttcggtctggtcgctctgccgcagggtctccagcatgatgctttttttcttttccacccgctccagcgcgcttttgatgtgccgttgcagaccggcgcttttctgctgcatccgcatccgcaggtcgcgccccaggtagaactcgtccatggcgcggctcaggctttccatgggcttctgattttcttccgggaagctgcggtaggggaaggggaagaaatcctgcgccagcccggtctcgtcatagagtgtgacaggggagaaacggtctgccagacccgcaaagaagtccgccagtttgccacacacgagaggaagattcagctcgtccagctgggaggaaggctccacaccgatctgggcgcagacttccttggagcacagccccgccatgccgctgaccgactccatcagcgccttgctcagggacattttcagcccggaaagacgggcaagcagcgcttcggcggatatctcctccggggtcagcttttcctgccgggggggaagatggtattcgtctcccggcagcagggtacgcacccggctcatctcgctgttgacgtggcggatggcgtccacgatcacgccgtcctgtcccaccagcgtcaggtcgctgtagcgccccattacttccagatagagtgttttttccacgtggtcgctcatttcatccagcgcgtcaaaacgcacggccaaaattcggtcgccgaataactgctccgcccggaggacccgcgcgcccagcaggtgcttgcgcatcagcatacaaaacatgggcggctcggcggggttttcataattctgtcccgtcagctgggcccgggcctgattggcgttggcgctcagcagcagccggtgattgcccccgccggagcggatcagcagcgtcagcgcgtcccgttcgggctgattaaccttatccacccggccgcccgccagcttttcattcaattccctggccatgaaggacagggtaaatccatccatcggcatgatgaaacctcctgtttgccgcgccgccggaggcttccggcgtacgcttccgtcatgatagcatatccggcgcaaaagtacaattcgtcatgttcgctctctttggttcatacattgaaagtgcaatcgacgcagaggagaggattggtttatgaagatcaaacgggcggacattgagcggatattgattctgtgcgcggcggcgctggtggtggttctggcgctgcggagcggcggacagaccacgtcgcaggtgctggtggaaacggcagaggtgccggtggagcagaccagcgcgtccacgaagggggacacggtttccgccgtggtgtattacgaggacggggacggctatctggtgcccgtgacccggcaggtggaaaagacggacggcatcgccaaggccacgctgaacctgatggtcaagagcggcgaaaacgacatgcaggcagccaggctgggcctgcggacggtgatccccgagggcacgaccttcgacatcgacattgccaacggccgcgccaacgtgaacatgagcaaggaagccctgtcctgttccggggcggagcaggagaatctgatggtgaacgcggtggccggggcgctgagctgcttttccaccgtggatgaagtcacctttgagtttgacggcaggaagcgcagcaagctgacctacggcacggatgtcagcggcgttttctccggtgacgagttgaatctggaatcggtggagacgttctccaaggatgcgaatctggtcaaactgtacttcccctcccagacgggccgtttgctggtgcccgtcacccgggcggtcttcagcaatgcggacgtgagcaccgcccttctggagctggccaagggccccagaagcgacagcggtctggaacgcgccctgccggaggattgcggcatcaagagcgtcgtcatgaaggacggagtcttttccaaggagttcaagcagaccatggaagagacggacggcggcaagcaggccgtccgggcgattctattcacctgctcccagttccccggagtgaaaaaagtggaagtgctggtagacggcgagaagcccgcccttcctgaggacacccgctccacctttatcaacgacgagcaggaggtcatcgcccaataccccggcgtcgtcgaactcgactagcaggggcagagcccctgcaccccactccgcgcccatagggcgcggggctactcgatggaaagcagcttggctgcggagttaccgccgctcggcgacaggcctcgcgggcaggggcagtacccctgcaccccggactgcgcgctatgcgcgcagggcgctcgggcgacatgcagcttggccggggttttaccgccgctcggcgacaggcctcgcggctcgcgggtctggtgcagattcccgccagctgcacagcaaagaccgccattcggcgacgggcctcatggctcgcaaacaaggccagcgtggatttgatttcccgctggccttttgccttgcgaaaaaacacaag

SEQ ID NO: 3073 - DNA, 4910 bp, Unknown
  16S sequences of unknown bacteria
gtggtttgccagcgggcggcgcgcatatacatattctcgaggtgttgacggatgaaaaaactggccgcgctcatgatgctgctcgcgtgtctcctgccctgccaggcggcaggcagcgaggaattgtccctgcctgccaagggcgccgtgctgattgacggcgcttctggtcgcgtgctctttgcgcaaaatgccgatacgccctatcccatggcgtccaccaccaaaattatgacctgcctgctcgccgtggaaacctgctcgccggaggagatcgtcaccgccgggcccaatgccgaaggcgtgcctggaacttcgatttatctcaccgaaggggagcagttgaccatgcgcgatatgctctatgggctgatgttgcgctcgggcaacgacgcggcggtggccatcgccgaacacatcgcgggcagcgtggacgccttcagccaaatgatggatgcgcgcgcccgcgaactgggcgcaaacgctacctataagaacccgcatggcctggacgccgaaggacacgaggccagcgcgctggcgctggccttaatcgcccgggaagggctacaaaacgactggttccgggaaatcgtctccacccagcgcatgacgataccctggtccaccagcgaatacaaccgcctgctggtgaacaaaaacaagcttctttccagctatgaaggcgcgctgggcgtaaagaccggcttcacgtccaaagccgggcgctgcctggtattcgccgccgagcgcgatggacttacgctcatcggcgcggtgctcaacgactacacctggttcgacgacgcgcgcacgctgctcgactggggctttgaaaactataccctgctcaccgccgccaacgccggggaaaccatggccaccttgcccataaccggcggcgcggaaaagagcgtggacatcgtcgccgcggaagccctgaccagcgccgcgcgcgcgggggaagcgcacgaaatcgcgctcaacctgccgaaatccctgcccgccccctgcgaagccgggcaaattgtgggaaccgccacgttgctcattgatggcgaagcggtggcaaacacaaatctcctgtgcgccgcttccgtggaagagggcggattttggaacatgctgaaaaaggccctaggcctatggagcgtcgccggttgatcacaccggcacgcccaggttacgcaacagcgcttctccttcctctcgcgtgcgcacgcccaccgtgcaataagcgttcccgcccaactgcgcgcagacctcctgcacatcgccaatcacaaaattgcgcttgcccgcccgggcgatcttctggtacacctccatccagtgcttggcgctgggcttgccatcgccatacacccactgcacggccttgaggcgcggcagcgccaacagcatatccaggtgcgcgagttggcccacgccatccagatggtatatggcgttgtccagccgctggcaggcgtcctcgatgtgcggcaacacaaaggtgcggaacatctccgggccgatcatataggcaaaatccgattgcagaatgtaggacggcgcggcgctgtaaatgccgctccaatccgaatagcccggattgccattttcccgcagcaccgccgccaaatcccaatacgcctggaaccaggcttcctgcgcctcgccgcacagccgaagcacttcctccggcgcgtcgtagagcgccatgagcaagttttccgcgccgcaaaaggtggaaaccacgtccatcacgccacccaaatcgggcatgcccatcaggaccatgccctgccagcgccgcaatccctcgcggtaaatctccttaatgcgccgcacccagcggttttccgggtcgtagcggatggaaatttcctctatgggcagttctttttccgggaaaaaccacacgcgccccgagctattgtccagtttcgcgccgcaaaacgcggccaacacgcccggcccaaaagagttgaaattgacaaagggaaacgcgtcgcccaagaattcctgctggctgagccaatcgtccagcgcgtccaccacttcactggcgctccagcggaaatcgtggcaattgctctggtcgagcaacggcgccgcggggcgcgggctctccggcgcatacgcgccatacaccaccacttccgccgcgggccgttccagcgtgcctgcccaccagcgcgcaaaggtatcccgcacgcgcgcccaacgctcctgggaaaaatgaatcgccatgccgcttctcctttcgctccctacgcgtcctcataggaaaacaaagcgtccaccgtggtttccaacgcctttgccagccggaaggccagcgaaagcgttggatcgtatttgtcgttctcgatcgcgttgatggtctggcgcgaaacgccgcattgccgtgccaattcttcctgcgatagcccgcgcgccttgcgcctttcgcggatggtattcttcatttcagccgccaaactttcttttataatgcaaaagctgcgccaaaaagaccaggcaaagcacgcagagcatcaaaaacgcgtccatcccccgcgcggggcccaccatatccaccaccacgcaggcgatcaaatagaccaccatcaccagaaaggtgttggcacatgctttgccgacgatcatcttgcgccgctcatctccctggcgcgcaagctgcgccagcacccacacgatcaaagcgcagcacagcacaaaaatggcgagcgggatcaaacccaaaatgttcatgtccatacctccaaatgtcaaaactatttgacatttggagtatagcatagtgagccgtgcttgtcaacacaaagtttattccaccaccagaatttcgtggatgtgcacgcgctccacgcgtacgcgcagcatgccatttgcatacgtccaatcgaccggcgcaaaagaaggcacgagggaaacggagcgcggctcctttgccagcgggcaggcgacgcgcactggacccacctgcggtacgctttccacaatgggccgctccggcgaaagcgggttttccgaggccaaattgaacaagtgaacgagcagtttgccatccttttcgcgcggcgtaatgtacagataagcgggcgcttccaccgaaagcagcccctgcgcctccatggccgcaaagcactggcccaatacagcgcgcagacgcggatagtgccccttatgatagtatgtgaaggcatccgcataaaggcccatgacgcgccctttgccgcaatcgtttaccgtggcaaaggcgatgttcgtgttttccgcaaacgcgtccgtatcccgggaattctggcaggcgagcagcacgcgcgcagaaaccggctccacctggatgcgcgggcccgcaaccgccgtagtttcctgccctttgcgcacataaaagacgctatccggcaggtctttctgcgctttcacgccgagaatttcctcaaacgccttggtggccgcgccggataccagcagccgtccaccgttttccgcataagtacgcagccgcgccaccacattttccggcaaaccttcctgctccggaaccaccaccaacggatactcgcccagatgcgccacggcatccgtcgggttcatgatatccacgctgatgtggttgtccatcagagcgtgcaccgcgcccgccaccgcgttcttgccatgcccgccggagaagaaatccgcgcccatggccttgtaataatgctccggcgcgtgcagcaccagcgcctgcgggtgcgataccgtatcctgcgaatacgcctgtcgcgcccggcaaaatcgcgccacttcggccaattcgtccatgtgccaggcgatcaggttgcccgtacggttgggcgtgtcgtacaccatgaacgcgccgcccatggacatcaccaccgctgcttcctggcaaagcgcctgcgcggatttgaattcccagcgatccatcggcccatcgctcgtgaagccccaggccatcaaatcccatttcaagccgcgattggccataaagcgcgattcgagcagcgccgaatccaggctccagatccaggcgaaatccccgctgagataatcgaccggcgcggcaatggcgtcgggctggcgaatcgtgtacatccagttggagcaaatggtgcaagtgggctttgccgcgtgcaccgcgtccgcgtaggtcttcacgtgctccacaaaaagcttgcgcgtgaaggcgagccattcgtcccaatgtggctcgtcctcccccatcggcgcggcctgcgcgccggtttccgcgcaaaagcgctgcgtgcatcgctcgcaatagcagggccgggtcgcccaattttcgccatccacccaaaaaccgtccacatcgtattcccgcacgagttccagcatctgcgcaatcatgtaatccgtataaggcgaaagcgggcatgtgctcacttcgcggcgcacttcgccgcttgtgcactcgcgcgcggagggcacccgcgcccactccgggtgccgctccacggcagcctgatcccacacgccggaaaagtgcatcaccagcgggatgcccagccgttttgtcgcttcgcgccatacgcgcagcgcgtctttctctatgcccggcgcgggaacgcccacttttgtgggatagctggcatagcccggatggcccttgcaatcgcactgcacgaaatccgggcgaatcttttggaactgttccagcaagtgatccaccgtcacatcccggcccaggtgttgatccgctgcgttggcgtggatatcaaaatgcaagccaaagaaaaccccgtcatgccaattgcgcacgccattatccccctttttctcgttatgcaaaaaaggaaccgcctgcaagaagcggttcccccattgtttcgcttagcccagaaccttggtcacaacgccagagcccaccgtgcggccgccttcacgaatggcga

SEQ ID NO: 3074 - DNA, 6237 bp, Unknown
  16S sequences of unknown bacteria
cgaccgcgaacaggagcaggaagcgcctgccgccgagtcgctctcgcgcgtctacgacgacgagccctggggaactgccgtgcgcatcatcgtgggcgttgccgtgttctgcttcgcgctcggcgtgacgcgcgggtacccgctcggggaatcgctcgcgctcacccccgcagagcgcatcatgcaccagctgggcgtcgtcatcttgagcgcgctcgtcatctggtggaccctgcttcgagagaagcgcctgggggcgtctgccctatggcgcgtgctcgtcatgctgatgggctgcagcgtgctgctgctcacggtgctccccgcgcggttctggggcatcgcaatcgcgcttgcgaacctgaccgacacgttcatgattgccgcgctgtggatcacgctccaggatatctcgagccacacgtcgcgccacccgtacgcgatcttcggcgcggtgtggtcggtgcgcatcctcgcgcgcgccgcaggacgcgggtgcatgattgcgttcggcccgatgctcggcggcaacgcggcgattgtcggcatcatcgcgtttgccgtgtgcgcgaccgtcgccatcatgttcaccgacgacgtccccaagaacaggccgctgttccagtacgacgacctcgtggcggcgcctgcgcaagacgaggaggcaacagtccccgttatcgagcagagggctgcagaagtgcacgagcagtccggcgtggccggtgttggcgacggcgacagcgcattccaggaacgctacgagctgtcggaccgcgagatggaggtcgtgcgactcatcacgcagggacgcagcaaacgcgaggtgggagaacgcctcttcgtctcggagaacaccgtgaaggcgcacgtcaagcacatctacacgaagatgggcatccacaacaagagagagctgctcgatgcctacgagcagatgcgcacgagttgacccgtgcagcatgtgccccgcacgccatgcgccccgctcacgtgggatgcgtggcagtgccacgtttcccgcacgccctgcgccacgtgtgtggcactgccactcttttcgcgcagcgcgcgccggatgtgtggcactgccactcttttcgcgctgtagccgccggatatgtggcactgccactgttctctcgcagcgcgcgccggatatgtggcactgccacgtttctcgcgcggggcgcgcggcgcgcgggagactcggggctataatcccatgcagagcaatccaggcaggtcaacagaggagacacaccatgcgcatctcgaaaaccgcactgggggcaggagccgtcggagccgtgctgggcgcaggggcggccgtcatcgcccgcaacgccgcaaagctcaagccgaccccaatccccgatccccttcccgcatccaacgaacgcggcaccgacgagtccgtcgagcgcttccgggagatgctcaagctccccaccgtctggggacgcgaagaccccgacgccgaccacacgcccttcgacaacttcgtcccgcgcatgcgcgagctctacccgcgcaccttctcgcagctcgagctcacgatgatcgacacctacgggattctcctcaaatggaagggaaccgaccccacagcatccccggtcgtgttcatggcgcatcacgacgtagtcgaggccaatcccgagggctggtcgcacgacccgtttgccgccgacgtcgccgacgggcgcatctgggcgcgcggcaccgtcgacaccaagtgcatcctcgccggcctctacgaggcggccgagaccctgctcgagcgcgggttcacgccggcgcgcacggtgtacctgtggtcctcgaacaccgaggaggacaacggtcccaccaccccggcgctcatagcctacttcgaagagcacggcatcgtcccggggctcgtgctggacgagggcggcgccatcatcgacaatcccccgctcggcataagccgcgacttcgccgtcatcggcgtcgccgagaagggcctcgccaacgcctacatcaccgtcgactccgcaggcggccacgcctccacgccctcgcccgacgactccacggccaggctggtgacggggctcgagaagctcctctccaacccgcccaagccgaagacgaacgccccgctcgaggccatgctgcgtgagcttgcctcgtacggctcgttcggcatccgcgcggtgctgggcaatctgtggctgttccgcccgatcgtgagaagggtgctcaccgccgaccacgagaccgcctccatggtccgctcgacctatgcgctcaccgagcttcaaggctccccggcagccaacgtgctccccaagcaggcgaaggcgacgctcaacatccgcatcgacccgcacgagagcgtgcacgaggtggtcgagcgcgtgcgcgacgccattcccggcgcgatcgtcgacgtggtcgaccccaacgagccgtcgcgtatctcgccgttcgaggacgaccccggctacgactacctgcgccgcgtgatccacagcgtctaccccgacgccggcatcgcgccctacgtgcagtcgagcctttccgacgcccgtcacatgtcgcgcgtcttcccgcgcacgtaccgcttcgcgggctttttgctgcgcggcgaccagcgctcgcgcatccacgggcaagacgagaacatcgacgtcgagagcttcaagcgcggcgtcgggttctacatcgagctcatcgccaacctcgacaagctggaggtgtagcgccgtgaacgacgcaacgaacgccaaaaggaagcggccgttctacggctggtgggtcgtcgccggcggattcctcctcatggccacctgctatgccgtcttcgtgaactgcatcccgctgttccaggcgcatgtcgtccaggacatggggatgagcgtcggccagttcaacacgggcacggcgctgtgcacgatcgtcgcgctgttcgcctcgcttgccatcggcaagctcatcgacgtgtgggacgtgcgcatcctgggcaccatcacggtgctcgtggcgttcgccgtgctcatcgcgctgtcggccatgagcgcctactggcagttcctgctgtgctgcatcctcgcgggcatcgtggtggtggccggcacgcgcctgctcgcgagcgtggtcgtggccaactggttcacggtcaagcgcggcctggccgtctcgatcgcccttgccggcagcggcgcgggcggcgtcgtgctctccccagtcacgagcgccatcatcgcgggagccggctggcggcaggcgtttttggtcctcgccttcgtctgccttgtcttcgggctgccgatcatcgccgccacctggcgcaacaagcccgaggacaagggcctcgagccctacggcacgcatgccggcacacccgatgaggtctcaaagggcaaggcagcggacgcgcccgtgcgcgtcgcgctcggctggaaggtcgtgcgcaagagcgccgcgttttgggtgctcgtcgtgggcttcgtggcgatgggcgtcatcaacggcgcgatcatcacgaacgcggtctccagcttcacctccgtcacggtggctggcaccgccgtcgtgaccggcgggcacgacacgcagtgggcgggcaacgtctgggcgttctacctgttctgcgtcatcatctgcaagatctcgctcggcgcaatctacgaccgtttcggcctgcgccccgcaacgctgctcgggacggcaacttgtctggccgccgccgtgttcctgtgctttcccaccaccgactggggcccgatcctcgcctgcttgacgttcagcttcggcacctgcatgggcacggtctgcccgccggtcatggctgtgcgcgagttcgggaagaaggacctcggcaccgtgacgggcatcatcaccgccttcgagctgttcgggtcggcgctcggtgccgtggtatcgggcctgctcttcgatgcgttttactcgttcaaccccgcgtggatcatgacgtttgcctgctcgcttgtcatgggagctgccctgtacgcgagcatcggcatggcacgcaggctcgccgagcgccacgctgccaccggcaacgattcagccgccggctagcaggagacgaaaagtaatgtcgcattcgctcgatggcgcagaatcgcagctcccgttttgggatgacctcacgcaagcgcagcgagagctggtagcagagtgctctttgatcagacattttgcgaaagacgaagtcgtaaaccgcgcggacagctcgtgcatgggactcgttcttatcctgagcggcggcatccgcgtctataggggaaaggtcgtgagataagccatgaaggttgtgatcatcggcggcgtggcgggcggcgcatctgcggcggcgcgtctgaggcgccttgacgaacgagcggaaatcatcgtgttcgagcgctcgggattcgtatcgtatgcgaactgcgggctgccgtactacatcggcggcacgatcgccgaagagcgcgagctcaccctccagacgcccgagagcttctggaatcgcttccgcatccgggtgaagaccaggcacgaagcgctcgccatagaccccgcggcaaagaccgtgacggtaaaaaacctctccacgggcaagacgtttacggaaagctacgacaagctggtcctctcccccggtgccatgcccacgcgccctcccctgcccggcatagattccgagaggatcttcagcctgcgcaccgtggaggacacgttgcgcatccatgactacgtgaggcgcgagaagccacaaagcgccgtgctcgtgggcggcggctacataggcatcgaagtcgctgagaacctgcgcgagctgggcctcgatgtgacgatcgttcagcgccccaagcagctcatgaacacgctcgactacgacatggccaccttcgtgcacgcgaagctgcgcgagaagggcatccggctcgagctcggccgcagcgtcagcgggttcgaggaacgcgacgggcagatcctcacgctcatcgacggtcaagacccgctgcccgccgacctggtgctcctcgccatcggcgtcacgccggacagcgggctcgcaaagcaggcggggctcgcgctcggcatcaagggctcgatcgtggtcaacgaccgcatggagacgagcgcgcccgacatctacgcggtgggcgatgcggtacaggtaaagcatgccgtcacggggcaagacgcgctcatcgcgctcgcaggccccgccaacaagcaggggcgcatcgccgcagataacatctgcgggctggacagccgctaccgcgggtcgcagggctcgtccatcatcaaggtcttcgacctcaccgtggcgagcacgggcctcaccgagaaggcggcggcctcggcgggcatcgacgcagattgcgtcgtgctctcgcccggctcccatgcgagctactacccgggcgcccgccccatgaccatgaaggtggtcttcgagaaggggacgttcaggctgctcggggcgcagatcgccggaggcgagggcgtggacaagcgcatcgacgtgctggccgtcgccctgcacgcgggcatgcgcgcagacgagctcaaagacctcgacctggcgtacgcgcctccctactcctccgcaaaagaccccgttaacatggcgggattcatggtcgagaacctcaaaagagggcttgtcaggcaatggcgctgggacgaggagccctcgctcgcgcgcgacggaagcatcacgctgctcgacgtgcgcaccgccgcagaatacgaacgcggacatatcgatggctttagaaacatcccggtggacgagctgcgcgaacggctcggcgagctccgcgacaagccgctgtacgtgatctgccaaagcggcctgcgcagctacatcgcgtgccgcatcctggcgcaagagggcttcgattgccgcaacttctccggcggctatcgcttctacgccgccgtgaccaaggagcgcggcatgggcagctgcgcgactccctgcggcatggaccggtagaagggcgcgcaggcgaacggctggcagtcggcgggtttctctgtctattgccgtaagcgatggctatccaacatattttcgcaatgtcgggcgcacggcaggtttcctagaatacgagaccggcaagggcgcctggcgtcttttgccgacgacacaagaggaaaggcaggaagcgcatggatgattcgagtttcgaggcaatggcagcagagatccagggactgctgggcatagacaagacccgccac

SEQ ID NO: 3075 - DNA, 6407 bp, Unknown
  16S sequences of unknown bacteria
cattatctttaaatattcagtcgcagtttcgctgagctttgcaatatttataataacagggcttgaagcaagaagaacagctccggaaatgcatccgctgacaatggctattttgcaaagctttccgccatactcttttgcagtttcaagattccccgcgccgagttcgtttccgaccataattccgccgccggaagcaacgccgagacagaagcacgcaatgaggtttttggcgatattcgcgatagagtttgcggcaactgcatccgagcctaaatgtcccattatcacggaatacatggtaaatcccacaccccaaacgatttcattgccgagaacagaagacgtgtacttccaaaaatcgcgtcgaagcagcttgtcatcgtgaatgatgttatgaagcctcagtttgacgctgtccttttttgcggtttcgagaatgcaccatataacctcgataacccttgacaaaaccgttgcaagcgccgctcctgctatttccattctcggtattccgaacaatccgaaaatcaaaacagcgtttaaaacaaggttcacggctacgcttgttgaacttatgatactggactttccggcttttccgcagtttttcagtgcgcacaaatacagctgagatattccggtcagcaaaaacgaaagcgataccgtccgcagatacaccgctcccccgtcaataagtggctgttcatccgtgaaaatgcgcataagccccctcggaaagcatgaagcggagataaaaaacacaaacgcgattgccgtcgttattttcataacataagcaaaaattcgctcgactgccgctttatcttttttgccccaatactgtgccgcaagcatggaaagtccgatggtcattgccgctaaaaacagattctcgacaaatgtaatctggcttgcaagtgaaaccgcggacaaagcgtcctgagtcagcactccgagcataatggcgtccgaagcactgacaagcgccagcataaactgttgaaacgcgatgggcattacaagcatcagcagctttttcacaaatacattcgttttgttgtctttcatttgagtctcttattcttatgatttaatcacatacttatatcataaaaaccgctctctgtcaatcctcatttcggactaaaaatatttcaacttttttcgcaaaacctattgcatttcgccacggactgtgatataataacatcgctcgagtgagtatggcctgttggtcaagcggctaagacgacgccctctcacggcgtaatcgggggttcgattcccccacgggtcagttataaaggtcttgttacatgattcatgttgacaagcctttatttttttgatttccgcaccaaaaagccgcttctgttgtcactgagtatacgcctgtttggcaatgcctttatgtatgcaaaccgcattttgagattggttttaacgaacttttatgatataatcaaaattcataatctccgcaaggacggccgccgtatctgtatgctaaaatgcaagtacagaagggagatgactttatggaaaacaaaaatttaattgacaaagccatcggttttatacaaaaaactctaaagacaatctgtcgctgtaaagcattgcggaaaacgcaggattttcactcacctattttgattcaatattcagacagcataccggctatagccctgtggaatactctcgcatttacaagctcacgagaagcgcgcttgaacttcgcagaacatccaaaacagtacttgaaattgcgcttgatttcggctacgccagtcctgagagcttcacccatgctttcaaaaatttttacagtattacaccgagtgaataccgtaaaaagtatatggatgaagcagttacttggcatgatctttccggtaaaattgcaatcagccgtttcagacgaacatttcctgaattaaatgtatcagatattgaccttgcacttgatttttgcttcactcataatcctctcaagtatgctgaggacatcgtcggaatgactgttgcagaatccgaaatcctcacacttggcaattccgagccgcttgaacattttgtttatgtgtcggattacaattccgctgtgcctgctgtagcgctcgtctgcgaaaccgagtcagatgcgctgccttacctgaagctcttaggaaaacttacaaatccgagattctctgtacgcaaatcgggtgatacggaatgggagagcttttatgccgaagtagcaaagcttgggttgacctgccgttgcggatacgacatgatctatcccaaagatacggttgctgttcctgaatatgatggtatggtaattcgcttgctcaccatagaagatatgccgttcataaaagtgttcaaacaaagcggcggctgcgtagaatgccacatcaaagcactccaaatccactttgacggaaaaggcaacgtcggtatgaagccgatgggagtatttgaaaacggaaagcttgtctgccttgcgatgcctacacttgaccggattcgtgaattcagaaaatacgatattggtgctatttttacacttaattcgccaaacaaggaacaagctattgatttgatgtggaagtatgcgattgaaagttgtattcaagataatgctgccatcggtaatgctaattcagatgaggatgactcacctctcggattagctgtttgcgagcgcaacagtcttgtgaaagtcgctaaaaattgccggtacagctcctgagtccaacatttattttacatttatctacaaacctaaggtcttgttacatgatttcatgttgacaagcctttatttttttgattacggaaactatagccagatacaaaaccgcaaatgccgttatccctacgacctgcgactgtattatcctgtcaagcacgattactttcaatacagcagagagcagaatcgctatgcatggcttaaaatactgattcgccgcgcttcttactcccacgcctgttatcttcccgagcttatgtatgcttgccgcaaggttgccgacctcacatatccacacagtgagaatatatccccagactccgagccgaggtgtgagcagcatcacaaggataagccccgcggcggagtctatgatgtttaccttcatattatatacctgctcgcccattcccttgagaagcgaatcaactgcggtatcaagatacataaacggtactaaaaatccaagcaccaccgtatacatcgccgcttccgttgagccgtaaatcattccgccgagactttttccgaaaagcacaaaaatcccgcacgctccgacagaaaatactgctgagtatttgtatacctcttcggtcaggctttttatctcttccgtgtttccaagctcatgtttttccgcaatctcgggaatgagcagtgacgtgaacgagcctataacagcatacggaaacatgacaagcggaaacgctattccctgaagcctcgctaactcccagtccgctttttttcagtcctgccggtatagcgagatgctccagtgtatttaatccctgacgagcataagctccgacagccgctacaaacgatatatcggtcacattcttgatttttgacggaacatatgcctgacgtgtaccgtatttttcaccgctcggctttttggagtccgcaatgtacattacaagattcacggcaagcgagcacacctcggataacgccgaacctgcaacaagcgcgagacatgagttctcaactccgcttctcccgacaagatacagtccggttgagatgagaatgatccttacaaactgctcgttcagtgaggatatcgcgttcttgtagacctttctcagtcccgtgaagaatcccgacagcgcggaagagagcgatatcgcaggcaggcttagtgcaagaattttgagcggcttctccgttctgaggtcgctgagcagatatttcgcggcgggagatgaggtaaaatacatgagcagtgccgacagcgttccgaaaaacagagcgtacatacacagcttcatcacaagcgagcgaatactcttccgccacgaggttttatcgcattccgacagctgaacacacctttccgacgtcagcttcattgctccgagatttacacatgacagcgcgagagttaccgcaaagccgtatacactcatgacaagagtaaaaagccccatgccctccgcgccgattttgttatttatgtaggcgttgaagccgacggatatcccccgcatcagaatactgacacacgacaaaacaagagcgttcgcaaagaatcgtctcttttttttattgtattccgtcatatgaaccgtttttataatcatattataatacctttccccgctgttttacgctttattttctgcgcatcttgatttattaacaatagatatatataattaaagtgagtttttattacataaggagcaatgtatggagcgagtcagcaaacacaattattaccttgatatagcgcagaccgtgtcggaaagaagcacgtgtatcagaaaacgatacggcgcgataattgtaaaaaatgatgtcataatagcgacaggctacaacggtgcgccgcgcggaagaaaaaactgctcggacataggaaactgcacgcgtgaaaaactcggaataccgcggggcgagagatatgagctatgtcgttcggtacacagtgaagccaacgctataatatcggcgtcaagagaaaatatgctcggatcatctttgtatatgtgctgtacggatcccaaaaccggcgaaatcatacccggcactaattcatgcatgatgtgcaagaagctgataatcaactccggcatagcgcgtgtttatatacgtgacacgaaaaacgaattccgtgagattcccgttacagagtggatcgacgacgacgacagcctatcgggaattctcggatactaaattatattataagaggtttattttaatgaaaagaataatcgcacttgtacttgcggcagtctcgctttttatcttcacatcatgctccgcgtcgcttgtcaacttcaaatacgaaaacggtaagctcataaacaagggtcagaagctcgaatactatcccgcgccgaacaactacgagccggtttcagtcggtgaagcattcggatattacaaaaagacggaccttgtgctctacgaaatcaaaggacttgacccgaaggaatggctgacacaggaatacgccggaagcgcaaccaccatattctactccacttcgctcacgcttcccactctcgccgagcttgagcctacaaagctttacatctgcggcggagacactctcacatatgccgttgctaccgttgaggataaagacgtcatcgcgaaccttatagacctttttgaaaacggcgaatacgaggagtggcctcttgtgaactccatcgaaacctttgaattaaagttctattccgaggacaagtatccgcacatctactacaaccttacctacggcgaattcgaggaaggcaagttcatttacgaccgcacgactaagagaagcgtaagaatcgacgacgcgcttatagcatacataggataaaattatgacagaaatcaaagaagccgagctttcgtcagttgacgcgatagtcgggatagaaaactcgtcgttcacctgcccgtggtcggaaaaatcgtttaatgacgccatatcaagcgacaaaattgatgtttacactgtagagacagacggagagatatgcgggttctactgccttatgataatcaacgaagaagcggagctgttaaacattgccgttgcggcttcacacaggagacagggactcggagacaagcttatgacccacgctctgtcccttgcgaaatcccgcggagtaaaggcggtttatcttgaagtccgcgaatcaaacactcccgcaaggcggctctacgaaaaatacgggtacatcgctctgggagtaagaaaaaattactatgcttatccacgcgaaaacgcggtagtaatgcagaaacaattgtgatttgaggtatatatgtatatttttgcgatagaaagctcatgcgacgaaacctccgcggctgttataagagcaaacgacgacaatattgaagtgctttcaaatattatagcgtctcaggtagacacacacgcgctttacggaggtgttgttcccgagatagcaagccgcgcgcactgtgaggtcatatcctcggtttcccatgaagctatagaaaaagcgggaatttcgctgtccgatatagatgccgccgcagttacattcgcacccggtcttataggtcctcttcttgtgggagtaaacttcgtaaaagcccttgcttatcgttccggctgcaagataattcccgtacagcacattgagggacacctttctacggcggatattgagaacag

SEQ ID NO: 3076 - DNA, 4734 bp, Unknown
  16S sequences of unknown bacteria
gaccaaataaaaacgggtgtcgtcgggatcgggataggttctgacacattcgccacttgcgatttgaccgtttgcgacgctgacattttcctcgtcctcaataataacctgtggccacatatatcccacataagaataggctcggacggcagccgtcacacccggcagaaccgaaagggtttgcataaggccgccaaaatcacacaaatcgcttttttcattacactcttctccctttcggtttttatatttaccaaagcaaagcggccaaagctgcattcattttggcaaattacaattttatcggtatacttgcactaagtatttcaaaatatatttattacaaatttttgataacacctttggttttaattgtcaatacggaatattatcttttcggccctgcggcgcaaaaaaagaaccgtcttttcacatacctattcgtatatgaaaggacggttccgaatttgatttaaatatttcccaaactgagctggagtgtgacgattgcgtcaacaacgtttatgactccgttaaggtcggcgtcggcgcccgcaatgtcaatatcgttcaccgaaagcgttccaacgctgtattgcaaaatcacaagagcgtcggaaacattaacaatgccgttcccgtcggcgtcaccccttgcggtcagcgcgctgagacactcggcatagcgaagatttacatacccgaccttgccgttaaaatcgattttgccccattcgcccgcaacctcataggctcggatcttgtcgttgaaaccgaggccgcctataatttcgccctcggttgagggaaccgctcggacgtttacgccgttttgagacgttatacggtagcttcccacaggataaaccgccgtttttgatgtgacggtgacctcaaaggtcatgtaaaatccccacatggaaacggttatcacatgggtcccgggcgttgaggaatatcccgaaacatcaaagccggaggtgaccgtctcggaggtgccgtttgaatagtgaagtttcacggtaattcccgacgggtcgaagtcctcgccctctttgtaaaccgttttgttcgacggcgaaacaagctccatatataatgtatagaaaggatcctcgattttttcggcatatttaaggcatatccagccggaaactccgtcggcctctatcttgccccattcgccgtaaatgtcggtaacgtcgacctctgctttgtcggcgagccagccgaccttttgatagtccgaggacgggccgcttctgacattgagaccgtcggaggacttgacgcggtatcttccggtgacatactcctctccgaggtttccgctgttgttgccgccgtcgtttacacccttcggccccttataaacaatgacgttggcgccaacccccgcctcgtcgtaataaaacaggtcggttatgtcgtttgaggcagggtccattatgaacaccttaccgttttccaccttttccaccgccacatagtggccgtagtatttaaccgagcaaaccaccatacagccgctgtcgagaaaggattttatctgagaaatcttctcgtcctttgttcccgaaacattggtccacttttcaagagtgaaattcgaggtgtattcgcagggctttgcccaatatatgtcgcccgacgaggtgaacccgccgtttgccttgagaaaagtgcaaagcacaccgggattaaagaccgaagtatcccgagataccgcccccgaataagccatgacctttgccaccgacgtcagggcgcagcccacccttgccaccgtgtagctgtcgttatatccgaaaccgatggaaccccagcgggaatcagtttgcagccaggttttataattgtccccgtcggcggaaacattgaccgaaaggacgcaaaaaagcattgcaagggcggtaaaaaaggccgccgcttttttccttatcacttttcccgcctcctttgggttacaaatctgttacttgtattttaactttaacgccgtcgaaagtcaagggattttgccgcttttcctgtcattaccataagctcggccgaggttatggcgcgcaacagaccgaaaaaggcttgcgccgcgcaaaaatatatcataaaaaatcacagaaaaccattgattttttaagctaaatgtgatataaggtaaacgataaacgactcttgagtctgttaataaggatgtgtaatcatggcattaaaccacaaaacaaccaaagaggatatggaaacccgcatgggaatactcccctaccgcacccgtaatgacattccgatctcttttatctacgacggcaagaaatatgagggattcaccgacgaaatgaatccgagaaagcgctttcgccgtctcgacagcaacctgaccctcaccaccgtcaccgccaatctcgactgcctcgaaatccgcgtggaatacatagaatacaaggatttccccgttaccgagtgggtggcctattttgagaacacttcaaacgaaaaatccaaaattctttccgacttccgcatcggcgccggcgttgtcaaaaccgatgacgacgttgccctgacctattccaacggcgacgacggaagcaacatgggatatgaatatttcgaaaacgacctgaaggcgcccttcgttcttcatcccaacgacaccggctgctcctgcgccggcgcctccccctttatgagactgcacggcagcaccggcggcataaacatcgccgtgggctggaccggaacctggattgccgaattcgaaaaggtcgagggcggcgttaaggtcgctttcggtcagaagcgctgccacatggtgctcaatcccggcgaggtcatgagaactccccgagtcaactttgaaggctatgtgggcgacgaggcacacggaagaaatatgtggagacgtttcttcatgaaacacatctgcgttaaggatcccgacggccacacccttccccccaagctttgtatgcacgttttcaatgccgacggcttccccgaattcaccggcgccaccgaggaaaatcagctcagaggtatccgctcctacatcaaagagggcgttaaacccgacatttggtggatcgacgcgggctggtatgtctgcggaaaccacgagtggcctctcatcggcacatgggaagtcaacaaggcaaactttcccaacggccttgcccccatcggcgaggagtgcaaaaagaacgacattcagctgctgctctggttcgagcccgagcgcgttgtggccggcacatggctcgatcaaaaccatcccgaatggctgctccaccgcgccgaccccaacgaccccaacattcttttcaactatgccaatcccgaggctcttgaatggatgaccgagcgcataaacaagataatcaaggagtcgggcgttaacatctaccgtcaggatttcaactatgacccccgtccctcttgggaattccacgagaccgaggacagaatcggagcaatcgaaaatctccacattcagggctactacaagctttgggacgagatcattctccgcaatcccggcctttggatagactcctgcgcctcgggaggccgcagaaacgaccccgaaacccttcgccgtgccgttccgctgcactataccgacgttgaatacggcgtacatcccgtcaagcagaagcagcaccgctatatgttcgagtggattccctatttccgcgcccacaatatgagctgggacaaccccgagggactttattatcagcccaacgccggccgtccggtggacgaattcgcatatcaggctgccatggctcccgccctcaccgacatgatcgaatggaacgcccccgaggaggccttcgaccttgcccgccgtatgcatcccatttggcgcagagcggccgcaattatgaccaaggccgactactatcccctcaccgcctgccgcaagaaccccgaggattattatgccatggaattctataatcccgacgagtgcagcggtttcttccaggtgctccgcaacacccaggtcaaggagccttccttcaccgcaaagctcacccttgacgaaaccaaggactacaaggtggaaaataccaagaccggagagaccaaggtcatttcgggcaaggagcttgcaaacggcgttgaaatcgcccttgacaagcgttcggccgccgttgttttctttgaagccgtaaaagactgatttttatactgcctcggtccgcagcgtccggggcagtttttcggagtgataaaaatgaaaattacaaatcaaaaaaccacctccgcagacatggccgccctttgcggcaatctgacctacaagggcgtttacgatattccattgagcttttgccttgacggcaaaaattaccgcgggttttccgaggacatgaagcccgaagaaacctttcgcagaattgattcgaatttcaccctgacctgcgtcaccgcgcaccttgaaggtcttgaaatccgtgttgaatataaggaatacaaggatttccccatgaccgaatgggtggcatatttcgaaaacgtttcggataaaaattcaaaaattctttccgacatacgcataggcgacggcgttctcaaaaccgacggtgcagcgcttgtctattccaacggcgacgacctgagcgttcagggatacagcttttttgaaaacgacctttcggaaaaattccttctctgccccaacgaaagcggaaccccctgcgcgggggcggctccctacatgagact

SEQ ID NO: 3077 - DNA, 9102 bp, Unknown
  16S sequences of unknown bacteria
cctgcttcaggttgacgccgacttcgttggcggcttccatcttgaacttgtccatagcggcgcgtgcttcggggatattgattttactggtagacttagacataactttgttctccttctcatttcaaaaagaattgattgggtatcgcaagcctatcttgtgcatcctttggggaacttataagcattaaaattttccactttttccgtttgtttcagtaaaagcggcattttttgcagcagacagcggggatggaattttcttgcgccgtatggtacaataattatctatgaaaccggcgccggagcggtggtttcacgatcgaagataacgtcggatgttctgaaacggcggcggtgtgcgatccagccggatcaaatagaaacgataaaatggggaggtggaaaccttggataagctggtggtcggtattctggctcatgtggatgcgggtaagacgacgcttagtgaggcgctgttgtatcggactggtgcagtgcgcacactggggcgcgtggatcatcaggatgcgtttttggatacgttttccatggaacgccagcgcggcatcacgattttttccaagcaggcacaatttcctctccagggacgggagattacgctgctggatacgccgggacatgtggattttgcttcggaaatggagcgcacgctgcaagtgctggacgctgcgattctggtgatcagcggcacggacggcgtgcaggggcatgcgcaaacgctgtggaatctgctgcgccgtcaccgtattccgacatttgtatttgtcaataaaatggacttggctggagcggatcgggagaatgtgctcagtcagctgcgccggcgtttcggtgaaggttgcgtggattttacgcgcgaggacgatgcgtttatggaagccgcagccacggcggaggaaggtttactggagcggtatctggagcggggagtgctgacgccgttggacattgcggctgctgtgggccgtggcacgataacgccctgctgtttcggcgctgcgctgttgctggacggggtggatcgtttcctggaggtgcttgcgcagtatgcgccgttgccccaacggggcgaggcgtttggagcgaaagtgtttaaaatcgctcgggacaaacagaacaatcgtttgacttatctgaaggttacgggcggctgcctgcgggtcaaggatctgctgcgcgggcgcacgggtgcgtggcaggaaaaggtcaatcagatccgcatctattccggcgcaaaattccggacagtggatgaggcggaggcggggacagtctgcgctgtcaccgggttgagccagacccggcctggcgacggcctgggaacggagctgtcctctgatgcgccggtgttggagccggtgctccactaccggctgtgcctgcccgatggctgcagcgccgttgccctgcttcccaaactgcgcctgctggaggaagaggatccgatgctgcacgtgctgtggaaggaagcgctgggtgagatccatatgcatctgatgggagaggtgcagctggaagtgctccgggagtggatcctggaacggttcggggtgcgggtgtcctttgaccagggaagcatcgtttacaaagagacgattgccgcgccggttctgggcatcgggcactttgagccgctgcgccactatgccgaagtgcatctgcgcattgaaccgctgccccggggcagcggcgtgcagtgcgcaacggagtgccctctggatgtgctggatgggaactggcagcgcctggtgttgacccatctgatggagaagcgccatgtgggcgttctcaccggcagcgaactgaccgatgtacgttatacgctgctgctgggccgcgcacacctcaagcatactgaggggggcgatttccgccaggccacctatcgtgcagtgcgacaaggcctgatgcaggcggaaagcatcctgctggaaccatggtacgatgtgcgcttggaagtgccgttggaagctgtaggccgggccatgagcgacctgcagcgcatgggcgggcgctttgatggcccggaattgtgcggcgaccgggcggtattgaccggtgcggtcagtgtggcgtcggtgcagggctactggaccgaagtagctgcgtacacccggggtctggggcatttgtcctgtacgctgcggggctacgaaccctgccataatgccggagaggtaatcgctgcagcggggtatgaggctgagcgggacacggagaatcctgctgactcggtgttctgcgcccacggtgccgggtatacggtgccctggcaggaagtggcggagcacgcgcatatggatgcagggcagcgcgcacgccaggagcttggaacgaaactggagcgcagtccggttggcggtatggaagatcaggaactgcgtgcgatcttcgagcgcacttatggccccgtgaaaaaccggggtatggatgccctggcgcaaagccggcgcatcacggcgcggcccgtgctggacgacgtggcctatgttcagaaagacgatgttctgattgtggacggctacaacatcctgtttgcctgggaagatctcaaaaaaattgccctggaaaatatggatgcagcccgcgcggcactgattcatcttttgtgcaattatcaagggatgcgctgctgccgggtgatcgtagtgtttgacgcctatcgtgtcaaagggggctccggaaaggcggaacgggaagctggggtggagattgtttataccaaagaaggggaaacggcggacgcgtatattgaacgcttgtcctatgaactggggcggacacaccgcgtcaaggtggccaccggcgacggcctggagcagctggtggtgctgggccacggtgcccagcgtctgacggcgcgggagctgcgctgggaagtagaacaggtccatgcccatattgctgcatttttgcagcaggagaaaccatagcgcacagcgctatggtttttttataaaagggctgcgtatctgcttataggccgaaaaaaagatggactgccagaacggaggccaggaaagccgctaggtcagcgataagtgcggcgggaatggtgtagcgtgtcttcaggataccggcggcgccgtaataaacggctacggtgtaaaatgtagtttcagagctgcccagcatcacggaggcgatacggccgacggtgctgtcggctccgtgttcggccatcagttctgcgcctaccgccagcccgccgctgccgcttagggggcggaggatcatcagcggcgtgatttccggcgggatgccgacggcgttcatcaagggggagagcagggctgtcagacagtccagtgcgccggaggcccgcagcatggaaacaccggtcagcaatgccaccagagaggggacgatgcggaaggtgacattaagtccgttttccgcgccgcgtaccagagcattgtaaacgtcgattttctgccccagagcaaatagcgtgacaaaagccagcaggcaggggatgatgtaagaggtcatgcacgatccctccacagaaactggaaaatacgcgcggccagcaggcctgctgcgaccgacagcaccgaggagaaccagactgcgggcaggatatcaaacggttccgccgctccgcaggctgcgcgcacgccggcgactgtggcggggatcagctggatggaagcggtattgagcacgataaagcggcacaaactgtcggacgcggtgccgttgcagccacgcgccatacgccgggccgcctggatgcccaggggtgtggctgcatttccgatgcccaggaggtttgctgagatattcgccgatatggctgaaagcgttaccgggtctgctgacgcatcgggaaaaatttttcgcagcagaggacggaaaatggctgccagcttattggacaggccgctttggtccatgacttccagaacgccgctccacaggcacaatacacccagcagactgatcgtcagtgtgatcgcgtcgttggcgccggaaagagccgctgcgctgacggcgtccatggtgccgttgaccatgccgaacaccactgaaattacgatcattgctgtgaaaatccaagccatcgccattgaaaaccacctcaaaaaaacatagtcgccgcaacgaattttatgacaagtttccgttgacaaaaaagaccatttttgataagataatgccaattaaaatcagggctattttatgtatgtttctgtagggaacatgcaatacctgcaaaccgagagaacttgccaaaaggatgaatgccatggaaacaaaaagtagaaaagcagctgcaggcagccagaccaaagcgacaggcattgtgcgcaaggtggatgagcttggccggattgtgttgccgatcgaactgcgccgcacgctggagatcaatgaaaaggatgatctggagatttatgtggagggcgcgtccattattttgcggaaataccggccgacgtgtgtgttttgcaatggcgccaaaaacattatcacatataaaggaaaaaatatttgtccccgttgtctgaaagggattaaaaatttggaaatcacctgaaaaacaccgaacctgatccagtatggatcgggttcggtgttttggttttgctggcttcaggatacagtttccgccagaatctgatacagatccgcgccgtcctgcacacggtagcggaatttgtttttgtccaaagcgaatacataggcgccgtccggagcggcatagagggcataattggtattctcgtcgggataaactacaatagcgccgggttcaaatacggcgtcctgctgcagtatatggttagcccgggccttttgcagtgcgtctgatgcctctgcagggagggggagggccgcttcgggggaaacgggggcggcggcatcgtgcacaagcgcataggaaaagtttggtttttctgctgaacagtgcaaggctgcaaccatcctcacaggtgaataaaatgaaaacaggcctatacctacaacggctaccgccagcaatgcccaatagcgtttgtgaaccacgttgatgggatcgctgtgggtgggcatattcggaccgtccagaatattgtggtgcggctcgtcgtgggtgggaaatgcggcgcgtctgtcttccatgaaagggacctcctcagtttgcgcgggcgcggagcaccgcgtcataaagtacgtttttagcaatgccagtacagtcggccgcctgccggacggcgtctttggttttgatgcctttggccagcagttccagggccatggcgacggcatcctccaaggtccctgtgccgacggcctcctctggtgcaccttccagaaccagcacaaattcccccttgggggcgacggtctggaaatgggccaaagcgccgcccagcgtagtacgcagcgtttgctcatgcagcttggtcatttcccgggaaagggaaacgcggcgttccgcgccaaaggtttccaccagatcgtttagtgtgcccagcagcttatggggcgcttcataaaaaatcatagtgcgctgctccgctttcagggaggcaaggtgttccagccgtacgcggcggttgacggacaggaacccttcgaaggtgaaccggcccgtggacaggccggacacggccagagcggaaatcagcgcacagcatccgggaatggacaccaccggcacgtcgtgttgggcgcacagacgcacaatgtcttccccagggtcactgatggcgggtgttccggcgtcggtcaccaaagcgcagctttcgccggccagaagccgctgcagaatctgctcgcctgcggaaatgtggttgtgctcatgatagctgagcaggggctttttgagtgcgaagtggttcatcagcttcagggatacgcgggtgtcttcggccgcgataaaatctgcttgctctaaagtggaaagcgcgcggggggatatgtcgtttaagttaccgatgggagttgccaccagataaagcgttccgctcatagtgcacctgcctttctgtcctgtctgaaattgatgcgatccatttcttcgctttccctgccgtcggaagcaaatattaccaggggcggttcgtaaaccaagcccggccggccgccgcgccggccctccaccaaaacaaggatcggaggctgtccggctgttttttccacgaaacggatgcgctttggttcaattccgctctggcgcagggcgcagaacaggtcggccagccgttccggtcggaaaatgagggaaaaagtaccgccccattttaacaggtatgccgctgcagcgcatacgtcttcgatggtacaggtggactcttcacgtgctgcctggcgcagggcatccggggcttttccgccgcagccctggcggaaataaggggggtttgacactaccaaatcggtttccccggcgggaaggacgctccgcagtgcgcgcaggtctgtgtggtgcagcgtcatttttttctgtaagccattttcctcgatattgcgccgggccatggccacagcctgcgcttgcagttcaacgcagcacacgctcagctccgggcagcgattcagcagcagcaggcccagcaaaccgatgccggcgcccagatcgcatacccgcatcccctttttgggatggatgaagtctgccagcaggaaagaatccgtgccgggcttgaccacgttgtcggaaaaatacagccggtaacggctggggggcagggtatcgcagtattccatgaatgtctccttccaaaaggatcgaattttcttcagtatagcaaatcttgcacaaaaaaacaatgccgcaggcaaaagcctgcggcattgtggctgatcaaataaaattagtcagcgggatgaattgcatcgttggggcaggaatcgcagcaagcgccgcagtccatgcaggtgtcggcgttgatctcgaaatgctcatcgccctgggagattgcaccggcggggcaagcgtcaacgcaagcgccgcagctgatgcaggaatcattgattgcgtatgccatagtaggttacctccatacaaattagtaactcccattataatcagaaaaataaaaaatgcaagtgcaatcgaaaagaaaatgaataaaaattaaaaaagtgggacataaaggcgccttatgttggaaaaagaagaaaaaagatgtgagaaccgatggaggaacattgaaaaaggcgttgcgcggcaagggaaatataggcgagcaaaaaatagtcagggaaagtcaaaaaaggtgttgacatttcaaaatgctgtgctatactatactcagaaagtcaaagaaagtcaaagtcaaatgagagcgaatgaaagagccggtggcatggtgccgccgtgaaatagaaggaggcgtgttatcaagtggggatttcagatttgattgcttgctttatccaggatgcactggatgagacggacggcggcgtggtggaactgcagcgcggcgatttggcgcagcgtttcaattgtgtgcccagccagattaactatgtgatgtccacccgattttctccggagcatggctacattgtggaaagccgccgcggcggcaacggttatattcggatcacgcgggtgcggaccgaccgcaaaacgcttttgatgcaggtcatcaattccattggcgacacgctggacttccaaagtgccaaagcgattaccggcaatttggctgacagcggcgccgttgaaacgggcgttgctagggttttgctggcggccatcagtgaaagcgcgctgcacgatgtgccgagggagctgcgcaatgccgtgcgcgcaagtattttcaaacaggttatgatccatgcaatttagttctgcatagaggcagaaacggtaatggaattcattgaatttgtgaaaaggctgaaggaggattcatgattatgaaatgcgaacattgtggtaagaatgaagctacgttctattataagagcaatatcaacggtaatgtgactgaacatcatttgtgcagcgactgcgcccgggaattgggatacgcggacagcatggaaaagagcttcagcagttttggccgggggttgttcggcggctttgacgattttttcacgcctatgcctgcgctggccggccatttcttcgagccttttgaggaaatgaaccggagctttgcccgtatgttccctgcgctgacgtccggcggggcggaaacggcctccgccgaaagcgcgggtgcggcgcagagtaccgcgccggtgccgggcaatgatctggtcagcgacgccgagcatcggcagttggatcacgaacgccggctgaatgccctgcgcgcagaactgcagcaggccatcgccgcggaaaatttcgagcatgccgcgcagttgcgcgatcagattcacggcatggaaaaagaaggataaatcacaatccgcccctgcgccgtatgacgcgggggtggctcgaaaagaccaattttaaggaggtcaattaaaatggatgaaaacagattttcccctcgtgcccagcgggcgctggagctggcggagcgttccgccggtgatttggggcacagctatatcggtaccgagcatctgttgctgggtcttctgcgggaagaggagggcatcgcccgccgtgttttggaagagcagggcctgacggagagcatggtgcagaaaattttgatcaacagtgtgggccgcggtataccggggaccaagcctacccagggcctgacgccccgggccaagcgggccattgaaagcgctgtggaagaatccatgcgcggcggtttcagttatgtgggcacagagcacctgttggtgggtttgctgcgggacggccgcagcatgggtgtgcggatcctgcgcgcggcgggcctgagtccgcaggctgtatttgaaagtgtgcggcataaactgcaggaggctcctacgggccagcagaccgtgcgcgccggggaagcgaaagaggagagcggcgatcatgtgctccaggagttcacccgggatcttacggccgccgcccgcagcgggaagctggatccggtcatcggccgggatgaggagatccagcgtgtaatccagatcctgccccgccgcaccaagaacaaccctgtgctcatcggcgagccgggcgtg

SEQ ID NO: 3078 - DNA, 7080 bp, Unknown
  16S sequences of unknown bacteria
aaatctcatcagagatttgccgtgcttttatactataaaagatattttttctttacacgttccaaaacctttccgatcggtttttcaaatataagcaggaatagcacatttgaaacggcataaacaaccgtaaactgcacagccgatataacggcggcaatataacgtgatatattgaaatatccgtccgcccacagcaccgtccatacatccataagcagcgaatacagcactcctgaaacgacggcataaatcaccaaggcaatcctactgcgcttcagcggatctgccgcaacccccgcaataaatcctactattccccagctgaacatttgaaacggcgtccaggggccctgcccgaaataaaaattcgatatgaccgccgaaagcgccccggtcataaagcccgcttcactgccgaaatacattgcggtaataactgccgttgcggtaaccggtttaaagcccgggatcggtgcgaagataaaccgtccgattacggatattgccaccattacggctataactgtcagccttcggacatcgttttcactgtgctcgaaatgaagaaaaaacgggacgcaggaaagcaccgttacgcatagcgatatccatgcatactgtttttccttaaaaatcaatgcgcctgacaaaacgactgtgggaatcacaaggcaaagtattatataggacaatcgcttcttcatttgcatatacctctgcttttttcggcacaggaaataacctgcgcgaccgtcaccgcgtttttccaaacattccgcgccatgcggttggcggcggtagtgtaaaaattattttccgaaaagaatttttccggcacggcggcggacagtatctctccgtcaaagaaaagggcgcatctgtctgcgttttcggcggcaaattccacatcgtgagtgaccgtgagaatcgtcaagccgtcatttttaagatcaatcagaatttccttcagttttttctttgaataggcatccaagccctttgtaggctcgtcgagcaaaagtatttcgggctcaagcaaaagcatttttgcaatagcgcacttttgctgctcaccgccgctcaaatcaaacggatgcttacaaagaagctgcgatatgccgattttttctgcaaccgcgttgattttttccccgcgtttatccttcggaatatccaaagcctcaagaatttcggcaaaatcatcacgcacattgtccttaataaaaacggtcagcggattttgcggaagatacgcaagcttttttcggtataaggaattgcccttataatcctttataggcttcccgtcaattaaaaccttgccgcggtatgccttattaagacccgatataacattgagcattgtggtttttcccgcgccgttgccgccgagaacacaataaatctcaccgcggtgcacccgaagagaggcagcccttaaaatatccggcagatccctctcataacggaaccatacgcccttcagctctatggcaatatcctcgctcggtcggtaatcctcatacctcggctgatagtccgtatcggaaaaatatttttgcagaaacgccctgccctcccttacggtaagcgggcattcatcatgaataccgagagcgccgaatatcctaacagcgctcggcagtccgcagagcatcggttgatccttacgtatttcggcaagcgaagcgccgatatctctcggcggggcataaagcaaaactctgccgttttccataacaagaaccttatcggcaatcggaaagacctcctcaagcctgtgctcaaccagaataatcgtaagccccagctcccgattaagcttttggagcgttgcgatgaaatcagccgcggctatcgggtccagctgacttgtcggctcatcaagaatcaatatttcgggctgcattaccataaccgaagccagattcaggagctgcttctgaccgcccgaaagctcgtccgtatttttgcggaaccagctttctattccgaaatagcccgccatttccccgacccgtctgcgaatcacctcggtcggaatgcccatattttcaagaccgaaggcaagctcgtgccaaaccttatcggtcactatctgattatcgggattctgaagaacataaccgatctcacaggcgctcattttttcgtcaagctcctgctgcaaaattcccttataatatatttctccgcttacattgcccgcaggagccaattcccttttgagcaatttgagcagagtagttttgccgcagcccgattcgccgcagacaactatgaactccccgctttcaagcgacaaatttatgtgctccaccgcattttgttccgcttcggcataacggaagctcaaatcctcgatacgcaatatttccatacaagagcctcctttacttcgataataaacggacaaaacgataaaattccgaacgcggcataaaccgataccgcaaagggagtcacgggaagccggcttatgcgcggataatagtaaaaatcaagctttgaaaacgcgaagcccgctaaagtaaacataagaagcgccgcgcagattgccaaaaggattccgtcatgcgtattaaaacggaagagtgaaaagctgcttctgcccttcattccgtagccccttgccctcattgaatccgaggtctccatagaattttcaatcgatcttgatatcatagccgtgaatacgcgcccggcatttttgattttgtcggtatagcttttggatgagtacagccccattgctttttgagccctgctcaccgtcttcatctgccgcttaaacctcgggacgaatcgaagcgtcattgacaaaacaagagacagcttgggaacggctctgccgaaaagataaagaaatttatcgctcgacataacggcaccgaaggctttgcaccacagcataactccgattaccgtgaccgcaatggcggcaccgtaaataaacgcctctgctgttacggggtttccgttcaggaaaaacagcggggtcacgccgttatgcgagaacagcggattagtaaccgctaccattaaaaacatcgggacataaaagccgatatccgaaagcacctgacgcctgcgcgatatgattgccgaaaaggcgcaggcaccgagcagcgccgaaagctgcaaaacgggattcggcacaaacatcacaaccagaagcaccgataaaaaatatgtcataatcaccgttgggtgataatttccgaacgccttcatttttcctcaccgcccacaaaataacagcccacatccgtaccgaggctgcaggtatatacccattcgatgacctgaccgtcccgcagcttatatttggaacagccgtaattcgggaactcgccgtccacacggtacatccagcccgacagcggcccgcaggagaattcgtaaagatagtttataccctgaatatatacgctcccatagctgttttcatctgccccctgaaattccatttgtatcctgttatagcgcacggctctgtccaaaatatcaaaaactgtatcgccctcgcgcagcacatattcggtttcggggaggataatgccgtcgggcggaacaaattcatcggattgcagggcgggctcgagattgccgtaattatcaagtatcgtatcacagcggatactgattttaaccgtttcactctcggaggttatatcgtcgatatgcgtaagataatactcgtccaccgattgaatatgcgtaccgttgataaccgccgcgacgatcagaataatcgcaaataccgcaagaatatcctttttcatatcgacccccctttttcgttttattcgttgctataaagcgacgccagcttctccatttcgacttctctttttctgcgccttattttaatgcggcgaatcagaagcaacgagataacggcggcgataatacataaagctgccgcgataataatcccgcggagcatattatcaatgcgcgtttttgttttgataacatcctcccagcgttcgattttttgcctgtcatattcactgagggcgttatatcgctttacaatgccgtccaccgtttttttatcggaaattcccattttgtcaaacggataaagcttttgctttatatccgaatttatggaatctatttcagcccgaagcgccgctatttccgccttcgcctctgtgagctttttaagatattcggctttttcatcaaaatcctcactttgctcaagcttttcaagcagggttatgaccgtaacatactgctctgttgtaagccttgagggcagcttatccgccgcctcgcggtctgaagcggaaaagtacagaatcggcatatccacctttgtatcttgcgccgtttttccgtcatcgcggggcgttttgccatcgacagccgcaggctttttatcagcttctgctgccgaagatgcggttttattatcagccacggacgctttatccgcaccttttacggcagtatatcttccgaaattgtaaagcgggctttgtcccctttgctgccgtattactgcagccagagcatacagaacctgctctcccgccatggagttggacttaccgggctttgatgagggattatccttatcataggcataggaatgcgtaaagccgccgtcgggcattcggtattttaaaatgccgtcgagcagcgttttcccgttttttataaaacgggaatccttttgcggatctatattaaggctgcaaagcgccgccgcaacctgcgcggtgctttcggcgttttgcgtgccccagctcatgaagtcgccgtcctcggtttgtaaaagagagagacaggaaagagcctcattaacaatctgctttaccgttcggctgacctgctttttttccgatttcagctgatatgtatatgactttccggaattataatacggtgccaatgcctgcactgccatagccgttatatcggggtcggagttcttgcccgtcagcgcaaagccgccgtccgacagctgtcggcaaagaatttcggttataatgtcgtcgcgtgaataaaagctgccgttcggtatatcataatgcattgaatcaagcgctataagtccccatatccagccgtttataccctgcctgccgagagatacggtctttcccctgtcgtatgttccgtccgctattaaatttatcggatttccgttcttatccctgccgaaattcgtaggatctccgccggctgccagcactgcaaggcttatcctgtgccattcggtcgcctttgaggctgaaagcttgttttcttccctgtagcgtttttcaacctccgcctttaaaacagcaaggtagcggtcgtaattctccgcgattccgagcctgctcatgcctatcggataccaatcccccggcgttgtgcccgcaaggcttaaaaatttatcgttaaaaaacgtgccgccgtcggtcactccgttatcgagcttcttccaatctataataccgttcgcaatgcccgaaagttcatcgctccccttatagcctgcggcagacgcgggaatataaacaagcaggcaaagaaccgccgccgtcagcgaaataattcttttcatttcccgcagcgtccgcgcttaagctccgcagcgaatgccgccgcaaagaatactgcaaggcttataacggttacagccgcggttgcgtcctcctccccggttttcggcagatcgtttttcgcagaaccggaagtgcttcccgaattgcccgaggaatttgtgcttccgctgcccgaattctgtccgacgttattctcgttgttattgccgttattatttccgttgccgccgttatcaggcggagtctgatttttattctcaagctccttaattgcctcggcagacgaagcggtaagctccttgtttacagccgtcacatcatcctgcgccgccgtaagctcaagcgcgcgcgccatcgcgccttgatatgccgccgcgaatctttcgtttttaagcagctcatttaattcgggcattgcgttcattttcgcgatttcggtgagcagcgcgtccttattggcggttttatagtatccgtcgccgccccacatcgaaaagcctatatccataccgtagccgtaaagtgtatactgcactctcacaacatcgccgtcggagagaaagctgtccgcaaatccgacattcggcagaatgttatttaaggtatacatccagcccgacataaatgtgtagtcaaattcaccgagggtgtattcgccctcgccccagccggtatcaagatcgggtatctgctctgcaagcgcggcagggatatcgttttcgtcaagctcctcgggcacggcaaatttttctcccgcgccgaagcattcggagcttccctttttcaaagcgcctccgcggcctattgaagaaaggtaaaagctgctttccgtagttccggtgcagttatatgaaaagccgttttcggtcaaaagcctgtcaaatgcctgcgcggcgttttcaccctcataaaccgggaaaagcaccggctctattatgtagccgtagccgatggtaagcgcctctacagtccatgtggcatagcctataagttcgccgggtgccgccttttgataggtcacggtatatgtgagggttttatcccccgccgtaacggcaacggtattttcaccctcctcggtaaattcaagcgtaaagctggtcattgccgaatccttccagttcggggaaagcttcttgccgttgaattcggcggctatatcgaccgtattgccgttttcatccaccgcggtcacaaaaaaggtctttttggcgctttttataacggcgccgtcggtcagattatttgtgacggttatacccgtctcgccctcagcagacgcggtaaatgcaggcacgacgcttacaatcagcagtgccgccgttaaaagcagtaccaaattgcgttttaattttttcaacatttttatttgctcctttttcccttgctttaaataatgtctactgaataattgcattggcaaatgcaattatataaaatcgagttaaaatctcgattttatgggtcaaaacctttgttttgaccgtcagtttccattgattgtcgc

SEQ ID NO: 3079 - DNA, 17969 bp, Unknown
  16S sequences of unknown bacteria
cgagagctgctacatggacgagagccactacaacggcctgctggaatatccccattacacccgtccgccggtatggcatgggcgggaggtgccggaggtgctccagaatggcaaccatgccaagatcgaccagtggcgccgggaaaagtcactggaaaacaccttgcgcaagcgtccggatctgctccggacagcgccgctgaccgataaggataagcaggtgctgcgcagactgcgggaagagcagtcacaaacaggagatgatacagaagaatgacaggaacatggatcaatatggctgcgattgtagccggtgcagtattgggaatgctggcaaagaaggggattccgcatcgggtggaggaaagcctgacccggattcaggggctggcagtgggactgatcggcctcaacggtgtgatcgcctcgatgtttacagtggatgccgacggcggcatcagcgacagcggcggtctgctgctgctggtgagcctggtgctggggtgtctggcaggcgagctgctgcggatcgatgaccggctcagcggcctgggggacgctgtggaaaagcgggtacatatcgagggcttttcccagggattcatcaccgcgtccatcatcacctgtgtgggagccatgtccattgtgggagcgctcaatgagggccttaccggcaataacgaagtgctgctggtcaagagcaccctggattttgtcacctgtctggtactggcttcgagcctgggaatcggcgtggcctttgccgctgtgccgaccctgatctatcagggagccatcacactctgtgccggattcctggcgccttatatatccgatgatctgctgaatatgatctgtatggtgggatatgccattgtgatctgcatcggactcaacctcctgatgaacgccaaaatcaaaacagccaaccttctcccggcaatggttgtcccagtgctgaacaatctgctgaacatgttgaaaattttatagtttatctgcacaaatacagcccctggaagcaggaaatgcttagaaaacaagcagaaaaaaccgggttttgacttttgaattgcgatttttgaattgacggaaatccgagttatgctataatgttatcagatggtatgtacagtttaaagtatgccacacgatatggtcaagttaaatcaatgaaataggagagttattgctatgttcgtaaaggaagtttctgttaagaatcaggttggtctgcacgctcgtccggctacattctttatccagaaggcgaatgagttcaagtcttctgtatgggttgagaaggatgagagaagagtaaatgccaagagccttctgggcgtactgtccctgggtatcgtaggcggtactacaatccgcatcatggcagatggttccgatgaggagcaggctgtggacggtctggtcaagctggtagagtccggcttcgctgagtaatcactctcctgcgcacaaatcaatcgctcgattatccaaagaccggtttttccggtcttttttcattatagggccgctctttacagatactccggtctgcgatataattttaagtacaggaatatccatttttccggacaggaggtctgtaaaccatgactgtatatgaatccattgaaaccagaaagagcatccgtgattttgagaagcgtccggttgagccggaaaagctccagcgcattctggaagctggccgtctggcacccactgcccgctgctccaatgccacccgtttcattgtggtggacgatcccgacctgatgaagaaggtccaggaggcctgcatgggtcaggctctgatgggcaaggctcccatggctgtgatcgtctgctcggacagcacccgggttatgggctgtgaccagcgtgcctccacagtggactgctccattgccatgagctttatgatgctggctgccactgccgaaggccttggcacctgctggatcggcggatttacccaggaacccctcaaggaggcactgggcattcccgcagagtatgatgtggtcgcactgactcctctgggctatccggctgaagagggccgtccgcgggaccgcaagccgctggaagagctggtatacaagaacggctggaagcggtaacgacagaattcggaacaaaaaatgcccgggtcaccgtgacccgggcattttgctgtattttggggaaagtcagcgggcggcaaggatctgatccgctacatacaggccgttggcagcagcctgggaaagggaacgggtgataccggcgccgtcgccgatggcatagatctctctggtgccgtgcagcacaaagttttcgcactccggacgggcggagtagtacttgcattcgatgccgtagagcagggtatcgtagttggcagtgccgggcgcgatcttgtccagggcatagagggtctccacgatgttgtccagctggcgcttgggcatacacaggctcagatcgccgggaaccgcatccagggtaggacgggtataggactgggccagacgcttttcatcggtgcgccgtcctgccatcaggtcgcccaggcgctgtaccagcacgctgccgccgctgatgaggttggcaaggcttgccacatggcgtgcatattcgatgggggagttgaagggctgggtaaagcggatggtggagagcagcgcgaagttggagttcttggactttttctcttcgctgcggaaggcgtgaccattgacggtgagaatgccgtcggtgttctcggtgaccacctggccccgctcattgaagcagaacatccgggtggtatcgccatactgtttggagcggtagaggatcttgggctcgtagatcttcttggagaagtgctcccagatcatcgagggcagctctacccgtacaccgatgtccacctggttgttgcgcaggggaatgccgtttttctggcaccagcccgagaagaagttggagccggcccgtcccaccgcaaagatgatgcggtccgctgtgaactggtgctccccctcggcatcacaggctgtgatctgatgggtttcccggtccacatcggtgacggtggtgcgggagtggatgtccaccttgtcccggagcgagtcgatgaggtgtcccatggtctcgaagttggagtcggtgccgagatgcttgacctgagcctgctgcatgtgcaggtcatactccagacagagccgcttgagttcgtcattgggctggaaccgctcggtggtggctccgtgctgcaccatgatgctgtccgcttcctcaatgtagcggattaccgtttcaggcgggagaaagtcggtgagccagccgccatattcggtggagatgacatacttgccgtccgaaaaggcaccggcaccagccaggccttccataatggcacagggatcgcacttgatgcacttcttgaccttaccggctacaatgggacagatgcggtcccggatatcccggccccgctccagcaggcagatggacagctccggagctttttctgccagacggtgagcggtcatcaggccgccgatgccgccgccgatgatggcaatatcatacttggaacgaaaactcatgacgaagtcctccttagcttatttccggttcccggggaaggggaagagctggagcagttccggacgggaagccatctgcttcagccggtccttgtagacagcgtggtaaaccgaaagggtgtagttggccaggttttccgcgccgctgtttttcacaaagcgggtggtgcggtccttgagcgccagcagatcctcccggctcatgttcttgatcttgcgcagcttgagccccagttcttcagccgagttgaacagatagccgttgtccccttcgatgacctggttggcattgaccgggtccaggcgctgcagcaccggcaggccagcggcttctccctccagcatcgagatggagttggtatccgagagggaggcggtgacatagacatcgcacaccgccagatagggcggcagttccgcatggggaatagcgccggtgaacagcaccatatcggtgatgcccagatcccgggcctgctgttccagttcctcccggaccgggccatcgccgatcaccatgaggtggatgccatcctccgggcggatctccctggcccagtagtccagcagcacatccacgctcttttccttgccgagccgtcccacaaagcaggcgagcatcttgtcctccggcagctggtacttctcccgcaccgccttgatggcagcggggtcgatgttcttcaccatgaagcggtccagttccacggcgttggggattacattcaccggtttggtgatgccggcttcccggaagtagatgctgcccttttccgacgggctggtgagggcctgggcacggtgggccagatgccgggcatacttgcgggacacctctcgggccagcttggaaaggtgcttgggcgccacatagtagacatagtcgtcatacatggtgtggagggtatataccagcggcaccttgagcttgtgggcgatatggatgccggaaatacccatggagaattctgtatggatgtggatgatgtccggatggaactcctccagcagcttggtacgggtgtggctgtaaggggaagccagaccgtagccatagattttcttgagtttgacagcgggacagtgcagcacgccgtcctcgatgtagtggtgatgggtattggggtcggaagtgactaccagaacggtatgtcccagcttttccagaccctcccgcaggagcttgacgtgggttaccacaccgttgatatatggcagataggtttcggtaaacagtgcaatacgcatagttcctctcctttgtaaaaacaaacagatcatggttgatataaaaaatcccatggattttggggtcattctgcgcaatcagtataacacaaaagggtgttttgcacaagaaataccccacagaaatctcccggatgggcggatggaaagttcaaatactatttgaataagggcacggtgtaatatataatataggtaacattatgttcgggcatgtttgccggagaggagaaccgttatggctactgcttatgaagtcacactggaaaagatcatccaggcctttgatctgaaggtgctggccttgcccaagcctccggatgaaatttttatccgcagttcggatgtaaaccgtccgggtctgcagctggctggcttttttgaagtatttgacgagcgccgtacccaggttctgggcgagagcgagatcgtctttatgaaccgctataccgaggaggaggccaagatccggtacctggaattcttcaaggccaatcctccggctgtaatcctggcaaaggggctggaagcaccccagagcatggtggatgcggcaaagcagaccggtattccgctgctgaccaccacagagaatacctccacctttatctcgtcgctgatcctcttcctgaacactgagctggcaccccggctcacccgtcacggcgtgctgatggaggtatacggcgaaggcatgctcatcatgggcgacagcggcgtcggcaagagtgagaccgccgtggagctcatcaagcgcggacaccgcctggtggcggatgacgccgtggaattgcgcaagatcacagcccagcgcatctccggcacctcgccggacaatatccggcacttcctggagctgcggggcatcggcatcatcaatgcccggcgtattttcggtatgggcgccatcaagtccagcgtggatgtggatctcatcgtcaacctggagctctgggacgacaacaaggtctatgaccgcatgggcatggaggatcactacaccgatattctcggtgtccaggtgccgtccatcaccattccggtaaagcccggacggaatatcgccgtcatcctggaagtagcggccatgaactaccgtgaaaagaaactgggctacaacgcggcctacgaactgctgcagcggctgggtatgatggatatcgataccaactgggataccttctgattacaatagggaacgaccgcctgccggtatctgtccgcactggaagatctaccggcagtttctctgtcggcaggcggcattgggggaaatatggagtatactgagaaactcacacagctggacagccggctgactgctgccgggatcaccttctaccgggaggagcccatgagccgtcataccaccctgcgcatcgggggaccggcagaacggctggtctgcccggacagcgaacgccagctcctgacagcggcaaagctctgccgggaactggagctgccggtgctgctcatcgggcggggctcgaacctgctggtttcggatcagggactgcggggcgtggtgctccgtcctcgggcagagaccggagagatcacctgcaccggcgagggacgcttccggctcccggcgggactcaccctggcacgggcggcgaattttgccgcggagcaggggtatgccgggctggaatttgcccatggcattcccggcacagtgggcggggcagtctatatgaatgccggcgcctacggcggcgagatgaaggacatcatcactcgggtggaggtgctggattcccatgggacagtgcgctggcttccagcggacgaatgcgggttcagctaccggcacagccggttctcccatagcggggagtgggttctctcggcagaggtgcagctcacaccgggctgcagccgggagatctatgcggccatggaccggcttgggaccgcccgccgggagaagcagccgctggaatacccgtcggcaggaagcgcgttcaagcgcccgcccgagggaactccgccggctgcggcactcattgaccgctgcgggctcaagggtctgcaggtgggcggcgcccaggtgagtgaaaaacatgccggtttcatcatcaaccggggcggggcaaccgcttcggatgtggcggagctgatgcgtcaggtgcaaaagacagtacaggaacgggaaggcgtgctgctcgagccggagatccggctgctgggcagttttgaggaaggaatgtgaacctacaatggattttctctttgtgaccggtatgtccggggcaggcaaaacggtggcagtgaatgagctggaggatatgggctacttctgtgtggacaatatcccatccggcctgattggtgcttttgcgcgcctgtgcgagcagtcgccggtgggcgggcgcattgccctggtgaccgacttccgcagcggagagcagttcgcccggttcccggaggcgctggatcagctcaccgccgagggacatacctaccgtatcctgatgctggaggcggaggacagtgtgatcctgcgccggtacaaggagaaccgccggcggcatccgctcctggaggaggggagcgccggtctggaagcggccatccgcaccgagcggaagctcctggagccgctccgtctgcgggcggattaccgcattgatacgagctttatcaccatagcacagctccgggagcgggtggaacagttcttcggggacgacagcggcaagatgatcgtcacctgcatgtcctttggatataagtacggcattccggctgaaaccgacctgctctttgatgtgcgctgtctgcccaatccgttctatgtcccggaactccgggagcataccggcctggaacaggcagtccaggagtatgtgctggctggggagacctcccagggactggtacagcgtctggataacctgatggactatctgctgccgctctacctggcagagggcaagtgcagcctggtgatcggatttggctgcaccggaggccggcatcggtcggtgacctttgccgagctgttccgggagcgtctggcccggaagggataccgggtctcggtgagccaccgggacgtgaaccgcagccgctgaaaggaggagactgccatggcgtttgccagtgaagtgcggaccgagatcctggaaaatctcaccctccgcaagaaattcagaagggcgcagggatatggtctgttgctctgttccaagcattttgacgtcggggagatctcgatgaccaccgagcggcaggagatcgcccagctctaccgggccaccctccgggatattcttggcaagggctgtgaggagatccccatcacccgcaccggcatgggaaatgccacccggcactatgcggtggcgctgtcccatccggcttcccgccagaaggtattggagtatttcgggcagcagggggatcagatcaacgcggagatgatcgcccgggagggggaggcagcggcctttctcagcggtgcctacctggcctgcggatcggtgactgacccggagaagaactacctgctggagtttaccgtcaaccgggcgggactggtggagccgctggcggcactgctggaacaggtggtgggaatgcccaagttccagcttcgccgggaccaggcggtgctgtactaccgggaaagtgagaacattgaagatgccctcaccgccgcgggcgcacccaagtcagccatggagctgatggaggtgaagatcgtgcgggatatgcgcaacaaggtcaaccgggtgaccaactgcgaaacggcgaatatcgacaagacggtgactgcttcggcccggcagattgcggatattgaatatctgatcctgtcgctggggctggagggtctgccggaagagctgcgggaagtggcagtgaagcggatggagaatccggaactttcgctgcgggaattgctggggacactcagcgaaccgctgtcccggtcggggctcaaccaccgcctgagccgtctgagccgcatggcggaggaactgcgtacccggaacgcagactgattctgagagaaaggaaggtgccgtatggaacgatttgtgcatctgcatgtccacagtgaatacagcctgctggacggcgcctgccggatcgaccggctggtggaaaaggtcaaggcgctgggacagccggcagtggctgtcaccgaccatggtgtcatgtacggcgccattgaattttatcacgctgccaagaaggcgggaatcaagccgatcatcggctgtgaggtgtatgtggcgccccggacccggtttgataaacagcaccgagtggattcctcgccttaccacatggtgctgctctgcgagaatgaggagggctatcagaacctcatcaaactggtgtcggcagcctatatcgagggcttctacaacaagccccgggtggacaatgacctgctccggcagcaccacaagggactgatctgcctgtcagcctgtctggcgggacggattccccggatgctctccgccggcgactatgccgcagcggatcaggcggtcaaggagtatgtggacatcttcggcagggagaacttcttcattgagctgcagaaccatggcatcgaggaacagaagcgcatcctgccccagctcatcaagctggcccgggagaatgaggtgggattggtcgccaccaacgacgcccactacatcaaccgggaggacagcgccacccagagcattctggtctgcatccagaccggccggacggtgaacgatcccagcgatctggaattccagaccgaccagttctatatcaagagcctggaggagatgcgtcaggccattcccgatgtggacgaggcctttgaaaatacggtgcgcattgccgagcggtgcaatgtggaatttgagttcggcaagaccaagctgccctactttgcggcgccggacggcgaggacaacctttcctacttccggcgtatgagctatgagggcatgcaccggctgtacggggaaaaccccgatccttcggtgaccgagcggctggaatatgagctgggggtcatcacccagatgggctatgtggactactatctcattgtccacgacttcatcgcctacgccaagagcaagggaatcccggtgggccccgggcggggcagcggtgcgggcagtctggtggcctactgcatcggcatcaccggcattgacccgctgcgttacaatctgctgtttgagcggtttctcaaccccgagcgggtgagcatgcccgactttgatattgacttctgctatgtacgccggcaggaggtcatcgactatgtggtgcagaagtacggctccgaccatgtggcgcagatcatcacctttggtaccatggcggcccgtgcggcagtgcgggacgtgggacgggccctggcgctcgggtatcagaatgttgacactgtggcaaagctgatccccaatgaactgggcatgaccatcgacaaggcgctttccgcagtgccggagctcaagaagagctatgagagtgatgagaatgtcagaaggctcattgatgtgtcccgggcgctggaggggatgccccggcatgcctccacccatgcggcaggcgtggtgatcacccgggagccggcggatacctatgtgcctctccagaagaacgatgaagccattgtgacccaatatcccatgaccacactggaggagctgggtctgctcaagatggacttcctcggcctgcgcaacttgacggtaatccatgatgccgaggagatgatccgccagaccgtgccggattttgatatggaagcagttcccatggacgacgccgccaccttcaaaatgcttggcgagggacacgcattcggcgtattccagtttgaatcggcgggcatgcgcaatgtcatcacccagctggggccggagtccattgaggacctcatcgcggtgatctccctttaccggcccggcccgatggagtcgataccccggtatatccgcaaccggcacaatccccagctggtaacctataagactccagagctgcgcccgatcctggatgtgacctatggctgtatcgtgtaccaggagcaggtcatgcagatctgccggcagctggcgggctattcctacggacgggcggacctggtgcgccgggccatggcaaagaaaaagcacgatgtcatggaaaaggagcgggagagcttcctggacggcgcggaacagaacggcatcgaccggaagatcgccaatgagatctttgacgagatgagctcctttgcgtcctatgccttcaataaatcccatgcggcagcctatgcggtgctggcctaccggacagcctatctcaaatgccactatccccgggagtatatggcggcgctgctcaccagtgtgctggacaatacctccaagctcactgagtacatcggtgagtgccggcggctgggtatcgaagtactgccgccgtcggtgtttgagagccaggcgggcttctcggtgagcggggacaagatccggttcggtcttgccgccatcaagaacatcggtgacgcagtgatccggtacctggtggaggaacgggagcgccgtcccttctcggatctcatggacttctgcacccgaatgcgccagggcgacctcaataaacgggtgatggaagggcttatcaagagcggtgccctggacggcttcgggttccggcgccggcagctcctgctgggctatgaggccctcctggagagcatcgacaaggagaaccgccagaacctgtccgggcagatcaacctctttgacctatcggacgagccgatgtcggtggggaagatcctgcccgaggtggaggagttcgatctcttccaactcctgcagttggaaaaggagtccaccggtgtctatctcaccgggcatccgctctccaagtaccgcaaggtcatcgagcgccgccgtctgccggagatctcctccttcagcgatgaagagggccaccggctggataaccgcactgtgacactggtggcgctggtggcagccaaaaagctcaagatcaccaagcagaacgataccatggcctttatcaccctggaggatatgaccggctcgatggaaatgctggtctttcccaaagtgctggcactctattccgccctgctgcgggagggcgaggctgtggcagtcaccgggcggctgagcacccgggaggacgaagagcccaagctcatctgtgagaaggtggcccgcccggaggagctcttcaccccggaggaggccgccggacgctcggctgcgggcaagcgcaccgggctgttcctgctctgtccggcgatggaggaccccaggacggcggaggtacgggagctgctggcagcatttccgggtaaaacgccggtttacttccggttccgggacagcggcaaactgctgcttgcccccaaaaatctctggaccgacatctccgagccggtgctgcgccggctgcgcaccgtcctgggagaggactgcgtggtctaccgcccatagcgggccctatatctgcaaatcacagaaacggcagtgttccggctgaatccgggacgctgccgttttttcattcttcggcaggtctgcggcataagcagaccggagcggtccatattataggggtagctgacaggctgcttttttggaatttgggcagggagagtgtgtgaattatgtatcgtttcggcgattttacatcaagagccaatacagccatcaatctggcgatcaaaatctccggggaactggggcatacctatgtgggaagcgagcatctgctctgggggctctgcggcgagggcagcggcgttgcctactgcgctctgcaggcccggcatgtatccgcagggcagctcagcgaactgctggtgcgcaccatcgggcgagggagcccggtaagcctcaccccggacgacctcactcccagaagccggcgcatcctggaacgggcagcgcagcaggcccggaagaacggctgcgcgctggctggcaccgagcatatcctggcttccatcctggcggagcgggagagctttgcggtgcgttttctggaggagatcggggtcaatgagcgggagctgctgcgcactgtcaccgatacgctggagggggacgccatgcagcaggcatcggaataccgcacccagcgtggttctgcccggtcagcccggacgcccattctggataagtattcccgggacctcaccgagctggcggctgccgggaaggtcgatcccgtgatcgggcgggaggcggagctggagcgggtgatgcggattctctgccggcgcaccaagaacaatccctgcctgatcggtgaggcgggcgtgggcaagaccgctattgtggaagcccttgcccggaagatcgccgccggggaggttccggacgggctgcggggcaagcggctggtatcgctggatctcacttcgatggtggcaggcaccaaataccggggagattttgaggaccgggtgaagaatgtgctggcggaggtgaccgctgccgggaatgtgttgctctttatcgatgagatccacaatattgtaggcgtgggcgcggccgagggagccatcgacgccgccaatatcctcaagccgccgctgtcccggggagaactgcaggtgatcggcgccaccaccctggacgagtaccaccgccatattgaaaccgacagcgccctggaacgccggttccagacggtgctggtggaggagccggacgaggaatatgccgtgcgcatcctcgccggactgcgggagcgctatgaagcccatcacaaggtgcgcatcccggatgagtccatccaggcggcagtgcggctgtctgcccggtatatcggcgaccgtctgctgccggacaaggcactggatctgctggatgaagccgccagcaaggtgagcctggcagcctttgaggcgccggaacagcaggagtcgatggaggatcagctcaaacggctgctggaggagaagaactccgctgtgacccggcaggactatgagacagcggcagtgctccgggacgaggaggcacggctgcgggcggagatggaactggaaagccctgagaccgatccccgtcccaaggtgaccccggatgatgtggcggagatcgtttcctcggcatcggggatcgatgtcaagaagctggacgctgaggagagccagcggctggcgcatctggaggaagcgcttcatcagagcgtcatcggacaggaggaggcggtgcgcctggtggctgccgcagtgcgccggggtcgggtggggatcgccgacccgggccgccccatgggctccttcctgttcctggggcccaccggcgtgggcaaaaccgagctctgccgggctctggcacgggagctgttcggcaccgaaaaggccctgatccggctggatatgtccgagtatatggaaaagcacaccgtctcccggctggtggggtcgccgcccggatatgtggggtatgaggagggcggacagctcaccgagcgggtgcgccgccgtccctggtgcgtgctgctctttgatgagatggagaaggctcatcccgatgtctacgatctgctgctccaggtgctgggagatggcttcctcaccgactcctccggacggaaggtgaacttccgcaacaccattgtgatcctcacttccaatctgggggcgagggagatcagtgacagcacccctctgggctttgcctccggggagccgggagcggagcagcgccgggccgagatccgccgggctgccatggcagaggtgcgccggcagcttcgtccggagttcctcgggcggctggatcagatcgtggtgttcgatgccctggggcaggaggagctccggcagattgccgggcatcagctccaggatctggcacggcgggtgctgccgctgggctgtcatctggaatttgccccgtcgctggtggattcgctcattgatgaaaaggcctgccggtcctatggggcccgtccggtactcaaagccatccgggagaaggtggaggaccccctggcagatgccagccttgccggaacactgccggaagggaaggtgctctgccgccgggaaaatgaccgtaccgtctttgagaaaatcggttgatttttcctttcggttctgcaataatagggactatgggaaatgtgttcccgcggcggatggaagatccgtctttcaaatcagaccgggaactctcccggaagtgaaaggaagatcataacgatgattcaggtaggtgcaagtttcgaactcaagaccaaggtaactgagcagaataccgctctggctgtgggcagcggcgatgtgccggtatttgccactcccatgatgatggctctgatggagggagcggcagcccagtgtctggcccagttcctggaagagggcaagacctcggtaggcggcaatatttccagctcccatgtatcggctactccggtgggcatggaagtgcgtgcggttgccaccatcacagaagtggacggcaagaaggtcaagtttgccatcgaggcatacgatgaagccggtctcatcggcaagggcgaccacctgcgcatcatcgtcacccgggaccgtttcctccagggcgctgctgacaagctccagaagtaacagccgtttttgctgcaaaagcgttctctgtgcccacagacgggacaggggacgcttttttgtctgtgtacgggagggttggcgccgcctcttgacggattccggttagaggaatataataaggctgtctgtgaaaaattcagcaaaagggtaatcgtcaaaaggagagatcaagttgagcgagattgaaaactgcacccatgactgcagttcctgcggtgaaaactgcccctcccgcaatggaggagctccgaccagctttattgaaaagccccatgagatgagcagcatccggaaggtaatcggtgttgtcagcggcaagggcggcgtaggcaagtcgatggtgacttccatgctggctgttctggcaaaccgccgcggctacaacagcgccgtactggacgctgatgtaaccggtccgtccattcccaaggcattcggcatccatgagagagccaccggcggcgagtggggtatgttcccggctcgttccaagatgggcattgaagtgatgtctgtgaatatgctgctggaaaatgagaccgatcccgtaatctggcgtggtccgatcattgccgatgtggtcaagcagttctggaccactgtaatctggagcgatgtggacttcatgttcgtggatatgcctccaggaaccggtgatgtaccgctgactgtattccagtccattccgctggatggcatcatcattgtggcttctccccaggagctggtatcggtaatcgtggagaaggctgccaacatggcaaagatgatgaatattccgatcctgggtctggtggagaacatgagctacctgacctgtccggactgcggcaagcagatcaagctgttcggcgagagccatatcgatgagatcgctgagaagtacggcgtaccggtactggcaaagattccggttgacccggctctggcaaaggcagtggatgccggtgccgtagagctgtttgagggcgactggatggacggtgctatggaccgtctggagaccctgtaaggaggaacctgtatgtccgctgagatggaggagaagaagatccaggccgaggaggctgtcaaggctccggaaaaggacccggatcactggcgtgagcccgctgcggaaccctactgcaagctggattgtgccaactgtccgcacccctgtcacttctgattggggagagcggccggctttctgcaaactgacgcgtgccatccgctggttggcgcgcgtttttgcgcataaataccctttgcagaatcagaataaatgtgctatactaaacaagtggattttcccggtggtgtctgccgccggaaaacaggctgtcccgcttcggacgggaccggcatcgactatcaggaggaaactgtaatggatatggaaatgagcatggatattattgagatggcccgtgatctgggccgtacgctgcaggcagatgagaagtaccagcgctatgtgaatgccactctggaaaatgacaaggaccaggtgctgcaggatctgatcggcaagttcaacaccctgcgggtggacatcaaccgtgagatctccaagtctgaaaaggatcaggagaagatcgcccgtctggactccgagttcaagaccacctatcgtctgatcatggagcgtcccggcatgatggaatacaatgctgccaagagtgacctggacggtctggtacagttcatcaatcagatcattgtaggcagtgccaacggtcaggaccccgataacattcagcagtccactggctgcaccggcagctgctcgtcctgctctggctgcggcaactgatccggcgtcaagcaatagagtctgacggttttaccgttatgtggcggcttgggaccacagaatgacagggaccacagcggccctgcgcattccggttccagccgctttttattatcgatttcaggaggcagaccatggccaaattatccccgatgatggagcagtatttccgcatcaaggaacagcataaggatcatatcctcttttaccgtctgggcgacttctatgagatgttctatgacgatgccattctggcgtccaaggaactggaactgaccctcaccggacgggactgcggtcaggaggagcgtgcgcccatgtgcggcgtaccctatcacagctgtgaaggatatatcgcccggctgatcaaaaaaggatacaaagttgccatctgtgagcagatggaggacccccggcttgccaagggcgtggtcaagcgggaggtgatccgggttgtcaccccgggtaccctggtggagaccagtatgctcgatgagggacagaataacttcatcgcctccatctgtccggagggggagcagtatggcctggctgtggcggatatttccacaggtgagatccatgccgcccagttcaccgaccccgatgacagcaccctcaagaatgaactgtcccggtttgcccccaatgagatcgtattccatccggccttcctggataagaaggagatggcagagtttatccgtaaccgcctctcctgctgcgctgaatgcctgcggga

SEQ ID NO: 3080 - DNA, 20429 bp, Unknown
  16S sequences of unknown bacteria
gccgcgccgcgctcgatcgctcgctccatagatcagtcctccccttttatttttttgcgggcggcaacggtacgcagcactccgcccctcagtttgaaaattttatatcccccgcgcgcctcgtcccagccttccgtatcgaaaagcgcatcgctgagccacagttcgccgtcggtcttttccgcataaacggtcagcgtatcttttgcgctctcgatgcggatatctccgtcgcggagcggaagcgtcgcgctgtacgaggataagcgcacgagtttcgggcacaatctgtattcttcataggcgggtttcgtcggttccagtccgatgagatagcgcccgagaagatacaacgggctggcgccccaggcatgacataaactctttccgtacttgcggttatacatggcgtatttatcgtcgccgcgctcgtttttgtcgtataattcccaaaaactcgtggcgccctcgtcgatcatgccgccccagtattgcaagatctcgtgatatacgaagtcggtctcgcccgcaaggcacagcgcgctcaactcgaaaaagcgcatgaacggcgtgacgatcttttccgcttcgtcgttcaaaagcacgttttgaatgactttctttttcttttcgtcgtccagaataccgaaatacaacgcgaaaatatgcgggtgctttttgatcgcggggttcagtttcccttggtaccgcgaataatagaacaccccccgctcttcgtcccacagggtatcgaacagcacttttttcaaggcctcgtattcctcgcggtattcttcgggatcgtcgccagagatcccgcacagtttctgcatggtttcgagcgctttgagatagatgatctgttctgcggcgacttcgccgcggttgtcgatattcgcccagtcgacgaacacccagtcgccctctttgccctcgatcatgccgctttccgtcttgcgcgtgcgcgcaaattcgatgatgcgccgcgcggtggggatcatgcggcgcaaataattttcgtcgcctgcgtacatataaaaatcgtacagcccgatgatccagtaaaaagagtattccatgatatggttcatgaaatgcaccacgggcggcttacccgcgagcgccgtgatcgtgcggcgttcggttttcagatcgaaaaaggaataatagttcatcagaaacgcctgataggcgtcgcccgcccacagccagcggtcgcgcttgatgccgtcgaggaaaaattcgcgggtattgagcgccagcgtatccagcgccaccgcgtaaattttttccagtttttcatccgaacaggaaaattttgcgctccgcgcctgcggcacgaattcgcgcagtactttcaggttggtcagatcgactccctcgccgtgcagatggacgtagcggaacgccttgccgacttcggggcgcgtctgtacgggaaaatccagttcgtccgtcagttcgcaattctctttgtccgtcgcctccgcaaggctttcgccgtaccagatatgtacaagcccttcgccctcgcacgattccaaattcaccacgcccatcatctcgcggcggcagtcgagaaggagcgaatctttatccttccgcaaaatatcgaaatctacgtcttcgtaacggaaacgaaacggccccggcggcgattcgggatcggtcagcccgtcgcaccccgccgccgaataccgaaaatcgttggaagtggtgagaaattgctcgtccgagcgcaccgtttcgccgttgacgtacagcgcgggaatttctttttcgttatatacggaaacgatcagttcgtattcgcccgcccgaagatccacaaaaccttgaaattcgcgtatgtaagcgttttcgggcgcctgtatccgattcacgatcacgttgaactttccgtttgcgcgaatttccaaccgctcgggcttcgaaagcgtaaagcgccgtataaatttcacgtttttacaaaaatcgtccgtatgccagaagggcggcacgaacacctccctttcgtagcgggaagtcaggcacgcattgagttgccgtatctcgtaatcgccgttatgccatatccattctgcctttctatccatcagtcgttttcagtcctccgtacggcagcaatacggtcggtctttcgagagcatgaccgctctgccgttgatttccacttccatcggctcgccttccgaaagtaaaatttgcgttttctctttttccacggtcacgcgcaagcggcggccgcggtaagcgattttaaaagaatacttttgccagccttcgggaatcgcgggtttgaaatgcagtttgccgccgtagtcgcgcatacccgcaaacccgttcacgatcatcatgtacgcgctcccctgacaggcggaatgcacgccgttgaaagtgttcctgttcacgtcgtccagatccatgcgcgccgcctgtttcagatacccgtacgcctccgccgcatagccgatatcctgcgccacgatacagtggatccccgcggacagcgaactgtcgtgaatggttttcggctcgtaaaagtcaaagatcttgcgtttcatctcgcgcgtgaattcatggctgtataaatagatgagcaatacgatatccgcctgtttgatgacctgataacgccacaggttgagcgggtgcagatgggtgagaagaggaagtttttcgggcgggatcgcgtctacgtcgatgggatctttatcgaggaaatcgtcgtcctgcaaatacagatcgagcgtttcgtcataggcgatatacatattgtccgcggctcttttccagcgggcaagttcattttcgtcgcaatcgcacaaattcagcatgcgaagataggcgctttcgtcctccgcgcgcagtttttcgagcatttgcaacgtaaagtaaaattgatcgcgcgtgagccagttggtatagagattgttgttgacgacgggattgtattcgtcgggcccgcagatgccgttgatacagaatttgccgcccttgtgttcgataaagtttccgcggtgggacaggcacttggaagttttcgcgagcatttcgatgccgtaatccttcataaactgccagtcgtccgtggcgagatagtaacgcttgatcgcgtaaaaaatatcgcagttgaggtgatattgcgcggtcgccgcctcgaacacgtggccgcactcttcgccgtttatgctattccaggaatacagggcgccgacatcgtccatttccgcggcgcgcttttccgcgtttggcagaatattatagcggtacagaagcagttgttttgcgacttcgggcgaggagtacaaaaacgcgggcgtcataaatatttccgtatcccagaaagtatgccccatatagcccgtgcccgtgagaccgttggcgccgatgttggtttttccgtccttgcccgcagaaatctgcagcatgaaaagactgaaccgaacgccctgctgaaccatgaggtcgccctcgatctgcagatcggcattgtcccaaaatttttgccataacgtttcgctttccgcaaggcagccgccgaatcctttgccgatcgccgcggcggcgctttttttcgccgcggaaagcggctcgtcgcagtcgctgtcggtatagaacgacgcggcgcgttccaaagtcaaaacgccctttcccgtttcgcccgaaaagacgttgacgaataaatctgccatgtcctctttttgcagcgaaagtccctgcgcgcgttcttcgagggcgcaggcgacgcggaaggcggaaacttccgcacgatagtcgatagaccgcgcgttgtcctttctcgaaagggataaaagatgcaggcggacggcgttatcgccgccgatttcttccttgcgtataccgtccgcgcgggcgggaaggcacagaggcgtttcgatacgcacggaaattttttcgtcggaagagatctcgacgcggtgcatgagaacatgcacgtcgttttgacaggcgaaacgctgtaaagaaatatgtaagcgcttgtttgcggaagtgattaaatcgtattcgcgtttcatcacgccgtttttcagatccagccgccgcatataattttccgcgctttcaaaaggcgtgcacagttcgccgtcggcgtaaactttgagggcgagagcattgacctgcgaaaagatggaatgatagcggccggggaaaccggggcgctgccagatatgacgatagggatgatattcatacacaccgttaatgaggagcgactgttcgcacggcacgcccgacggcacgccctcttcaaaatagccgcgcacgccgaggtaaccgttgccgacggaaaacactgtttcattgggaagcgagcgacccttgttaaagccgtattcggtgaccgtccattcttcgggcacaaacaaaacgggcacgttgctgtgaatctttctcataggacctccgatttcgatcggttttattcttttgcaaatttaattatctacatttggtacaaaatttcaatggtaaattcatctacaaaaaaaggagccaaatgcgagcatttcgccccgatttggctccttttttataaaattttcgtcatttttgcgcgttttgtcagtgtccttgcctataacgccttaaaatttgctctactttcctatgtttttttctttcgataagtagaccgatttaccaaatttttcttcattatagttgaaattcaccaaaaaaataaaaaaccccgccgcgcaaatgcgcggcgggaacttccatatttacggtaaaagttcttctacaatatccaatattgcggtttcggtcatgggttgggataattctaaataataacgatattcttcatattcgaaaaaggcaaaagcacttgtaagactattagcatagtttatttctacattctttaccgtttgcttactcaaacatgtgattatgaaattttctagcatatcaatattagtaaaattatccgtgatgaatatctttacacgatcaccagtttctccacttatgatctcttcactaaaacaaatttcttcgcccgtactgtttaaataatatgtaacattaataatgctttcagcaaactcataccaatctaaatacaaccagtttttctgattaatttccgcatgtttttttatcgtttcctctattggttgcgaagaatactcctcttgggtacagtaacgacttttcagtttctcctgcggcataaaataaaatacggaaaacaaactaatccccaataccaaaacaaacgacgcagcaatggtagcgatttttttccaagaaaattttttacaggtaggcgtgccttcgcccaaaatatcttcttgggctattctttgacggacttcgtcccacattctctgtttggcttcgggctcctgctcttcgataagttcatgtatagagcgttttttcgccatcttatctccttaagcggttatcgttacggcatatccattatctaaccaggcggtagtatttacctgaacaaaggctgtactttgagaatatagccctgtagataccatcaaatatgtatctgttctaaaattttcatctaagccgttataatattttacagtacaatagccataagctaccattacatgtctattctgaacaattgacgttacaattctatcgtagtgatctccttgcgcaacaatgatcaaaccagcttcatcacaaaataataaaataggcttattattatctatggcgcttttcgcagaacttaattgaaatgttccccatgtattttttacggaagaataacttaaattatatcctttttgttctacatatgtctttaaaccatttttgcaatctgcttcgcttacgccgacatcgtctacgttagtacgcattaacgtatacagttcttgcattaaggcaggtatataaactttatcttttactttataacgaccatttgtataattaggagtaaaaccaggaattaaattttcgtagtaacgatcataaaaaccaacaataattccgcctgcagtaggcccacaagaattgcttaaatctgaatttgcataataatcaggcgcctcattagtcgttgtaaccatatcataggttcttctagaataatttactgtttcagagtcaaccgcatacgtactgatcggatactcgtcataatagcggtcggacgaggtttcttctgcgcttgcggatacggtcagcgcggggatcaaggaaccgcataaaagcataaaggcgcaggcaagtaaaacgaatccctttttgatgactttggacatatttttcatttctccgtgtgtaaaattttttataattaatataccgacgattttttaaaaagtttcctcaatcgtcgaatttttttagttcttccaaaacaagcgcttctaatcgggcgcaacgcttgctgatcgtcgatttactgacattctttaaacgcgcaatatccgagcgcgataaattgcagacatattccaaataatacaaatcctgcatttccggcgttaattgcttgacagcctcttttaccgcattgcgctcttccgaatcttctaaataggcctgtacgttaaaacgcgaactttcatcgtagaaattatcggggatccccacatcttcgcgataataaagtttgttgatatcatgcgccgcgttttccgtgatcttgcacatccagttatatccgtcgctcgcttcgttgaaacgatcgatatacctgatgacgcgcacaaacgtttcttcaacggtatcttcgatatgactcttgtccgttaaatacagtatcgcaatcccttttaagtggtttgcagtgcgttgatagagtttgtccaacaaatcaagccgttccgccccactgctctttttgatctgtgtcaaaagtttcgagacggcgactccaaaatacgacatccgtgataataaccctcaatttccaaatatttacaattttcttcccaattataatatatatttatgaaatagtcaaattctgacagactgtattttttaataaatttggaaatttatattaaaaatttttatttttttgtatttataggaaacttttggaaattttgcaagtatatactatatcggaaaaatatcaatccctaataaatcgaatatacggtacacacttatgaagaatcgcttaaaagcaatggaaagttatttgcgattagccgcacttgaatttaataatcccgttcaagacacggcgcattatgcgttggctctaacgctggactatttcgaaacttatgacaatctgcataattccgacaggcattacatattttgtcaactttatttcaaatcggcatatcggaacgcttcggaagtcaaaaagagcatgcacctttccgtaagcgttgccacgctatgccgttatcgtaagaaattcgttgaagcctttatctactactgcaatcttctggaaccctcgtattttgacgatctgaataaaacgacgggtttttcggcttgattcttaattttgctcacccccctatcattcatccttcttttacgaaggggcgccccccgcagcaaacggctgcagggggcgttcttgttattccgtatgaaaattcaactcaaaagacgctttctctccctcgcttgcctgcgactcgacaataaacgcgtaatctcccgcggtttcgaaaacgatacttatttttatacggatcgtatcctgttcataactgaataacaccgtcagaaaatatttgccgttttcagaaaaagtgttcccgctttcggttaccgtatattcgccgtactcggaagagattttatgcgttacgcccgaataggaactttctaacaccaactcgatctcgtaaacttcgccgcattccgcagcgatctcagaaccgttttcccgtccgttgacgagaacttgcgtgaaatcaagtacgggcgcggcagtgaccgtgtaagaaaaacgcacgtagatctctccgaattcgccgtacagcgcgacgttcacctcataatagccgatctttgcgggaacgtctgatccgacctgcacgcaccaacgccccagtgcggactgcgtcacggtgcagaaaaattcttcggaaggttttccgttgactgtccagtcgcagtaaataacgccgtaaaagtcactgatctccgcttctcccgcgggcaacgattcaccttccgacgataacaacgcgctgtccgaaatataatttatcttcggacaaggcatccatttagccgacagagccagatctttcgtcacagccgtaagggcggtcagttttgccgcgttcgcaccttccccgcaataccaacccgcaaatacgtaaccttcacgcaaaggaacgggcaaactcgcgtaatctcccgtcggaatttcttcaaaatacgtcgtatcgccgttttcgaacgcgcccgcacccgcgtcgtaagaaaccgacacggtgccgcgcatagcgtcctccccgcggatattgccgagtttttcccataccgccgcgcgacggtacagatcgtaactttcggtatcgagatagaaatcgccttcctttcccgaaagcggatcgggcacgcctgcgccgcagtaccacgcggctccgtctttcccgtcctgcccgtccgaaccgtcaacgccgttctgtccgtcgttgccgttttggccgtcgttaccgtccgcgccctttacgttgccgaccttctgccagccttgaccgacttttaaataaacgtcgtatgtttcgccgtccaagtaaaaatcgtctgtttttccgagcgattcccgaggcgcgcccgccccgaagagccaacttgcaccgtctttcccgtcggcgccgtcttgaccgttttcaccgtcggcgccgtcctcgccgtcttttccgtcctgaccgtccgcgccgttctgtccgtccttgccgtcggtaccgtcttttccgtcttcgcctttatcccccttttccccgcggacgacgcccgcattgacgatggtaccgtcggtgagcgtgacgatcaattcgcccttttcattgacggtcgcggcggaaacgctcgccccgtccttgccgtttgcgccgtccttgcccgcgaccagccgtaaaaattcttcgagagttccgtcgtaaccgagttcgcgcgcctgcacatacaccttctcctgtgcggacagaggcttttcaccctccgcgcagcctgccgaagcacccagcgccagccctatcaccagcagcgcgacggcgatcttttgtacaaatctcaatcattcatcctcctggatataatattacagcatataaaatgcagtaacttcctatcaaaaacggcacgcaaatctgcgtgccgctcaaaaacttattttaattcttcgtctgcacaggcaagcgcggcgtcgatcactttgtccatatcgtaatacttgtattgtcccaatcttccgccgaagatgactttaccctcccgatccgcgagcgccttgtatttccgatagagcgcgtcattcttttcgtcgttgacgggataatacggttcgtcgccccgtttccagtcggcgggatattcgtaggtgatatacgtgaccggactttgggagcgttcgaaatgcttgtgctcgatgatgcgcgtgtagggaatttcccgctccgtataattcacgaccgcgttgccctggtaattttcctcttcgaggcgtttggtttcaaagcgcagagaacggtattccaactccccgaaccgatacccgtaaaactcgtctatcatgcccgtatatacggttttttccgcgatatcggggttttccttgataaaatcgaaataatcgcaggaaagcagtactttcgtaccttccaaaagtttttccgcgaggcgggtgtagccgccctccgcgatgccctggtagcggtcgttgaaataattgttgtcgtacgtgaaacgcaggggcagccgcttgatgatgaacgcgggcagatctttgcaggatttgccccattgtttttcggtgtagcccttgatgagtttttcgaacacgtcgcgcccgacgagtttcagcccctgttcctcgagatttttcggctctccgatgtgcagttcttcgatctgcgagtcgatcttttcccgcgcctcgcgcggcgtgaccacgccccacattttcgaaaacgtgttcatgttgaacggtaggttatacagttcgtcgcgatagcgcgcgatgggagaattcacgaaattattgaaggaaacaaactgatttacatagttccaaacgcgttcgttgctcgtatgaaagatatgcgccccgtaaacgtgaatgttgacgttatctttgtttttcgtaaaaatattgcccgcaatgtgggggcgtttgtcgatgacgaggcattttttgcccgcttttttcgcttcgtaagcaaaaacgcagccgaacagccccgcgccgacgatgagataatcatatctttccatatttagcactccgatgaagtattctaagcatattatatcccatttgcagggctccgtcaagacaattcggaaaaaaacgggattttcacgtcacgcgtagcgatactttttccgttttccccacatgaaggcgaacgtaacgagcagcgccagcccttccgaaacattgatcgccatccaaacgccgtccagcgcgaagaacacgggcagcgcgagaatggcggcagcgggcaaaacgagggttcgtataaaggagataactgcggatacccacccgttgttgagcgccgtaaagagagcggagccgaatacgttgaaaccgcagatcaaaaatgaaaacgcgtaaatgcggtatccgcgcagcgtcatgacgaacagcgcgtcgtcgtatccgacgaacattttcgaaagcggtacggcgagcccttcggcgagcgcagtcatgcccacgccgagaacgcccatgatcacaagacttttgcggaacaggtttttcagttcgtcgtgatttttcgcaccgtaatggtaactgatcacgggcgaacacccgaccgcgtatccaatgaaaaaagccagaaagatcatgctgacgtacatgatcgcgccgtaagccgccacgccgtcctctcccgcgattttcatcaattgaaaattgtatagcagcgtaaccaccgaagcggatatattggacaaaaactccgaagatccgttggcgcatgatttcaataatattttcatgtcccatatcggcttagcgaatcgtaaaaggctgtcgttgcgccgcatgaaatacaagacgggaaacacgccgccgaaaatctggctgacggcggtcgcgatcgccgcacccgccagcccccagcggaatcccgcgacgaacagcgcgtccagcacgatattcatcgcgcccgccgccaccgttacgatcagtcccagacgcggtttttccgccacgacgaaaaaactttgaaatacgttttgcagcatgaaaaagatcatggaactcaaaacgatcctgccgtataacacgcaatagtcgtaagttgctcccgcggcgcccaaaagagaggctattttcggcaataacaactggccgagcaccgttaaaagcaaacccgccgccaccatgcagatcacgagcatggaaaaatatgcgtgcgctttttcgggttccttttcgcccagcgttttggcgacgagcgcgctccctcccgtaccgatcataaatccgatcgcgcccatgatgatcagaagcggcatgatcagattgatcgccgtcaaggcgcttttcccgacgaaattggaaatgaataatccgtccacgacgccgtatatcagggtgaatacgatcatgaccaccgacggcagtacgaaacgcaaaagttttttataatcgaaatgctccgataactgaatcctcatccctttcccctttcttgtttgaacaactctttcacagcgtccacatagcggcggttcaaagccacgaacgcagcccgctcgcccttttcgaaccgttcaaacgcagcccgctcgttgcgcaggatcaagtccgccgtgaccgatgcgagccgttcgcccttttcggtcagcaaaatacatttattttttctgttgtcttccttcgtccgcaggacgatatacccttcctcttccatcttgcgaagcgcggaattcacgctctgacggttgatgaacatggcgtccgcgatctccgattgcgttaagggtgcgctcgtttcgcggacgcaatataatatccacagggcgcagtcggatattttatgcgctacggcaacggcatgatacatttcgtccagttcgttgtacatctgattcaggcttgcgtactgcaaatctttttcgtctttcatcggctctccttttttgtatgatttcatattatttttatgcattataatatgatttcggataattgtcaagcaattgcgccgaaacgcaaaaaaaacggttgacatcgccgcgaaaaaaaagtataatcgaaacgctatgagcggactttgaaacgaaagcgttctcatgcaaataccttagaccacccttcggggtcgaggccatacggacagccgggtcaaatgccgattttgcggcgcgcgcgccgcgttattgattgagttaaaagctcaaattttataagttggttactttataaccggtgcgttccgcacacaacttgtgaaacggtcaataatattggttgtcagtgagtatttgctttttgtaacttacgctcattttggatcctttgcgtccatcaaatgaaacgggaaacgggcaagcggaaacgcttgcccgttatttttattcccagaaagagagaggtacgttatggaaaaaatgaaattatacggattcaacaatcttaccaaatcgctcagtttcaatatttacgacgtatgttacgccaagaccgcgcgtgaacaaaaagattatatcgcctatatcgacgaacagtataattccaaacggctgacggaggtgctcatcacgctcacctccatgatcggcgcgaaagttttgcatatttccagccaggattacgacccgcagggcgcttcggtcacccttctcatatccgaccattccatgatccccgcgcccgaaacgcaggtggcgcacctcgacaagagccacgtgaccgtacatacgtatcccgaatatcaccccgaaacttcgctcgcgaccttccgcgtggatatcgacgtggcgacgtgcggcgagatcacgcccctttccacactcgattatctcatcggcagtttcgattcggatatcatcaccatggattaccgcgtgcgcggctttacgcgcagcatcgacggcaaaaaggtgttcaacgacgggaacgtgacttccattcaggaattcatctcccccgccacattaaaaaaatacgacgccgtggatatcaacgtgtacgcggcgaatttattccatacaaagatgcttttaaaagaaatcgatctgcaaaattatctgttcaaccgcgacgcgtacgagatcgcgccctccaaacggttggagatcatcgacaacctgcgccgcgagatgatcgaaattttcaacggacagaatatttactgaggaggcgagcatggatcagacgagtgcgcctatcttcgaggcgctggaaaaattccgtaaaatgcgcgtggtcccctttgacgtgcccgggcacaagcgcgggcggggcaatcccgaactcgtggattttctgggggaaaagtgcgtttccaccgacgtaaattccatgaaacctctggacaatctgtgccaccccgtttccgtcatccgcgatgcggaaaaactcgccgccgacgcgttcggcgcggaaaacgcctttctgatggtgggcggcacgacttccgccgtgcagagcatggtcatgtccgcgctcaaaagcggagaaaagatcatacttccccgcaacgtacataaaagcgtgatgggcgcgctcgtcttgtgcggcgcggtgcccgtgtacgtcgatcccgaatgcgacgcaaggctgggcattccactcggcatgagccttgccgcgctggaaaagaccatcgaaaaaacgcccgacgccaaagccgtgttggtaaacaatcccacttattacggcatctgttcggatataaaatccatcgcggcgctggcgcataaacacgggatgctgtgccttgcggacgaggcgcacggcacgcacctgtatttcggggaagatctgcccgcggcggcgatccgagcgggcgcggatatggcggccgtttccatgcataaatcgggcgggagcctgacgcagagttccatactcttaacgggaccgcgcgtcaacggcgactacgtgcggcagatcatcaatctgacgcagacgacgagcgcctcttatcttttattgtccagtctggatatttcaaggcggaatctggcgctgcgcggaaagagcgcgtttgcggaagtggtgaaactcgccgactacgcgcgcggcgagatcaacgatatcggcggttattacgcgttttcttccgaactgaaaaacggcggcagcgtgtatgatttcgaccgtaccaaactcgccgtgcacacgctggacgtggggctggcgggcatcgaagtttacgatattttgcgcgacgaatacgacattcagatagaattcggagatctgggaaacgcgctcgcctatctttccatcggcgaccgcatccgcgatatcgaacggctcgtgagcgccctttcggagatcaagcgccgctacgcgcgcgacaaaaacggcttgatggaaaacgaatatatcgcgcccgcggtagccgtgacgccgcagtacgccttttacgcgcccaaagaatctctcccgctgcgggaaacggcggggcgcatatgcagcgaattcgtcatgtgctatccgcccggcatcccgatccttgcgccgggggaacgcgtcacggaaaaaattatcgaatatatccgatacgccaaggaaaaaggctgttcgatgacgggccccgaggacgccgccatcgagcggctgaacgttctgaaacaggaagtttgaggtgaaaaaaatggacttatggttcagtgaaaaacatacgccgaacgtaaaattcagtatccgcgtggacaggcagttgtacagcggacagagcgattttcaacgcatcgacgtgttcgaatcgcccgaattcggccgcatactcgttttggacggatatctcatgctgacggaaaaggacgagttcatctatcacgaaatgatcgtgcatacgcccttggcggtgcacccgcacgtgaaaaacgtgctcgtgatcggcgcgggcgacggcggcgccgtgcgcgaactgacgcgctatcccgagatcgggcgcatcgatcttgccgagatcgacgggcaggtcatcgaagtgtgcaaaaagtttttgccgcagacttcctgtaaaatggacgatccgcgcgtacatatctacgtggaggacgggctcaaattcgtgcggcggcacgccgacgaatacgacttgatcatcgtcgattcgaccgacccgttcggcccgggcgaggggcttttcaccaaggaattttacggaaactgctataaggcgctcaaagaggacggcatcatggtcaaccagcacgagagccccttttacgaacaggacgcgctcgccatgcagcgcgcgcacaagcgcatcatcgaatctttccccttttcgcgcatctatcaggcgcatattcccacttatccgtcggggcattggctgttcggattttccacgaaaaaatatcatccgctcaaagatctcgacgaggcgcgctggaacgcgcgcggcttaaaatgcagatactacaccaccactttgcaccgcggcgcattttatctgcccgcgtacgttgaggagatgcttgaagatgttgaagaaaaacgttgaaacttttttaggctgcgacagtgactggcgcgacgcgcgcgtcgtgctgttcggcgcgcccttcgattctacgacttctttccgccccggcgcgcgatttgcgagcgccgccatgcgcaaagagtcttacgggctggaaacgtacagcccctatcaggacaaagacctcgccgactgcaaaattttcgacagcggcgatctcgaactttcgttcggcagccccgccgccgcgctttcggacgtcgatcggcgggcgaaacatattttaaaagacggtaagatcccctttctcatcggcggagaacacctcgtcacactcggcgcggtgcgcgccgcgtcgggcgcgtatcccgatctgcatatcgtgcacttcgacgcgcacgccgaccttcgcggcgaatatctgggcgcgaaactttcgcacgcgtgcgtcatgcgccgctgtcacgaacttctgggcgacggcagaatttttcagttcggtatccgttcgggcgacaagtcggaatttacctggggcaaagaacgcgtgcagacgcgcctgttcgatttcgaagggttggaacggacattggacgccctcgcgggtaagcccgtctatttcaccgtcgatctggacgttctcgatccttccgtatttcccggaacgggcacgcccgaaccgggcggcgtaagtttcgaagaactcagaaaggccgtcacgctcgtgtgttcgagcgcaaacgtagttgcgctcgacgtgaacgaactttctccccattacgacgcgagcggcgcatcgaccgccgtcgcttgcaagatcgtgcgggaaatgctgctcgcaattcaaaaacaggaggtatagatcatgggaaaagcactgatcatcggctgcggcggcgtcgcgtccgtcgccattcacaaatgctgccagaacagcgaggcgttcgaagagatctgcatcgccagccgcaccctttccaaatgcgacaaactcaaagcggcgctggaaaacaagacgaaaacgaaaatttccaccgcgcaggtggacgcgaacgacgtggaagcgctcgtcgcgctcatcgacgcgcaaaaacccgacgtggttttgaatctcgccctgccctatcaggatatctcgatcatggaagcctgtctgcggacgaagacccactacgtggataccgccaactacgagcccgaggataccgcgaaattcgaatacaaatggcagtgggcgtaccgcgaggcgtttgaaaaggcgggcatttgcgcccttttaggcagcgggttcgaccccggggtcacgggcgtgttttcggcgtacgcgctcaaacaccacttcgacgagatcgagtatatcgacattctcgactgcaacggcggcgaccacggctatccgttcgcgaccaacttcaatcccgagatcaatatccgcgaggtttccgccaacggctcctactgggagaacggacattgggtggaaacaaagcccatggagatcaagcgcgaatacgactttcagggcgtgggcaaaaaggatatgtacctattgcaccacgaagagttggaatctctggcgctcaatatcccgggcatcaaacgcatccgctttttcatgaccttcgggcagagttatctcaaccatctcaaatgtctggaagacgtgggcatgacctcgatcgaacccattgaattcgagggacaaaaaatcgtgcccctgcaatttttgaaggcggtgctgcccgatcccgcctctttgggcccgcgcacggtcggaaagacgaatatcggctgcattttccgcggcaaaaaggacggaaaggacaagacctattatctgtataatatctgcgaccaccaggaatgctaccgcgaggtaggctcgcaggcgatctcttatacgacgggcgtgcccgcgatgatcggcgccatgctggtgatgcagggcgtatggaacaaggcgggcgtgcacaatatcgaggaattcgaccccgatccctttatggacgcgctcaaccgctggggactcccctggcaagaagatttcgatcccgtattggtagactgatggaattgaaaacgccatattttctgatcgacgaagcggcgctcgaaaaaaatctgcgcattttgaaatccgtatccgacgcgtcgggcgcgaaaattctattggcgcaaaaggcgtattcgtgctttgcgacgtatccgctcatagcaaagtatctcgacggcacggcggcgagcgggctgtatgaagcgcggctcggcaaagaacatttcggtaaacagacgcacgtgttttcccccgcgttccgcgaagaggaaaccgaagaactcgcaaagtattgcgaccacgttatcttcaattcgcccgcgcaggcaaaaaaattcgcgccctttttcagggcgcggaatatcagttgcgggctacgcgtcaatcccgaacgttccacgcagcaaggacacgcgcagtacgacccgtgcgcgccctgttcaaggctgggcacgacgattttagaattcgacgagagcgttctgccccttctggacgggctgcatatgcacacgctgtgcgaacagaacagcgacgcgctcgaagaaacggtcgaggctctcgaagaaaagttcgggaaatacctttcgcgccttcgctggctcaacctcggcggggggcaccatatcacgcgcggcgattacgatatcccgcggctcttatccctgctcgtgcgcctgcgcgagcgatacggtctgcaaatctatctcgaaccgggcgaggctgtggtcttaaacgcgggcacgctcgtatcgcgcgttctggatatcgtacaaaacggcatggatatcgcgattttagacgcttccgccacctgccatatgcccgacgttctggaaatgccctaccgcccgcccgtacgaaacggcggcgcgccgcacgaaaagaaatacacctaccgccttgcgggtccgacttgccttgcgggcgatatcatcggggattactcctttgacgcgccgctttgttgtggcgacgagatcgtcttcgaggacatggcgctgtacaccatggtcaagacgaacacgttcaacggcatgcccctgcccgccatcgcgctgaaaaaagaggacggttctatccgcgtattaaaaactttttcctatgaaaatttcaaaacccgcctttcataaggcgggttttttattattaaaacattttgctttcgcccgcttttacagtgcagggtacgccgtttttatacacggtgatatccacgtcgggcgtgtattccgcgaaatcttcgccgaaccgcacttctaccgtgccgccgcccgcgacgggcagtttgcccgtgccctctaccccgcgcgcggggagtttgcagtattcgaaggcgcgcggcgcgagatcttcacgcggcatcagccccagacagtagcgcgacaactgccaggtgggacagcccgaccactgatggcagtgcgaccagcgtccgtcgaacacttccagccaggtgttgtcctgcgcggcgagccaaccccagcacgtcttatactgcgatatgacaaaatcgccctcgcccgcctgccacaatatggggaaagcgaaatgcgaaaagtacggtgtgatgagccgcgggttgttcttgtcgggcgcgccgagacggggcgcgctcatatcgttggggaaacaggacagataatggcgcttgacgtacgcgacgcagtcctttgcctcctgcccctcgaaaaacccttcgcccaatgccagaacggcgcggtgcataccgattttttcccattcgcccgcatttttcacaagatacgcggcaatgacggcgcgcacacggccgagaaactcttccgcaaaggctttttctttcgtatcgcccatccattcgcaccaatcgacatacgccctgagcgcgttatgaaggtgcagattgacgcccatgtcgctctcgccctcgttcgtgacgtacccccagtcgacgaacgcccagtgtacgtctcgcgaacagcccgcgttcgtgaagttctccgcaaagtagcgcatattgcgctttgccgcgtcaaacgcccaggtaaaatactctctgtcgcccgtcatgcggaaaaatttcaaggacgcgcgcacccattgcagggcgtaggtggaaagatagccgacgccgcccggacacagccccgcgacgcagccgtcttccgcggcgcactgcgccgcctgcaccagaccgcggcggatcatgcgcatatcgccgaacgcggcgttgcagatctcgatgcccgcgccgatgacgtcgcccgtccattcgccgcgttcgcgggtgggattgtccacgagcgcgtcctccgagcacgaacggaaagtttcggcgccgatgcgccagatcttatcgagaagttcgtcgccgctctcgaacgcgccgcacggcgcgccgaaataggtgcgctccaaaaaattcacagagcgcacgcgtatcttgtccgcatcgcccaaaatatgaatctccgcataccgaccgccgcgcggcgtcaggtttccgaaagagtttttcccctccgcaaggcggt

SEQ ID NO: 3081 - DNA, 32759 bp, Unknown
  16S sequences of unknown bacteria
atgcccgcgcttccccaatttccttccgccattccgcggccctcctttgcgatcggctttcctcatttttattataccatgttttcgtgcgcggggcaaggcgtgatggaaccgataaacgcgcgaaatgcacaaggacagttttgacggtggcgcagccaattttttccaaattgaccgcttttaatgcggattttccccgccgaatggcggcctggccttgcatttgcgcggggattgtgctataataaacgcgcacaaaaaggaggtgtattgaatatggcatatgtgattggtgatgagtgcatttcttgcggcgcgtgcgagggtgaatgcccggtgggcgcgatttccgaaggagatggcaaatacgtgatcgatgcggacacttgcgcgagctgcggcgcttgcgcggcggtgtgcccggtgggcgctccgaaggaagcctaagctaggcaagtcccatcgtccggtttcgggcgggattcccgtccgcgctgtaggataaatcaaaggattcccccttcgccaacggcgaagggggaatttgctatttcagtgagcggatcacgcaacatgggtttcccacggccagacagttggccgggatgtccttcgtgaccacactacccgcgccgattacgctgttcgcaccaatcgtcacgccgggcaaaatgagtgctcccgtgcagatccatacgttgtctccaatggttacggggtgggcgtattccagtcccgcgagccgctgctccacgtccatggcgtgctcttcggtgatcaggcagacgtttggagcaatgaagacgttgttgccaatggtgatttttccgctatccatcaatttgcaattgacgttgagaaagcaattgtcccccagggtgacgttgtagccataggtgcaaaatagcggttgttccacggtgcaattgtcgcccaccgcgcccagcaaatcgcggatggcggcccggcgcgcttcgcgctccagcggatggagattgttgtatgcgtataatttttgtacggtgatgtcgcgatccgccaccagttcggggtcgcccggctggtacaaaatgcccgcatacgatttttctttttcggtcatagcaataactcctttgccattctaacgggaattatacgggaaaaagcggacaaaatcaacgggcaattccgccaaaaacgccactcgcggcccaaatggagagaaggcgcgcgcgtttatcctttttccggttcgccctcgctgcgctcgcctgcatctagcgcgcgggcatagcgagcgatcttccctttggccaccaggagcatccggccatagcgatccatatccacgtcatccatgcgaaaattgggcgcggaaacgcttacagcgtattgcggatggttttgcggcgcgggcaacgaaacggccacgcaacacacgccgggatcgtgctcatcccgttccagagcgtatccctgcgcgcgcacctgcgcaagctggcgaagcagatccggcaaggtggcaaccgtgtgctctgtgaattgggtgaaggttgtgcgccggtagagcgcgcgcacctgcgcgtccggcaggtctgcgaggatggctttgcctagcgcggtgcagtatagcggcgcgcggctgcccatatagctaatcatgcggatggaacgggtggattcgattttatcgatgtatagaatatccttttctgcgcgcacgcccaggtgcatggtttcgttgatttggcggtaaatttctgtcatgcaattgcggattaccgccacgatgtccagccggtgcaaagacgcgctacccacctcgaacatttttagacccagcgtatagcggttggtttgcgcgtcgaaccatgcgtagtccaattccaccagcgtgcgcgccaaattgaacgccgtgctgcgcgcgagccccagcgcatccgcaatttcgtatagtttcagcccatccgggcgctggctgagcaactctagcatggctagcccgcggcccagcgttcgattgggaagctccgccatggttcctcctaattttgcgatatatgggcggctgccacaaagccgccgcccacgcgatgtttttatgctttccagtccacaggatagtctttcaaatactcttccagcaggccgcattcatccagggttttgaatagcgtgtagcgcgtgcggtaatccttagcgcactgcatggagaggttgagcaattcccgatcaatgccgcaatcttgcggagtgagcggtgcgcccagcgtttgcaaggtagcgcgcacgcgctcgaagggcgggagcgcctcgatgcaagcgcggatttcatcaaagcgcgcctgcgtgcgttcgatgcggcgcttctgctcttcccaggagaggaaatccccttcgttgtcccgcataatggcgttccccgcttcttcgccataggcgtagagcatccatttggtgcgcgcttcgcggctgatgcgctttgcgcggatggcttccaaatccaggacaggcaaaccttcctgcgcgaaccgcgtgaagatgggccacacgagcagcgtagccacgcccacgctatcgccatgttgcggcggttttttgtggtgcgaaagctgcatcatttcccaatagtgcgcgatgttgtgctccacggaagccacggcgcgcgtgttgccgatgatcatgatcgtcatgcccgccagcagcagcgcttcgatgaggatgcggatgcccttatcggatttggaacggatctcttccgcgttttccaccagttggttcaccgcgtcggtcacaatctggccgcaagtggggcaataaggttcgtcgttcacgatattgcccacaatccaatccgctttggcgatgtattttcccagcacgtctcctacgccggaagccaccatgctcagcggcgcggttttgagaatatcgatgtcgcataggatgatatccgggcaattgccggcacggtgaatcttcacgccgcgcaacagaagcgggcagaccaccgaagtgtatccgtccatggagggcgcagtgcctacgcacaccatgggtagattggctcgcttggcgttcacgcgcacggtatcggtgatagaaccggagccaacggataccaggaattccgtatctggttgcagcgaaagcagcacttcgcccacggcggtttcatctggatccatcacgccttcccgccggatcacgcattccaccacagtgaatccatccgcgcgcagcagcgccgccgcgcgcttgccagcgatttcccaagtgttgttgtccgctaccagcacgcagtgcgtgcccagggcgcgcttgcgaatgtagcgcgggaggttttccaagatgccgttgcccacatagatatcttgcgtcggctcgttgtgttcgcaggggcaatcgcaggcgaggccgctgattgtcaaacggctatccgcgtcatacgctatagaatatcccattgccacttctcctttcgcgctacggctgcttgccgatgtaggccaagatgccgccatccacatacaacacgtgtccgttgacgaaatcggatgcttcgctggccaggaataccgccggccccatcaaatcctccgtcgtgccccagcgcgccgcaggcgttttggcgatgataaattgatcgaagggatggcggctgccgtcgctttggcgttcgcgcaggggcgcggtttgcggcgtggcgatatagcccgggccgatgccgttgcactggatgttgtattggccgtattctgagcagatgttgcgcgtgagcatttttagcccgcccttggccgcggcgtatgcgctcacggtttcgcgccccaactcgctcatcatagagcaaatgttgatgatcttgccgtgcccgcgcgcgatcatgccgggcaacacagccttggcacaaataaaaggcgcgttgagatccacgtccaccactttgcgaaactcttctacggacatttcgatcatgggtacgcggcggatgatgcccgcgttgttgaccaggatatcgatgggcgcaatgtcgctttcgatgtggcgcaccagatcggttacctgctgctcatccgtgacgtcgcacacaaagccctgggcggggatgccctcttcgcggtaggcgttgaggccgcgatcgaccagctcctggttgatgtcgttaaacacaatccgcgcgccggctgcgtggaaggcttttgcaatggcgaagccgatgccatagcttgcgcccgtgatccatgccgtttttccgctgaggcggaatttttccataaagtcagtcataggatttccttcctttctttcgcattggatgacttcacagtatcagagatgcgcggcaaagtcaagccccaaatggcatttgcgcgaggccgattcatcattgtgaatccttaagcgatgctgcccagaatttcgccgatggagccgcgtagcaccagggcggcggcatcgtcgcgcggggtagtgtcccggttgatcagagcgagtttttgcccgcaataggcgtccaacaaggcggcggcgggatagacggtgagcgatgtgccgcccacgatgagcacatccgcttccgcaatggcgcgcacggcagccgcccaggtttcctcgtccagcggctcttcatagagcaccacgtctggcttgatggtgccgccgcaggcgcagcgaggcacgccttcgctttcctcgatggcggagagcggatagaatttgccgcaccgcatgcaatggttgcggtagatggagccgtgcagttcgagcacattttgagaaccggccaattggtgcaggccatcgatgttttgggtgacgaccgcgcgcaagcggccgtccttttcccagcgcgccagcgcgcggtgcgcggcgttgggttgcgcgccatggggaatcatcttggcgcggtagaattcgtaaaattccgcagtgtggcgcaggaaaaaggtgtggctgagcatcgtttccggcggatagcggaaggattggcggtatagcccgtccgcgctgcggaaatcgggaatgccgctttcggtggatacgcccgcgccgccgaaaaagacgatgtttttgctgttttgcacccaatcttgcaggagtgcccgtgcatcttgcataattcaatccctcctgtatccgagatgtactttgcggaagaacattgcgtaggaacggctttttgcatttttctcattataccatgagaacgggctgtggggaaggcattttataagattttgttttccaacggcggcgtttgcttttttccggcagggtatggcgattttccgcatgttccgcgccaaaattccctgcctgggcgtcgtgcaggccgtggattttgcgcgtgcccgatgctataatgctgctaggattgtttgcgccggagagggcgcggcttgctaggggggattggcatgaaaatatattcgctgaaagaccattggtgcctgctttcgtattacacggtttgcccggaagcgccggacggctctgggcgtgtgttgttgggcgctgccgaccagcgcgcgggtagggcgtatgccgccgtgttggacgcggacggaaatttgctggacaaattcggcggcgtaccgctggatcggagcttttggcacacgggtttgtggcagagctggagcccagacggccggtttgtgtattatcaatcgggcgaagcttacgaccggcccgctgtgacgcgccgcgaactggcgacggggaaggaagtgcgcatggagggcgcggatatggaaggcgcgcccacgggcgatgcgccggtcacttccggtctgctgggcatgctctatgcagcgggctatggcgatacgcattttcatccggacagggcgccggtgccctttgggcagcgggacaaacatggtttattcacctacgattttgacgcgcgcaccgcccgactggcccttagtgtggcgcagctgcgggaaattgtgggcgatcctcagttggatacatgggatcgcgaacagcagaagaagacgggcgacggtactacgttgatggcgtattgtctgcgctggagcccggatgggaaacggtgtttgttccattttggcaaccattgcgtggataagcggcgtggcgagcccaaaattctctatatcctcacggccaatgccgatttaagcggcgtaaagctcgcgctgaatctgtgcgaggggcacacgggtgtgcattggtcctatcagccggatggcaagcgcttgatcggctatggatacgatccacaggatgcccggcgctcttatttgatggaagtgaacgacgacggctcggaataccatgcgctttcccgcttacagggcaatggcggccatccatcgcgccatccatttttgccgcacctcgcgtttaccgaccgctttgcgggtgggatcggccgcaattgcctgatcgacctgcgggaagaccgggttatgtgggatttttgcgagccggaaaacaatggccctgtggagcccggacgcaatcctacgcatgtggacaaccatccggtattttctcgcgatggaaaggctgtgtggatgaaccgcatgcgcgacggactggcggagctggtgcgcattgaaatgccaaaggagtgtttgcaggcgtgagcatttggacgattttggagggcggcatgaacatgcccacagacaagacgctggggcgccgcttggcgaaccgctttgggcgttttctggccgccaggcgcaagaatgtcacgatcgcgcgcaatgcgctcatcagcccggaggccaagatctgcgcgcgtgcgggcgcgatttgcattggcgcaggcagcaccgtcgcaccgggcgcatgtgtgcaggggagcgtgaccattggggaaaactgttccatccagatgtataccattgtgtgcggctatgaaaaagcgcccattgtaattggaaacaacgtgcgcattgccgcccactgcatgatggtttcggccaaccataggttcgatgacccagaggtccccatttgccggcaaggtttgaacttcgctcccatcgtgattgaagacgatgtatggattgccgcgcgggtgaacatcatggcgggcgttactgttggcaagggtagcgtgttggccgcgggcgccgtcgtcacgaaggacgtgccgccctatagcgttatggccggcgttcccgccaggcccatcggccggcgtggcgagaaaaaggcaaaaggcgagcgtgagtaggtcattgcgaaaggtagaatcaaaagaaatcgcccgctgcaacgcatgttcaacgggcgatttctgctatacaatctatgattctgtttcgtcctcgtctgcttcgggtgcgccttcctgcacggcgggcacacccggcacgattgcgctgggcgccacgccatatttgcgccggaaggccttatagaaagagttgggcgaagagaagccacacagctccgccactttttgcacggaaacgccgggttcttgcatcagttgataggcgcgatccatgcgctgcgtgctcacgaacacggaaaacgtcacgccggtggcgtttttgaggatcttttgcaaattgggcttggaaatgccgaagtgatccgccacaaaagtggtgcacatatccacggaaaataggttttcatggataaaacgcagaacggcggcgggcaaatcgttgtccggtgtgcggctatccagcagcgtttggcaaatttggtgaaagcattcgggcagttccacacgatagaggtgctccagattgctggtatccagcgcgggcaccacaacgcgaaagagttccgccgggtattccagtttgatttgcgccagcatgtgcccgatcatggaatgggtgtgccgccccagcagaatgcggtcgggatgcgagagaatcgtttcggcggcttcgctcagaatgatgcgcgccagagcctcgtcgcccgtggacagagcgttgtacatttccaatagttgcgaaaggctcaagggcaagactgtgtgttccatttgcgcctccgacagatccgcgggcgtgatgacagacgcggtggatggaatgaaatcgaaatattgcaattgccggtaagcttccgccagatcgtttgcgcgggcaaaggactgcgaaagaatgcaggtgatgggcaaatcgcaggcgcgttgcaattgcgcgcgaatctgttccagcgattcgcgccgctcggtctctgcctcgggcaataccagcaagatggaaccgctcgatagcgtgtgcgtataataaatgtctggaatttccgtttgcgcggcgtgcagcatggcatagtgcgcctgcgccatgcgatccaccgaattttcccgccaatccaccttcaggagagccagacggtaagcgctggggaaatcgggaaaaaattgagcgaaatcgccgcaatcctttgccgcatacaggccgtagagcaacgctttatcaaaaagctggttgcgcaattgcagcttttgttctttcaccatttccgcgtggctgctgagctggcggtcgagatatgagatactggaagccaccacgccatagtcctgttccagctggcggaatagccctcgtttttttgcgttttcccgggtttcttcgtccggcacgggaaaatgcgattcttgcagggaatgcagaattttttgcatgggtgcagcgctgcggtgggaaaagatcaccaccattgcgatggcgacggccacaaaggcaatgatatacagtgcgagcatcttctccagcggcgccatttgcgcgtgcaaatacgccttggggatgcccaattccacggagatccccgtttggctagaaacggcgcgaagcgcttcgcaggatgcgttgccatattccacagctccctgttgcaaaagcacgttgccgttcacatccgttatgcgcagatatccgccagagagaatggcctcatccgcgagcatgttcatgagtttgtctatgcgcagggtggcgtaatacacattttgcgaggcgcccatcgtggaaggccagatgcgcgcataggtgatggccgcatagggcgaggagtaatccatgctggtataagtcgcctctggcagccatgtaccgctgcggttggcgctcaatagccattctttccattcagaaaacgtcatttcgccgcactgcagaaaatcggggtagaaagagtaatacgtttcagaatagaagctgcggttgcgcgaaagaatcagcgaatttccgcagagaatgcccacatcgcccaccagatcgtcagaggtgaagggcgtagtcagcgcgtccaccaggtttcgcagatcggaagggctttccacatgcgcttggtcttgatagatgagcgggcgaaagcgcgcgtcctgaatggtggaattgtaggtgttgctcaccgcgcggatggaggattccatcgcttggatgccgcgttccaggttccgctggatgcgcgagcgcacgttttctgaaatgatgctataggtatgcaggtgcagcggaatgtacatggcgaatagcaccagcgcgaaaatcagatataaaagaaaaaagcgattccgaacagcgcttttcgaaaagaaccgcatggcaaggcgcccctctctttcccaatttccgtgcaatatacaaggatttactttgctatcatatccgattttcccgatgaaatcaaggcatttttcttttttcatgaaggggttggagcgattttccatctgcgtttcgcgcgaaaatcaaacagtcatggtggattcgtgcaaatttacacttgaaatatggtgtttggatggatatactcaaaattaacctaatatattattttaaagggggatttgaaccatgacgaagaaacgattgcttgccctgctcttgaccttgctcctgtgtgcgagtgcggctcccgtgcttgccgaggaagaagtccccacgattggcatcgccatttccgacgccatcaatgtggaagactttgagaccaacaccatgacgctgatgttggaagaagcctgcggcgtggacctgacctttgatgtgtatccttcaaccgactacaatagtaagatcaacatgatgatttccgcgggcggttcggaattgcccgatgtggtgttcgttgatcccagcgacgcggaactgctctcttggattgaatcgggagtgttgttgcccatcacggaatattgctacgatgaaacgttggcccccaatctgcacgctgcgatggagcgcacaggtgtggatattctgcagcaaatcaccatgtacgatggcgaaatctatggcattcccaaattcaatcagacgtataacagcgaatatggcgaaaaagcctggtacaacatggaatggctggaacagttgggcatgtccgcgcccacgactgctgatgagctgtatgagctattggtgaaagtgaaggaaacggacctaaacggcaatggcgttcacgatgaaattggtatggtcggcacctttggcaatggctatgaaggctggttcaattattgcatgacgccctttgtctatacgggcggcaacaattatctcacggtaaaagatggcgtggtcggcttggcttacaccaccgaagaatggaaggaaggcattaaattcatccgcaagctgtttgaagaaggcctgattccgcaggaaatcctcacgcaggacggcaaccagtatctggccatgctgaattctgccgagccaacgacgatgatgttcttctacacatcgccttctcgcgtgaacgcggcgaacacctggcgcgatgcgtatgaagctgtgaccccgctcaatggcccggatggcaagcccatttccaaatacgcgccttctgtgcccaataatggctccttcttcatcacgcgcaactgtgaaaatcccgaagccgcgttccgggtgggcgatatgatggttagcgagtacttctccatcgtgacgcgctggggcgaagaaggcgtggactgggactatgtagagaacgtggaaggcgccgatgagtgggttgcctgggtggatggcttcgacctgttgatcacggtgtatgacgacgcgacgttctggtcttctggcgaaatccagaatcgttcttggatgcagaaaggcccctatattcgcgaatatggcattgccaatggccgcgcgaaggatccggaaacggtctcgattttcgatacgcacacctcggaagcggacaacctctatcagattgaggcgtaccgtccggatgaagtgatcccgaagctgatctacaacgcggacgaaatcgacgtggtggcggatgtgcaaaccactttgaacgactttgtccgcgagtggacggcgaacttcatggcgggcaacatggacatcgatgagaactgggacgccttccaggaagagctaaagaacattggcgtcgacgaatatctggagatcgtgcagaccgtgtacgaccgcatgtacaagtaaaagaccgcatccctgggggaagactttggactggggcggatacttgtccgccccgcctacccttttgaatggatttttgcacggaaaggatggacgatgccatgcacaacaccctgcgctgcatgaagcgggactggcaactctatctatttttgctcgttcccgtcgcatacatcttgatttttgcctactatcccatgctgggcattcagattgcctttaaggattattctgtggccggaggcatctggggcagcgaatgggtggggctggaacatttcatcaaatttgtggactcctaccagtttgagcgggtgatcgtgaacacgctgcgcctttcgatttatagcgttttgtgtggattcccgttccccattctttttgcgttgctgatcaataccatcgaaggcgcgcgctataaaaaggtggcgcagaccatcgtcaatttgccgcactttatttccgttgtggtgctcgtgagcatggtcaaccaggttttcagttcgcgcacgggcctgtacggcatcattggccggacgtttatgggcgattatccgcccgatctgttcgcttcggccgcgaatttccagcacttttatctctggtccggcgtatggcaaaatttcggctggaattccattatctacgtcgcggcgctcaccaatgtgagccccgaactgcatgaggccgcgcaaatcgatggcgcttcccgcttgcagcgcgtgattcacatcgatttcccggcgatcctgcccacggtgacgatcatgctgattttgcgcatggggcagatcatgagcattggctttgaaaaaatcttcctcatgcaaaatagcctcaacctgagcatgagtgaagtgatttctacttatgtgtacaaggttggcctgaccgggagaacggatttttcctattccacggccatcaatttgtttaactccatcatcaacatggtgctgattgtaacggtgaactggatctccggcaaagtcagcgagaccagcctgtggtaaggaggtgcgatgatgaaaagcgcatcggcacattattttcgcgaaaaccgcgtgcaccgcacccgtggggacgtgatcttttccggcgtggcatacaccatcacggcgcttctcacaattgtcgtgttgttgcccatgatttatgtggtatccgcctcgttctccacaggcgcggcggtaacggcgggccaggtgtggttgtggccggtggatttcactttgtacaattatcaagccgtgctgcggtataagaccgtgtggattggttatcgcaataccattctctatacggtggtgggcacggccatcaacatcgccgtcaccatggcgtgcgcctatccgctggcgcgcagaaatctggtgggacggaacttcttcaccaagctgttcaccttcaccatgattttctccggcggcatgattccgggctatttgctcatgcgcgatttgcatttgatgaataccgtatgggtcatgctcattcccggggccatgagcgcttacaacatgatcgtggcgcgaacgttcatccagtccaccatatcggaggaattgctggaagcttcgaaaatcgatgggtgcagcgacacgcagtttttcttccgcattctgctgccgctttccaaggcgattctcgccgtgctgggcatctactacgcggtggggcattggaacagctatttcaacgcgtttttgtatttgaatgaccgggaactgtatccgctgcagatcttcctgcgccagattttgatccagaacaacatggatacggatctgatggacgaggatatgctggcgcagattcagaacctgcaggaagtgctgaaatactccatcatcgtgatatcgactgcgcccttgatgttcttctatccgtttgtgcagaagtattttgtgaagggcgttatgatcgggtcggtgaagggatagcggccattcgcgcaaggaggaaagaacgatgcaactggaaaatctcaaacgcgcgcgcgagcaaagcgcgcagattgcattgcccatcagcgatcaggaattgattgagcgctatgaagctgtgtttaccgccgcggtgaacgatgtgctgcgggaaatgggctatctatatcagacgctgcccagcgccatccagggacttaccatggacatgcgcgtggcgggcatcgccttcaccatcaagggcagcaaaaacttgcgcattgaggatgaaatgcccgagcgcgccaaaatgctggacgccatcgcgccctatagcgtgtgcgtgtgggacacttcgggcgacgatgagtccgcccagtggggcgaaatcatgaccatggccagcatgagccgagggtgccggggcgcgattgtggatggcggcgtgcgcgatgtggatcgcatcctcaagctgggcttccccgtattcgcgcgctaccgctcgtccaatggcatgctgggtcgtttccgcatgatcggctatcagatgcccatccagatcggcggcgtgaacatcgcgcccggtgatgtgatcttggcggatatcgacggcgcaattgtggtgcctcgcgctttggccatggaagtgctggaaaaagcggaagccattcgggataacgaagtggaaatcaaaaaaatggtgctttctggcttaaaagccacggaaatcgtggagcggggcggatatttttagagtcattcagggaatgcgcacccaattttgccgtgtgcgttggaaggcattttcgcaaattgttttttgcgcgccgcgcgttgcggcccaaccaatactgaggagggaaaaccatgtatcctttgcaaaaccgcgtaattgtgatcactggcgcgtccggcggcatgggccgcgtactatgccgccgcctcgcgcaggagggagcgctgctggccctcaccagcaacgatgcgccggccatggaggcgctgctcaaagatctgccgcaaaatacgctcgctcgcgtgttcgatatcgcggatgagcgccaagtggccgctttctttgcggaaatccgcgaaacctttggcggcgcagacgcgcttttgaacctggcgggcctgtccattcccgcgcaaatcgcggaaatggccgtggaggattatgacctcaccatggatgtcaatctcaagggcgctttcctggctagcaagcactttgccggcgtcgcgcgggaaaatgcgcagatcatcagcattggttccatggcggcgctgcgcgccaatggcaatgcgcccctatattgcacggccaaggcagcggtgaatatgttctccagcgggctgcaaattcagttcgcgcccaagggcatccgggtgactacgctcaatcctggcggcgcggatacgcctttctggggcaaccgtccggtcaaccgcgcgaagttgttgcgcccggaggacatttgcgaagtgatgcattttgtgctcacatgcgatccgcacattgccttccatgaactgaattttgaatcctttgctatgatgaagggttgagaaaaaggcgcaatccacgcaccgcctgggccggattgcgcctttttggcaaaaattgcggacggcgcgctgcgcgaataaggaggaaagagcgatgtttcactggtttggtgcggaacattgcgccacgctgtttgtggatgcgggcgaacatagctgtgtgcgccaggcagcggtcgatttggcgcacgatgtattggcagtttctggcaaagtggcgccaatgcggccctatttgcccttggagggaagcggcactgtggtagtcggttcgctggagaatccggcgtttcggcagtgggttcagccttatgtagacggcaaaaccctggagaaagaatgggaagggttccggattgtggcgagcgaacgttttttgatcgtcgcaggttccgaccgccgcggcgcgatgtggggcgtttatgcgctttcccggcatgcgctcggcgtggatccctgctatcggtttacgggtagccatccggcaaagcgggaatccctttctctggaagagggcattaccgctggcgggccccggacttttcgttttcgtggctggttcttgaacgatgaagatctgctctcggattggcgcgatgggggtggcgcgcgccacattgattatcccttttacgcgcaggtgacgcatcccgacgtgctggctatggtgctggagaccgccgtgcggctggggatcaacttgatcattcccgcttcgtttgtggatatccgcaatccgccggaagaaaatttgattcgcatggcggtcgagcgtggtttgtatgtgtcccagcaccatgtggaaccgttgggtgtgagccactttggctttgaaaactactggcgcgcccggggcagggaggaagccttttcctttgtgaccaaccgggaaaaagtcgtcgaatgttggcgcgcttccgtgcgcaaatgggccaagtacgagggcgtgatctggcaattgggcctgcgtggcaggggtgaccggcccgcctggtacaacgataaggcgattgacgattccgaccaggcgcacggagccatcatcagcgaggcgttgcaaacgcaatacgatttgattcgcgaagaactgggccgagacgattttttctccaccgccacgctttggatggaagggacggaactgtgcttcaagggattgttgcgattcccggaaacgaccaccgtggtttttgcggacgcgggcgaaacccagctgtttggcagggacttttttgaattgccgcgcgagccgaagcgccgctatgggctgtactaccacgtggctttctggggagcggggccgcaccttttgcaaggtacagacctgcgcaaaatgcaataccagtatcgactggctcttgaaaagggtgacacagaatatacgattctcaacgtttcaaatgtgcgcgagttcattatgagcgcgcgcgcttacgcggaattggcctgggatgcggatgcgttcgacgaaacggcctatctggacgggtatttccgggagatgtttggcctggagaatggggcggagcgcatgcatgcgcatttcgacgcgtttgctgccaaaccggtggcggagggcgacgattaccagcgcttctggaaggcgcaggccattttgccacaaacggatttccaacaaaatgtgatcttggatggcgttgcccggggaatgggcctgcaagcgttgcgcgcgatgcaacaggacaattccacgtctgaacttccctatggagaagcgcacttgcgcagcttggaaacggggattcgcgcgttcgaagccaattatgtgcggctcaatcgggattttgctcatgtgcgcgaagggggaaaggagtttttccgcgatgcgctgctcgtgcaggaagaaattgtgctgggactgtaccgctgggctcgttcttgcctgctggcctaccgcgcttggaaatctggcgagggagaaacagccttgaaccaactccgtcatgcggaattttgcttgtccaagttgctggaagaccgcaaaaaggcggaacatggcgcgtttatgggctggtacagaggggataccaagatgaatttgcccggcgcgctggaagaaacccggcgcacgatggcccaaatccagggccggtaaaggagaaggcatagaatgattgattacattgagcatacgggtattgcggccaaagaccctgctgcgcttgcgcggtggtataggaatgtgttgggtatgcggctcttgcggcagacggggccaagcacctattttttgggatatgagcgcggcgcatgtctggagatttatgccgcctgttccgatgcgccgcaaacggcggacaactatgtgcgaggggtgacccatctggcgctttatgtgcagaattttgcggccgcctatcaggcgcttttggaaaagggcgtgcagagcgcggcggaaccggtaatccgtcccgatctcaagctcgcgttgctgcgagatcccgagggcaatctgtttcacatcaccaaccgcgacgcggaaatcatttcgcaataaagtaaggagagaagtttgatgaaaacccaaattcgcacgctggatgtcgcctataatgtgttttgccgctttgaacaatgcgcggaagtgaagcactatccggggctggtcgcgctgtacgcgctcgcgcaattggcggtggtttcgcaaaatcccatgattgtgagcaaggcgcaaaagctgctcggccgttatccggatcaaatcgatcatccgcgatacaattttgagtcctatcgcgtgggtggcaacggtcgcgcctatcttgtgatgaacggcctggatgacgctgcgcgcgatttgctgcgcgaatacgccgaaatcaccctacacgcgcccgtggacgcgaatggtatccagtgtatgcccgcgccggaacggttgcctttgcagcaggtttggatcgatgtggtaaccgcgaccacgccgtttatggtcatggccggcattgcgctcgacgagccgaaatacgtggattacggcatagaacagtgctttaagatgtacgacctgtttgaggacccgcaaaaccacttgctgcatcaggcgcgcggctttatggcggatgtgaacgccatttccgaagaccattggagccgtggcaatggctggggcatcattggtctggcggatatcctgcaatacttgccccgcacggacgcacgctgggaggaagccgcgcgcagaatgcgccgccactgcgaagcgctccgccaatatcaaaccgcgcacggcctgtggcggcagtccattgcctgcgaactggcctgggaagaaagctctggcacgggtctgatcgcctactcgatgggcgtggcgttgcgcatgggcgtgttggatggcgcaacgtacttcccggtgtttcaaaaagccgtgcaaggcttggcggattggtgcctgaacgccgatttttccaccgagcgcagttgccgcggttgcctatgtccgggcgtgggcgcggaaaagggtacgctcaaagcctatctgtgcgatgtgtacgcgtatcgcaatgagccgcattcctttggccccatcatgctggcgatgatcgaagcccataagaacggaattcgggaaattgcctggaaggagaagatgtttgcatgacaaggtttgtggaagaacgcgaagtggcgcggctgcgcgcggcaaagccggaaagttttcaggcgcgcctgtatgccgctttgcgcgaacgcactgatcggaacactcgccatccgggctttgtgcagccaggggacacgcaggagtggtggcacctttgctgggagcgcgcgagcgacgcggcttttgtgtggcacatggaaagagacgccgccctgggcgagtggcttcgcggcgtagctttctggttgcgcgatttggaggacgtggagtggattggcccgtggtatcgcgatacgagccgtccgctgcggggccatttggaaacggcgcatgccgcgcttgcaatgtgcgaaattttggatttgtgcgatgggctgtttaccgcggcggaagaagaaagcttgaaggcggcgctgcgggaaaaaggaatggttccctgcctgcgtttttgcgagcgggtgcagcgcgaacacacgcacatcaacaattggtataacgtgttgctgatgggctacggagcttgcgcgctgttgctgggggatggccaggccgtagagaaaacgctcctgctgctgcgggattcttatagcctgtacaattcggatagttacggcgagtccgtgcaatattccaattatgccacgctaaccctttcgcatttgcacgaactgattctccggctgcggcctgacttggcaaaccgcgtcgatctttcctgctatgcgcggctgatggattggtatgcggccagcttcctttataggaagccttgggacgatgagacggtttttccgcgcacgctgaattttgccgatagcgccgccattttccggccgacgggcgatgtgctggtacaggtggccgtgcgcatgaaagagattttgccgcgccaggcggctctggcggcctggctattcgaaacgacctatgcccagccggaacaggggccggatgagttggcgacctttgggttcttcaaccaattccgctaccatgcagtgctgatgcagccggatatggcggcggcgcgctcgcccgcgagggcggggctttgcgaggcgctgtgctttgaaaatggacacgccattttgcgcgattcttgggaggacacccgcgccgtgctcgccgtgcaggcagggtatgcttccatgaacgtcacttctcaccgccaccaggatcacggcagtttccaatttgtgcagggcaaggagcgcatgattgtggacggcggccattgctgctatcggctgaacgcctatcggttttcttgctccaccagccagcacgccgtgatggattttgtcgacgatgcgcccgcgggcggctttggccagccgatgaatccattccgtggcgttcaccagcaaaagctggccgacggcaatttctatgtgcgcaagccgccgcgcacggtgacgttgatgaaccaatatatcgggcgcgcgcatgtgctggcgatcgacaccacggacgcgtacggcgaagaagtgctcctcgcgcggcgcgcattcgtatcagtgctgcccagcgcggtatttgtgatcgatgtggcgcagacggcgcagctgctcaaaatgcgcacgcattttccgctgaacaaccgggacggcgcgctgaaagtgcatcgggcggacgagcaccgctatgtattccggcgcaacggcgaggcaatgaagctctttgagtgcgcggcctatgtggatgggaaggcgttgccttcgcggatgcagttcgactggggatattgccatcgcaactaccatccgttggcgaacacgcagggccaaacaaaggaaggttcggcggagatttacaattgggtggacgcacaggcggggaaaacgcatatgcgggtgtgcgcgatcgcggcggatcgggacgagcggatcaaaggctggcacatcaaggcagaagcgaatggcgactggtatatcgagtcgccggaacgggagaaagtgcttaaactgcgcgtttggagcgatcgtgtgtatctggaacaagatggtcagtggattgaggtgctttgatgatgccgcgcacatcgattttccttgcggcggaagatgtcgcgcggctgcgctcgcagattcacaatccccacatggcccgcatatgggagcgcacccggcgcacagccgatagaatcgccatggagcagagcctcgcctttgcggaggataccatggaactatggtatgttttccgcaaccgttgcatcgatttgggcatagcgttgctcgccacgggcgagaaacgctatgcgcgcgcggcgcatgcggtattgcaggatttagcccagcgcagcgtggatttttggcagggaccgcactatcccaaccgtccgcgcacgcagatggtggacggggtggaaaccttggtgggcgagttggagaccgcgcaacttaccatgggccttgcgctgctatatgatcttgcctatgagcatttggcggaagaggatcgcgcgctggctttgcacttgcttcgacagcgcgcatacccgttgttgcgcgcgtccgtgcgctttcaatcgcaaaagtgggtcatgaaccatttgtgtgtgatcgcttcggcctggctggccgctctgctgctcttgccgaaaggcgagcgcgaggaggccgattttgcccttgccgtgcattcgctcaatttgtggctgggcaacttggaaagcgatggtagctatggggaagggtatcattattgggcgtatccggtaaattgcttgtattttgcgcttcaagcgctgcgcaacgcgctgggcatgcggttggagcgcgaaggccgcctggcgcgcgcgtttgaatgggcgctttaccaccaggcgggcattatccgggaggcaggctatgaaaagcccattgccgcaagcgtcaatttccacgattgtccacgctttttccaaatggaagcgccggaagcgctgttgtttgccaatctcatggggaattcggtggcgcagtggtatatccagcggtttttgttggaagacctaagccgtccggaggagtcgttgcacgtttattggcacagggcggacgctcttttgctcgcgctttatcggccggaagcccgctcgctttcaccgcaacaggcgggatgggcgactgcgcggtgctttatggacacgggataccagttcctccgttctggctggaatatggaaagcgatctggtatttgccatggaaagcggcgggggaacgcgttctcgcgcacacgagcaccacgaccggaacagctttttgctgtacgccaagggcgaattgttcttggcggaccccgggcattcctgttaccgcggcgcattgcacaacgcctatgatacgcgcacgcgcgcgcattccacctgggctgtgccgggggaagaacagagcttggcttacctggaaatgggcatgcgcgcggaagaggcgcagcaatatccctcgtatcacaacgcggcgataccggcccagcaactgcacccggagatttccttggtggattcccaagcgaggcgttgttactcgcctgcatggcgggactacacccgacgggcgtttttggtgtatgggcgctatatccttttgtgggatagcgtggataccggccggccggaaggaaggccggaatgtccgcttacgctgaatgcgcgggacggaaatttgcaattgcggcaggtggcaaatggctaccggcttttgcgccccaggggagatttgtatctgtatgccgcctccagcgatggagcgttgtctttccgcgaagaacccggcatcctgcacgacgcctatcatatccgtcctggaatgaaggtggagggcaagccggggagcgcggtacggctggtgctgtgcgcgggaggcgcgcgctttgaaagcgtgatggttttgtatccgctggaaaaagaggaaacgccgccggaagtttgcgtacagttcgatggggaggcgattcgtgtgaaaatcgcgggagaagcgaacgattcgtttttcctatccggccaggaaacgcgtttttgccgcaaaggcggcgcgcaatacagtttttaacgtcaaaaccgctccggatagggtcccccctccggagcggttattttgttttgaattcaggcgctatgctttgctttcaccatcgataaacagcgcgacttcgtgaatggcgatgtagctggcaccccagtttttttgcggcaaaatccgtatgcgcgaaacgggcatgccgcgcagcgccagggacacgcgccgctgcacattttcctggatggcgtagacgcgctcgccttccggcccttccagccgtacggtgaaatcccgcaatagcgcggggtgcaggtactgattccacaggggatccttttgcgggcgcaggttgttgtacggacgataaagggcgttgtccagatagagcgagagcgtttgcacgcgcacaggcgcgtctgtttctagcgcgatccaggcaccctgcaaaggcgaggcccataggtgcatgccgccgtaaggacgggtaaacccatcggtgagcgcctggcaggggtaccattcagcctggctgtgcaggcggaatgcgggggcaaacagattcaggcccagcgcgttttccgcgaacacgcccagcacgccaggaaggggttcgcgtgcaatgccgatggacaaaccctcgtccgcgccgaggcgcaggcagaaattgccctttgtattggcagggcaacgcagagcgatggactgctcgccgggcgcgagcgaaatcgcgcagacttccagcaagcggttgggtttgtatacgccggcatcgccgctttcgtatagggcgatggaatagggcagggcgcgtgcgcgttcggagcgcagaaaaagcgtgatttgttcgccctgccgcaagggcgggaacaggagaaaagcggtttgcgccagcggaagatagcgcgcaggggcgccggtatccggtgcaagggagggcgaggcggacacgcgcatgcgctgcgcggcgtccaagtcgccatcgagcgagcaaccggggatccaaacgtcatccgccgttaggcgtgcctgaatggccttgatctgttccgggcgcagcgcgccgggaagtgttttctgccgccgcgcaaaggcagcggtcgtgccaatggcttctccttccacggcgcaggttttcattacgcgggcggaggccatggccaggtggttcatgccggcgttgcggcctgccaggaacaagttttcaaagttcttggagatcaggcaggagagcgggatgccgtaaggatcgatggggagttgctggcaggattcgtttttgtcgaaaaaaccggaggaaggatgggtgtcgatgggccagccgccgtggcacaccgcatccatggggtgaggctggcaaaggatgtcttcctctgtaaaagtgcgcagggctagcgcgcgccggcattcgcgccgggcggggatggaacccacccattccaacgtgaggtactgtgcgtcgaactttccgctgtttttgatatagttccacacgccatagaccaggcgtgtgagtgtgctacggatggattcgttttcctggatgatgtgccggtcgccgccatattccagccaccaataatcgcagccgttgtcagcggcgtgcaggctcttgcccgtattttgcagaatgcactcgatttcttccacggaataggcaaaatccggcgctacatagcgcacgggatggtcgcattttttggtgtaaaacaacatggtgctgcccagggaagcgtattcttcggataagttatagcgcgcgcgggcggcgggagacacgtcgagattgccgcataccgtttcgcctccggcaatgcgcgtgagaaccgcgtcgcccgtgcaatcggcaaacagggacgcggataggatatagcgcgtttccgagcaaaattgctcgcactccacgcgatatatgcggccgttttctgcgtatgcacgcgtcatgcggcattcgagcagcaaggtgatgttcttttccgcccacattttatccagcagcagcgcgtcccacaggtgcgggttcccctctggattgcgatacaggttttcttgcgtcaattcgctcacaatgcccgtttcatccgcatagcggttgaaacccatgccggttgcgccgcaaatccacacgcggcactcgctgctggaattgccgccgagcacgctgcggtcatggcaaagggccacccgaaggcccttgcgcgccgcggcgagagccgcgcatatgccggtgagcccaccgccaatcaccacaaaatccatggtatacgatactatatgctccttcatgcttgataaatcctcttcttcccttcgtgtaacccatagatacttttagtatagcagagcggcgcaaaaatgcgccccaatattctgcaacaaatctggaaaaaaatgcacgcgtagcaatttttcttgcgcgcagtgagggtttttgctatactacaaagtgggaggatataaacatggatggcaagtacgatggcttgattcggtttattcgcttcacggagaaggatttgaacgtgaaaatctgcatcaaggattatgtggatttcatcttcgtagatcgcgagctgaacatggggctgcgcgacaacctcgtgcatggaaaccccttttgcatgtatatgaaatccgatggggacgtgtatctcaaatgcaccagcatggggcagggtgtgatgcggcggctggagcgcgacccgcgcgcgtattgtggcgtttgccatgcgggggtgaaggaatacgtgtgccccatttggagcgacggccgcttgattggctcggtgaacgcgggtgtgttcgccgcagaaaagcggtatgtgcgccggtatctcgagcgcgtttgccgcaagagccatttggaagtggagcgtgcgctagaattgtataaaacttgcatcagcgcgtcccaggtggatgaggagcggttgttcgtcaatctggaaatgattgcaaatgctttttcactgatttttgcccgtgtgaatgtgcatggggagtatgtggccatgcgtccctccacggtgatcatgcacaacagcatcatttccgatgcgttggaatatttaaaacagaactatttagaggatttgcacgcttcggacgtggcggcatactgccattgttccatttcttgcttgagccacctattcaaaagccgcgtaggcaccagtctgcctctttatatcgccaagttgcgcgtggattttgcgcgcgaggagctcacgaattcccgcgcaccggtttccgtggtggcggaacgggcggggttttccgatcccaattatttttctcgcattttcacccaatacgtaggcctcacgcccagccaatatcgcaaacgattttcccaaaaatcgcttcaaagctaatattggtggaatttgttttttgatgcagtatttttgcaaaatattctagattcagggcacgataatcctacaggttcgccgcgcccttgtggtatcattttgattacagaaaacaccggttgccaggagggatgagcatgacgtatgctgcagtggataggaaaaagagccgctggaaagagacgtgggtctatatccgcgaacatccatggctgtatttgatgctgattcccagctttgtgtatttggcgattttttgctatgggcccatgtacggcattgtgattgctttccaggatttcaatctggtgcggggcatttctggcagcaattggattggcgtgcaaaattttgtagatttgttttcgtcccgccagtttacgcgcgtattccgcaattcggtggtgttttcgcttttgcgcatcgcctggggctttccggcgccgattttgctggcgctgctgctcaatgaagtgcgctctttgaaattcaaaaaggcggtacagaccatcatctatatcccgcattttgtgtcttgggtggtggtggctggcatggtgaaaaacattttgggcccggatgaaaccagcatgttcaacaaactgatgagctattttggcctggggccgttcaatccgctcatcgacccgtcagcattccgctccgttgtggtggccacggaggtttggaaggaagcgggctggggcacgatcatttacctttccgcgctcacgcgcatcgaccaggaaatctacgaggcggcacgcatcgatggggcaaaccgctggcagtgcatgtggtatatcacgttgccgggcatttcgagcaccatcgcggtgatgctgatcttgcggttgggcagcatcctgaacaatgggttcgagcagattttcctcctatatagtacgtatgtgtattctgtggcggatgtgttcgaaacgtacacctaccggatcggcctgatggatgcgcgctatagctattccaccgctgtgggcttgttccagtccgttgtgggttgtgtgatggtgtttggcaccaacgccatcagccgccgcatcagcgaatcgagcctgttttaaggaggggagagggaaatgcgcaaacggttcagcattggcgaggcgttgctctacgcgcttctcacgctcctcgctctggtcaccctgtatcctttgatcaacctggtggcggtgtcgctcagtccgcgcgcggagtatctgcgcaatccgatgatgattttccccacgcagatcgatgtttctgcctaccgcatggtgatcaataaccggctgatgtggtcttcctatcggaacaccatcatcattacgctggtaggcgtaacgatttccatgttcctcacggccacaatggcctatccgctttcggagcccggcctcaagggcaggcgctggatttcggcgatttatctgttcacgatgttcttcagcggcggcatgatccccaactattatctggtgcgctctctgggtatgctcgattctctgtgggcgctgatgattccaggcgcgctgagcatttataacgcgctattgctcaaaaattcgtttgagggcctgcccgtttctttgaaagaatccgcgcgcatcgatggcgcaagcgatcttacggtgtttatcaaaattgtgcttccgttgtcgctgccgattttggccacacttacgctattttacgcggtgggcaaatggaactcgtatttcaatgcgattctctacatttccagccgcgataagtggacgctgcaacttttgctgcgcgagatcatcaccaacaccacttctctgatggacgatggaacagtcgccgaaacactgccagcagcctctattcgctatgctacgatcgtatgtgctacggttccaattctctgtatatatcccttcctacaaaagtactttgttaagggccttatggttggtgcggtaaaaggatagcgttgatattgatgaatcctctgggattcattggtaaataaaaggaggacgcgttatgaaaaagactctttgtttcctgttgatggttgcgctggcgctcacgggcgcaagcgcactggcggaagaggaacggacgaccattgagattttcatgcaaatccaaacggaatttgatccggatacttctccgatcgttcctgcgctggaggaagcgtgcggtgtgaatttagaattcatcttgccgcccattaatagctatgaagagcaactcaacttgatggtcgcctccggcgattatccggatcttgtgcagtttatgagcactggggctgcaaatttccaggatagcgcggaaaatgggatcctgctgccgctggatgattacatcgagaattatcccaacctgcaagcatacatcgaccccgcttcttggacggcgatgcgctccgcggtttcggatggcaagctctatggcgtgccgcgcaacagcgtgatgcgcaccgacggctggttcgtgcgcgacgactggctggagaacgtgggcattgagctggaagattgctccacggtttccaagcaggaattttatgatatgctctatgctttcacctacaacgatcccgacggcaatggtgtggacgatacttacggcttggcgacgggctccgtgaacctgcttttcccgggcgcgttcgacgtgctgggctggcaggaggcgccggagggcagcgaatacgcttatatgagcgcgcagtatgacaggaattcctccgcttatgtggacgctttggcctacaccgccaagctctggatggacggcctgatcgatcccaacgacatcacgaacgagggcaatgcctatcgcgaccgcttctatgagggcacggtcggcgtggtgcgcacgtttggcggctggctcaacacgtatgaaccggcgctgcaggagaacttcccggacgcgaaggtgaagtacatcgtcggcatcgaaaacgacgagggcgagtgcgtgggcacttccaccctgggcggcaatatttacggctttgtttcgctgatgtcccctgcggcgggcaaggaagatgccattttgggcctcttggattatatgctcagcgatgaaggctggtcgcttgtttgcgatggcgtcgaaggctggacgtacaccgtggaaaatggcgaaaaggtgcccacggaagcgtttacggacttctccgtgtatcgcaacgacctttcgctggtgcgccgctacaacgaccctggctacttcgtgctgctgaacaacgcagattacgatcgttcctggcagtacattcaagcagcgtgcgatatcaccgtttccacgctggatatgggatatgtgccccaggctgcgcagtcgaacgactatatggattacgccacggagttctctgtcgcgctcaacgatatcctcattggcaatcagccggcggatacctggtataccgtgctaaacgactggtatgagttcggcggcgaggcctatgtgcaggagatgaacgattatatcgcttccctgaacgagggcgcgcaggaataaatgggcgctatggttttgtagcagtaccattgagcattcgaacattctggcccggagccgtcgcattgtgcggcggctccgggcgcatcgggaggaaactatggaatactatggcgtggtgcatccggattgcgggggatttttgcgcctgcgttccacggcaaaaacgaattatgcgcgctattatgcgtttccggcaattttgcgcgtggacggcaaggttttgatcgcctataaaaatggcgtttcgcatggctgggagaaggaaggggcggcggtgtcgctcgaacaggcagtgctggatgtcgcttcgcagcgcgtggagcgcgtggatgtgctgtacgccgcggaagagcgcatcgcgcaaatgggcgaatacgtgcgcatgcccaatggggatattggcttgtacatcgatatgcaggatcgaagcgccacttcccgccgcacgggcatggaagcgctccgctctcgcgatggtgggcgcacgtactgcttagagggccctgtggggctggtggatggcgtggaatatggctatccgctcaatttttgcgaaaagaatggccgcgtatacatggcgacgatgacgtttccctaccttgcgggcagcaaaggacgtaggcaggtacacgtgatttccagcgcggatagcggcgcttcctggcggtttgaagcgaaccttacggaaagcttggggctggaattcaacgagtgcgccttgattgccacgcgggaaggatttgccttgttcacgcgcggcgaagcgccgcgccatgtggaaaacgcgggtgcggatagcgaagccccggcttgcctggcaatgctggacggccatttccgcgcgctgcgtctgcgggattatcgcaaaacgcgcgccgatttttcccaggtgggccgcccgcgtttgtacgagcgcgagggacggctgctgctgatcacgcgccagcacatcgccacggcggagggcgtgcgcatggcgctggatttgttcgtgatagactctgcctccctggaaattcgggcgcgattccggctgtgcgacccggtggcggaaaagcaggatgggcactacgcgaacttgtattttgatgaaacgggttctagaaccatgctgcgcgtggtcgattaccgcacctgtccaacgccggccaatcccaccattttgcgtaagccggatatcgtgcagtggagcttcgattggcaagcgcttaccaggcaatttaaggaggagacgggacatgatttctgaaaaactgcggggcgtgctcactgcctccatcacgccggtggcggaaaacggcgcgctggactgtgaggcggtggctaggctggtgaaatactaccggcagagcggcctacgcggcgcgctatttccttcttctacgggagaatccttcgcactcacggcggaagaacgcgtcgcgctcgtgcgggtggcggctcacgccgcttctgatgatttttccatcctgggaaactgctccgagcacaattggaaagatgcgctgcgcaacgcgcgcgccatggcggatgcgggcgcggacgtcgccgtgtgtatgccgccacaattcctggcctattctcaggaagaactgcgcgcctatttttataccattgcagatcaaagccctataccgctcctggtgtacaatcatatgacgcgcctgcccaataaggtcggcctggaattgctgggagaattggcaaagcacgaaaacatcgttggcatcaaggatacccacaacgatcccaaccgcatgctgcaaatctatgcccagggagtgcagaaggattttgctatcctttgtgggggcgacggtgtggcggcttacgcggcgctgttggatatggaaatgctcaatgcgctcagcgccgtaaagccgcggttgttcctcaatttgtatgccgccgggcgcgcgggcgatttggcgttggctgcgcgctatcagcgggaagtggataagttgatgggcctgttttcggcgctgcgcggcgggctggctagctccacgttgttcgcgcaggcgatcaaagccgcgctttcgctgcaaggactctgtggcacggccagcgtgcagatgggctatccgctggaagcggatggattggctcgggtgcgcgaaattttggtttccgtgcaggaggaactcgcatgatcgagcgcgtgctgaaaggtaagtacattgccctgcccgcggatgagccgggcgcggcgtatccctgggtgctcgcttgccacggcagcgggcgctgcgcgctctcctatcgcgatgtgccgttttatgccaaacagcgcgatatcgcgttggcagcgggctacgcgtttgccgcctgtgacctagaattggatacgtatggcacgcccgcgggcctaaaaaagctggatgcgttctatggctgggtagtcgcgaatctgcccgtgcgtcctcgcgcggccctgtggggctcttccgcaggtggcagcggcatgttccgctttgcaggcgcgtatcctgcgcgcgttcatttgctgctgggcacattccccgtgtgggatctgctcagcgttacgcacctagcgagcatgcgcgccgcctggggcggtctggcaggggaaatgctggaaaaggccgtggcgccgtataacccggcggcgcatttggaatggacgctgcaagtgccaatcgcgattgcgcatggacgcaacgaccgtgcggtgcccttggaaaaaaacgccctggcgctggcgcaccaggtgggagagcgggcacatttgttcctcacggacgacgaacactccacgcaggcatttggcctgtacgaaacgccgcttttccgccagcttttggaaaaggggaaatagcggcgcgacaggggaagattccttggcataatctagtgtggcggcgagatttactcgccgccacgctattatgagagttctgcggtggaatatccatatttttcaatttcagcctgcaaatcccaaaagcgttttgcaccatcctggccgccaaagcgctttttccagccgcgcgcctggaagcaaacgatggtgggcggcacggtgaagaaggcaaattcgagcgtggcggcgttgcgcagggctacgcaatttccgcccttttgaatgggcgcgttggcagcgcacgcctggaaatccacgaaacattcttctttgccctgcttgagcgtgatgccgctggcgcaaaccgcgcaaacctcgcattcccgcatgacgattccttctttcacatggcgttattccgcttcgttttccggctttttgaagagatacttatctaccttctcgcggatttccttgctgattatgcgctcgatggg

SEQ ID NO: 3082 - DNA, 32759 bp, Unknown
  16S sequences of unknown bacteria
tacaacctttaaaaggctgtggcaggggtagtaagactcgaactcacgacacgcggttttggagaccgctgctctaccatctgagctatgcccctgtgtgttacttgattattatataataaagcatgtattttgtcaacaacaaatttaccgtattttctataaatttgccatttcatttttactgattgtatatttaaagataaatattacaaaatctatctgtttttacctgcggacacgctatttttaaacaaccgcctataatttttttcaaaagatgaggaaatcaaaataaatcccaccgtcatatataaaaccgcaaaagccacatcgcttaaaaagtgtctgcccattacaagccttgaaaaacccacggcaaaaacaaatccatagcacaaaataaacaacagccctttcagttttttaaatttaggatacataaccggcaaaataagcagaaccaaaattcccatagccgccgcagtatgtcccgacggaaagcttgtgccagacgaaaagaatacaggtttataccaaggtgcaaaggcgtaatcgccgcctgtgattatatccgcatatctgtcacggccgcaaataaccttaattgccccggtgcttacatagcagatcagatacataaatgaaaaataacaaagagattgcaccctgcgcatatctctcttgcacattcttctgacccaaagaaaaataatcgaacccattatcccaccgaaaattccgcagagataggggtttgcacggataattacagccctttccgccatattggacatagcatagtaagaaaaaaggctgtaaaatgaaatcattgcaagcagaccagcaccgaaaaccgctacgctgtttttactgcgcaccgccacacaggctccaagcacagggataaacataattataggcaacttagccacgctttcaagccggatgcaaacagggttttgggggttgtataaagtgtcggttacggcgtaatcatactttgcccctacccccataagaacaagggaaagcattataacaaaaataaaacctgccttgtaatttttatatatcataagtaactccaaaataaataataagtatatcttacctgttatcacattttaagtcaaggcaataaattaaaaacgccggaacatgcctgcaatcatgtttcggcgcctttatggctaaattatattaagaggatttaaaaaatataaggaggttaaaaatgcaggttaaataacaaatgaaatttgatttaccgcacttaccgacaaaatcataataacagccgttgccagtatgcccagtctgcttgtaattctgtttttcatggtaaatctcctttcggttagcttttgctaactgtatgttttaattgtgcggttagtctttgctaaccgcacttataatatactatacttttttctgtttgtcaacagtttttttcgctgtccgccgtttttttacgggttttccggcagtttttaaatttgttgccgaaggagcatacatttgcactgcccgattgattttatcccgtgttgccgcaggcgtggggtaccagcctctggcggacatggcctcaaaaattttaaactgaatatcgtgttcatcgtttaaaattttaacaagtttgtttttggcggttttgccggcccgctcgtttgcaaaggtgttgtaatttccgctgataaatttttcggtggaaagcatatcttccattatggttttgtcatcgtaagccatgattttctcccttaatttatttgattgaacacagcattaaagtgttcctggtgtctttgtgccgcctctttgcacaactttttaagctccgggtcttttacattttgggcgtagaaattaaatttatccacagccgctttttcctggcccagcaaatcgctgtaagcggaaagctctttttctgtaatatttttcataacttatcctttctgtatataatctaactataatatggcttcttctatgaaaaatatacacaaaaaatgcgttccgttaaaaccggaacgcaaaaatattattttttcttgtcaaatttatactctgtgccgttaagcaacctttttatattagagcgatgagcgtaaataattatacccggtataactattgcgcttataagtgccggcacagaaaatgtgtgagtgaatttgaaatagagcagagtgccaattaaaaaaccaacagatgccgttattgaagccagggacactattctgcttaccgccgccacggcgaaaaatataaccatggcgaaaagtgttggaataggagaagcccgcagcattgcaccggtgcccgttgcaactcctttaccgcctttaaatttaaagtaaatcgggtaaaggtgtccaagcaaagcaccaagcaccgcaatataacaggcaatttcccctattgtggcaccgtcgggcataccctcaatatattccaaagtgcttattgcaaacatatgtcttgcaaacagcacgctgacagtaccctttaaaaagtcgcctataacggtcattgcagctgcttttttcccataggtgcgcagcatattcgttgtgcctgcattgccggagccgcattggcgcacatccttgtgataaaccagattgcttattatgatgccaaagtcaacagaccccagcaaatagctcacaataaaaacaataagaaattttgaaatcaaaattattctcctctttctctgatgagtatcctgataggcgttccctgcaaaccgaaaacctcacgaatttggttttcgatatatctctggtaagagaagtggaacaaatcacgactgttgcagaatgccacaaatgtaggcggacgggtggaaatctgagtcatataataaattttcaaacgcttgcccttgtcactcggcggctgaacccttgcaacggcatttgccaaaatgtcgttgagaacacctgttgttgttctgaaagcgctcatttcgtcaactgattttatcatctcatagagcttgttaattctctgccctgttttggctgaaataaagatgatcggcgcataggacataaagctgaaatcgttttcaagctcggctttcataacctgcatggtcttgtcgtctttttcaactgcgtcccacttgtttacgcagataatgcaagccttgccctgttcatgggcatagccggcaattttgctgtcctgctctgtaaaacccactgtgccgtcaatcataataacgcaaaccttgcttctttcaatagccgccaatgcacggataacggaatatctctccactccatcgtcaacattgccctttttgcgcatgcctgcggtatctgtaaatacaaacttgccgtactcgttttccacataggaatcaacagcgtcacgggttgtgccgctttcgtcacggacaatcattctgtcctgtccgaggattttatttacaaggctggatttacctacattcggtctgcctacaacggcaacttgaatgtattcgtcattttcttcttcctgttcatcccaatttatgtgcttaaatgcctcgtcaagtacatcgcctgtaccgtgaccgtgaacggaagaaacagggaaaggatcccccaaacccaatgaataaaattcatatatatcgtccggcacaccgcctaccgtgtcgcacttgtttacaacaagcacaacaggcttgccgcttttaagaagcatggtggcaacatcgtaatcgttagccgttacccctgtccttatatcggttacaaaaagtataacgcttgcggtttcaatggctatttgcgcctgttcctttatgtgctttaaaatgctgttgtcgttggctatttcaataccgcctgtgtcaacaagcaaaaactttttatcaagccattcgccctcggcataaattctatctcttgtaacgccgggagtatcttcaacaatgcttattctctcgcctgccaatttgttaaaaagtgtacttttacctacattaggtctgcccactatcgcaataatcggttttgccatatttatcctcctatcaatattcggtgcccagtaactcctgagccattttaaccccatcattgggatagaaactcaattttacccccagtgctttttcaacatcttccggggttttgtcgtcaaggaaaaattcattttcgctgtccaacatatcggcgcacaaaagcaaagtgtcgcttgtaagtttgccctgtacctgccgtattaaatcttgggcggtgataaggcccgtaacccaaacattgccgccaaagaaattatttactattttgtgtacttttatatcaagagcgccctttaatttttcatttgctttttggaaaacttggcacataatcgggtacatggcctcgcctaccgccatatctgcctttacctgcttatacggttcttcggcgtactccacttcttccaaaaagttgtccataaagtttctcaccaagcccacgccgttttcaagctgcgcatagtcgcagtaatactctgccgggggaaggggcacttgggctctcatataaaattcatctgagaggtacacaagcctttctccgttgtgctcttttacaaagtcctctgtccaccgatttacctgttcgataatccgtcggcactcttcttttgtatagctttcgactttttcaaggccgtcacggtatcttgtcatgccgaagggcactattgaaacgctgtgtacctgtgggtacagccgttccattcttcttacggtctttttaagatgttcgccgtcgttgatgtttttgcacagaacaacctgtgtattcatagttatgccggcttcgtaaaattcgtccataaggttgtttatttccgccgctctcgggtttttcatcataaaaacacgcaattccggctcaacggcgtgaacggaaatatttataggcgaaattttcatcttttttattctgtcaatctcatgccttgaaaggtttgtaagagttatataattgccaaaaagaaaagacaacctttcgtcatcgtctttaaagtaaagacttggacgcatacccttcggcaactggtcgataaaacagaatatacacttatttttgcaggaatggtgcttatctataagatatgtttcaaattcaagacccaaagaatcatattcgtcagatttttccatatttatctcaaattcttttccgtcacgctttaaaacaattttaaggtttaaatcgctggaaaaaaactgcaagtccatcatatcgttgattacttctccgttgatggaaataaggtcgtcgccgggcaaaatgccatactccgcagacaagctgccccggtcaatgcccgtaatgtgtactgccatgctgtccctccgtaaaatttgattgtatataacggtttattataacatataaaatgtcatatttctatgataataacgcctgtttttacgccgcatataaatatttataaagatttgtagccctaaaagaccgattttacgctgattttatccctcatacagctttatatctgcccaaaatggtcttgcacaattttaaatacttatatgttcaagataaattataaccgcttacaggtaggcttgcaccgtttttcacagattatgtaacggggtaagagcgtaagatactgtgctgttttcgatattattgccctgtaccccaccaaaccaaaagcggtcttgcacaattttaaatgccgatacagcaggcgaaaagtgcaagatgtgaagcaaaaagcgcaggtaatacttggtgtattaccgagcatttttgcaaagcagattgtgctttgcagttgatgtagcggcgtttataaattgtaaaagaccgcttaaacaaaaataaagggtaggatgacctacccttgactgctttttgtgtgaaagaattaagcttccttcttgatgatagccttgcccttgtagtagccgcaagccttacatactctgtgtggaagtgtcaattcgccgcactgtgggcattttacgaatgatggagcttcgagcttccaaacatttgaacgtctcttattttttcttgcttttgaaagttttctctttggtactgccatttttaagcacctcctctaattattcatcattatccaataattgttttaagatagataaccttgggtcaactctttttgggagctgacagccgcaattttcctccaatggacggccgcacacggggcacagcccccggcaatcctctttgcagagtaacaccgacggtatttccaatgaaagttcctgcaaaacaagttgttcaacatccagatttctgttactgtccacgggaatttcgttctccgtttctgtgaggttttcgggagaaactataaaatttcgtgtgaaatcaaattgtctttcaaacagtttaagacatctggcgcaggtacatacagctgttgcctgtacagtaagctcaataaatgtttcgttaatgccttttttaaaatccagccttgcggcaacgggtttttcaaaggttgcatcataactgacattttcggcagagaaatcaaactctgcactaagctgtttttcagtctcatcacgagtgaatatattgctgagattaactaacataaagcacctcataggtcacttaaatattatatatatcccttgggcttttgtcaaggacaaaatccgcttaatttgcaataatttttgcaaatttaccgggacatatacggtattttgaattttgtagggtcacaaagacaggcggcctgtgaccgcctgcctttgcaacaaaccaatattaaagaagaatatcctattatatgtattttttgattgaagccggaagactttcctcatctgctgaaatagttacaaccactttcttgtcaccgcttacgccgtcgataagttcaagcaacttgccgatttcgtcaaggtcttttgcgcctattctcatcaaaccgtcaatataaacctgttcgatgtcatagttgcctgccaaaacaccggcaaagaaaccgtaaaatctatcataagagtcaatcttgtattcgtcaatatcaataagtcttatattggagttcacattaaatgttgattccatgccttcttcgatacatacgatgttgccgttaacctttgcaacactgtcgttcatcatatcgatcaactgttttgtttttcctgtgccctttttaccaactatcaatttaatcataattgtatctccttttatttacaacgccgctaagcgtttaatcacttattttggcaagcagttcttcacgcctgtcctcatatcccggtttgcccaaaagagcaaacatattctttttatatgcctctacacccggctgattaaaggggtttaccccaagtatatatccggatattgcacaggccttttcaaagaagtaaatggcatagcccaaattttcttcgtccttgccgtcaagttccaaaactatgttcggaactccgccctcggtgtgagccaaaattgtgcctttcatggcgttttggttcactacggacatattttgatttgcaaggaagttaagtccgtctgcgttatcctcgtctgcctggataaagaaatcctctctcggtttctttatgtcgacaacggtttcaaacattgttctcgccccgtcctgcacaaactgacccatggagtgaaggtctgtggagaatataacgctggccgggaacaagccctttttgtccttgccctcgctctcgccgtaaagctgcttaaaccactcgttcattttagtccaatccgggtcatagcaagccataagctctattgatttgcccttgcggagaagaatatttctggctgccgcatatttgtaacaatcgttttcctttgacggttcggcaaaatccttgcaggccttttgcgccccaagcataattttgtctatgtcaaaacctgccgccgccaccggcaacattcccaccgctgtgagaacggaatatcttccgcctatgtcgtctgcgattacaaagctctcatagccctcacggtcagcaagggtttttaaggttcctctggccttatccgtagttgcgtagatgcgctttgccgcctctgccttgccgtatctgtcctccataagttttttgaaaaccctgaaagccaaagccggctcggtagttgtgccggactttgaaataacgtttaccgacaatcttttgccccggcacaacttaacaacattgttaagccgatccgggcttatgccgttgccgataaaatatattttcaagtcatttaaatcattgtaattttccgaacctaaaaactctattgccgcacgggcacccaggtaagagccgcctatgcctattacaacaagcacgtcgctgtcgcttctgatttttgccgccgcttttttgattctttcaaattcctctttgtcgtaatcaaagggaagattgagccaacctaaaaagtcattgccccggcctattttttcgcttaaaaccttgtgtgccgcctctacctgaggatatatattttcaatttcttcccgggacacaaaggaggataaatatttaccgttaaattttaacgccataatttcaccttcatatacaaacaataaaaatattctgcaatttgttatctttataatacaatagtaatggttaagtgtcaataaatttctgtttcttttactttttggttacattgaggccgctttatttgttaaaattgccaatgcttttttaaaatccattttgtctgtattctccgttgcgattatatcgtaccgggctatttttccgccctcggaataaagggacaaagttcctatcctcatgccttttgtaaccggtgccgggatactttccggcagatcgactttacaggtgaggtttgaggttgcccccttggcaaaaagcaatttttccggtctttgacattccaaccccacaaaatcctccgtgccgaatttaacaggcaaccttacaggcaaatccgccgtctccgggaaggcttttgtctcaaaattttgaaagccgaaatccaacaatgtctttgccgacgcaaagcgttcggtgccggaatttgcccctaagaccaccgccacaagggataaatcattgcgctgtgccgtggcgcagatgcacaccccggctttgcttgtggtgcctgttttaaggcccgttatgccgttgtaagattttaaaagtttgtttgtgtttacaagctgggtttgaccatttctcaaatagtcaagccatatgccgctgtatttaaaaatgtctttgtgtttcatcagctctctggccataatcgaaacatccgtcgcagaggaataatgcccctcggcatcaagtccgcaggcgtttacaaagtgagtgttttccataccgagggctttggccttgtcgttcataagccggcaaaatgcctcctcgctgccgcctacaaattccgcaagggcaactgcggcgtcattggccgaggacaccgtgaccgcctttatcatctcgtcaacggtgagttgctctccgggttcaagccatatttggctgccccctgtttcaaatgcgtgttttgaaacaggcacaatatcgttatatgtgattttgccactttctatggcctccataaccaaaataagtgtcataatttttgtgattgatgccatgggaacacagtcttcgctgttttttgcatacagaacccgccctgtgttttcctctacaagtattgcgtttcggcatggtatgtcgaagttttctggccctgccggattgctgacaaaactgtcccggccggccataaccgacaaaatatccacagggatttcggtttggctggccatggcatcataccgcaaaatttccgggtcatcctctgcaaaagcccttagaggggaaaataaaatcaagaaaaggcacaaaaccgccgtaaattttctcatattagacgctcctaaatttataatcttataaattttatgaaaaagagcgtcaaaatattaaagcagttgagcttttgcaaaatttttgttataataattcaatgcgactttattatactgaggagttattatgaaagtatgtttttttacccttggctgtaaggttaaccagcaggaaacctctgccatgatgaatatatttgaaaaaggcggttacaccgttgtaaacgacgaagaacctgccgatgtgtatgttgtaaacagttgcaccgttactttaagcggcgaccgcaagagcatacggtggataaggcgtgccaagagaatgaaccccgatgccgttgtggttttatgcggttgtatgccccaggcatacccccaaaaagccattgatgtggagcaggcggatattataatcggcacaagcggaaaaaacaacgtgcttgatatggtaaataaattttttgaaaatcacgagagatatatacatatcccccaacatgtgaaaggcgaaaaattcgaggaatttgccggcgaggttgaccgcttgcacacaagggcatttttaaaaatccaggacggttgcagcagaagatgcgcatattgcattatttcttatgcacgaggtcctgtccgttcacgacctgtggaaaatatcgttgccgaggcaagaaaaatggctgaggcaggccagcacgaaatagtgcttacaggtgtaaatctttcctgctacggccaggatttaggcaacaacctttgcgatgcgatagaggcagtggctcggatagatgccgtgaaaagaataagactttccagcttggaaatggatatgttcaccgacgatatgcttgtgagaatgagcaaggttaaaaagctttgccctcatttccacctttgcttacaaagcggctgcgataaaacccttaaaagaatgggcaggctttacgacagacagttttacacagatgttatgaacagaatgagagagttgtttgaccgccctacattcaccacagatgttatagtgggtttcccgggagaaaccgaggaggacttcttggacagccttgcatttgtgcagaaatgtaaatttgtaagggtgcatgcttttccgtattcacagcgccccggcactgttgccgcagatatgccagagcagcttgaaaatgccgttaaacagtcacgaaaccgcacaatgatatacaagagcgagcaaaccagagaccgtgtttacgccgaatatatcggctttgaggacgacgccttgttggaggccaaaaacgccgaaggctacttctccgcttatacatcgagatacattccggttttggtcaaggacagaggataccattcaggtgatattgtaagggtaaggcttacaggcatcgaaaacggaaaaatgagctgtgaagcagtagacacagccgattaaaattcaaaatataataatttaaagtaaagtaaaagtgcagttcggtttgtgaactgcactttttaatttatcgtttttttgatttataaagcttatatccgccaaaagccacaagagcgactatgactgggggcaaaacatatttaccgtataagcccagccgattgacggctatatcaaacaaaacaaccccaacaatagccaaaagacatcccttgcccacggcagggtcggcctcataattgccgttgttatgctttttccctctgtcctttgagttcttggaaaagtccatgtcgagaaaagctatcctctctttttcttcttcctctcttctctcggcttctctgaggtactcgttatattttttattcaaaatgctgctctccctgccctgcttcgttgccctcattttccgccgatgtagagccgttagctgactccggtgccggctcagtagtgggtggtgtcggttgttcggtagtgggtggcgttggttgttcggtagtgggtggcgttggttgttcggtagtgggtggatcaggctgggtagatggtgccggtgtcggctcagatgtcgatgtaggtgctacatgaaccgtatatgtagctgtatgtccgttgtatttggctgttattgtagcactgccgccggcgtgtcccgtaaccaagccgttccgagaaaccgtcgctaccgcctcgttatccgaggaccagcttacgctgtttccgtctacggttgcgccgccgggcactgtgataaccgaaagctgcgagccgccgtttacctgcacgctgcttgcgccgcttattgaaattccgtcaattccccgtgaaacattcacagtacatgaggcggatacggctccgtttaaaattatggcatgtatctttgtgcttccccgacctactgcggtaacattgccgtttgagtccacggtgacaacggatttatcgtcactgtgccatgttactgttttgtcaccggcaaattcctctgtcacatgagctgataaagaaaccgtgttgccgcttttaagggaaatatctcccacatgagaatcaccgtttctgattgtcacttccgcgcgtttaaagtttgcggttacaacaatttcgcttacgctttcgtcaacggtaggcatagtaaacttaacagtgctgtcggttgttgatgaaagaccgccgtaactgcaagaccagcctgtgaatataccgccgttggaaagttcagcctctgcggtaacggaagaacccgtaaccccggctttaagcttttgctctatctcgccgtttaccttgcccaaattggaatcggatgttgtaaatgtaactttcacctttgcgcctcgcaccgctatcgggtcttggcttattatgccggtaggggtttcttctctggccggtactttattaagaggcttgggtcttgtatcctcggttatgtatgcgtgggtttttatgtagtttacataggcctccatgccttttttgctgagatgcacgccgtcgcctatggtgtaatctgtctttgcaaagccggttttttcgtctttgagtgcctcggatgaattaaggaatttgtatccctcttcttttgccatctcggcaatggccttattaaactcatcaacccgctgcattgtaagtcttgtattttcacgctgtttgtccaaaggaggaacggcatttacaataatatcggcgtagggatatgcctcgtgaattgccgccaaagcctctttatacactttaataaactcgtccgtatcccagaacaaatcatttgtgccataggtgataataattcgtttaggctgaattatcttcacggcatctattgcggttaccgggttcttatagcccttgaaataggtcattttcaggctttgaatatgctccacacccattgatacggccgccacaacattatcccaggtcgtaaagccataggccattgtgcgcacggtgtttgaatcgcctatgaacaatgtttcatcaaggtattcctggcctgcgtcatcggtttcggcaagtattgtgttgccaagctgatccgtatccagtgcctcccggtctttgtcataatccttatccacttcggtttcgtccgacatatcggtgttcccaaagtttgagccgcctatggcctttaccgcaaaaactcctatggatacaacaaaaataagtgaacacacaattattgctatatgaaccttactgccccttttagcctgttttataatatacgatatactttttcctatactgtttttgtttttatgcgaatgattttccatgtcatactccgtctgtttaaagagctgtttcgccctttgaatttttaaaatataattcccatatatgataccatattaaaaggcttttataaagtaaatcctaataaatttgtaaatatttaacaattttatccatatgtttttgagcaataaaagtctaaccctgcttttggcagggttagaaaaataaatttattattttatcaggtaaaaaaatgcaaatacagacagacccaaaattatgcggtaaataccgaataccttaaaatcgtgtttttttatgtagtccataaacgaatttatagccacaaccgaaaccacaaaggccgtgatacagcccacccgaagaataagcagttccgccccggtgaacacaagaccgaacttcaaaattttaagcaagctccgtccgaacataaccggaattgccaaaaagaatgtatattccgccgcaacggttcttgaaacacccagtaaaactccgccgattatagttgcgccgctgcgtgatgtacccggaaaaattgccgcaacaagctgaaacatacctatccaaaaagcctgtgcaagggtgatatcatctattgaatttgtggtaaaccttcttgcacctctgttttccacaagcaaaaacacgataccgacaattataagcatggcggaaaccgtctgccaattataaaacagccggtcgattttatcgtcaaacaaaatacccacaaccgccgccggcaggcaagaaacaacaactttaaaccacataatccaaatgtctttatcggtttttatctttcctttttctattttaaaggggaaaatcttcttccaataaatcatgacaactgcaagaatagccccaagttgtataacaacaaggaaaagatttttaaaatcatccgacacatttaggtggataaattcgtccaccaaaatcatgtgtccggtactgcttacaggcagccattcggttataccttctacaatgcccaaaaaggcggcctttaacaattcaattaacataacatacctctgtttatatattttaattttatccgttaattattatacataaataagcctaaaaagtacagtaaaattcgtgtaataaaataaaaagaaaatccgcagaataaatctgcggattgaaaatattttaattatagcttaaacaagctcaatgattgccatttcggctgcgtcaccacgacgagcgcctgttctgatgattcttgtataaccaccgttacggtcttcgtatcttggtgcgatttcgtcaaaaactttcttagctacatcttcttttgtgatgtaagcaaatacctgtctctttgcgtgcaatgtatctgttttgccgagtgtaatcattttttcagccactgctctaacttccttagctctagtaactgttgtttcgatcttaccgttttcaaaaaggtatgttaccatagctctcatcattgctctgcggtggtcgcttgttctgccgagctttcttgtacctggcatttgagtcactcctttacttaactgtttagattaatcttcatcttttgggaacttgtagcccaaagaagccaatttctgcataacttcttcaaagctctttctgccgaggtttctgactttcatcatttcaccttcggttttgttcacaaggtcttcaaccgtatgaatgcctgctctctttaagcagttgaaagaacgaaccgacaaatcaagatcttcaatagtcattttaagtgttgactctccctgatcaggtttttctttctctaccattgtaggcaaggccacatcatctgacaaacctacaaagaggttcagatgtcctatgagtatgcgcgcacccatgctcatagcttcgttagcattgataacaccgtttgtccaaacttcaagtgtaagcttgtcgtagtctgttatctggccaacacgagtattttcaactgagtaatttaccttcaagacaggtgtatagatactgtctgtcggcaaaacgcccaaagttgtatattcctgcaactttttgttcttgtcgcccggaacataaccacggcctctgtcaaatgtaagctccataacaagctttgcgccctcagaaagagtggcaatgtgccaatcaggatttaagatttcaatatctgaatcccgttcgattgaacctgccgtaacctcacaaggacctgttgcgttaatgcgaacagttttagcttcatcacaaaaaagcttagctgtgatgcccttaacattgaggacaatgtcagtaacatcttctttaacaccgttgatgaatgtaaattcgtgaagaacaccgtcaattttaatgcttgttacagcaacgcccggcagagaagaaagcaaaattcttctcattgagttaccgagtgtgataccgaaacctctttcaagaggttcgataacgaacttaccgtatcttccatcttcggacaaaaccgctgtttcgattcttggtttttcgatttctatcatttctgaaccctcctattataaaactaaggctgcttttataattgcattcccaatgcttgggtgggttattttgagtaaagttcgacaataaggtgttcctgaacctcaaattcgatgtcgctgcgctccggcaaacggagaacagtacccttcaactcgctcttttcgcagctgagccatgccggtacaagtaccattggtgcctcagggcctgccaatttagagaatttagctgaagatttgctgcgttcgcgaactgcgatcacgtcaccggcttttacctgatatgaaggtatgttaactttcttgccattaacagtgaaatgagcgtggttcaccaactggcgagcatcacgacgagttgatgcaaagccaaggcggaatactacattatccaagcggcattccaaaatctgcaaaagattttcacctgtcaaaccgtttctgcgttcagccatgtcgaaatagctggagaactgtttttcaagtacgccatatataaatttaagcttctgcttttctttcaactgtgttgcatattctgactgctttttacgcataccgttgcccgggttacgagtagttgtctttttatcatagcccataacagcaggtgaaatgcccaaagccttgcagcgttttgcaataggttgcatattctttgccataatttaatatcctccttttaaaattatacacgtcttcttttcggtggacggcaaccgttgtgtgggataggtgtaacgtctttgatcattacaacttcaaggcctgcagcctgcaatgctctgattgctgattctctgccctgacctggaccctttacataaacttctacagttttaaggccgtgatccatagctgcctttgctgctgtttcagcaaccatctgtgcagcataaggagtagcctgtcttgaacctctgaaaccgaggccgcctgcactccgccatgaaatagcgttgccctgcatgtctgtaattgtaacaatagtattgttaaatgttgactgaatgtgggctgcgccgcgttcaatatttttgcgctgaactctcttacgagaagttgtctttttaactgccatttgcgtacctccttaattatttcttcttgttcgcaactgtcttctttgcgcccttgcgtgttcttgcgtttgtctttgttctctgaccacgaaccggaagaccttttctgtgtcttacacctctgtaacaaccgatttcagtcaatctcttgatgtcaagagcaacctgtctgcggagatcgccttcaacagtaacctgctgtttttcgatctgatctctgattgcctgtacttcatcatctgtaaggtctttaacccttgtatccggatttactccggcagccgcgagaagtttctgtgatgttgaaagaccgataccgtaaatataagtaaggccgatttcaacacgcttttctcttggtaagtcaacacctgatatacgagccatatatcttacctcctgctaaatttaatgtcattaaccctgacgttgtttgtgttttggatttacgcagattaccataactttacctttacgcttgataaccttgcatttttcgcacattggtttaacggatggctttaccttcatattcgtaacctcctataaaatgctgtgtgtcgttatttggaacgccaagtaatgcgtccctttgttaaatcataaggcgacatttcaacagtaaccttgtcgcccggtaaaattcgaatgaaattcattctgagttttcctgaaatgtgagcaagcaaacgatgaccatttgcaagttcgacctggaacatagcgttaggcatagcctcaacaaccgttccttctacttcaataacatcatccttagccatattttcctcctaattattcataaggctgtcaatagcctttttcagatgcttatttacctgcaaagcctctgattgcaatttgaacccggtagcgtttatatgctttacatttttctttttgggcttttcaactttaaacagtttgccgtcccgcaaaagacaataagccttctcgtcaccggtaaaccccacaacacagaaaaacctgtctttgtctttacccgccaaggattttaccacgctgccaacttctatattcatagaaatcaccagtcagtcaaaatcaccggaccgtttcctgtgatggcgattgttctctcaaaatgagccgccaatccaccgtcaactgtctttacagtccactcattaggcataactttgacattgtacgatccctctgtaatcataggttcgatagcaatggtcatacccgacacaagacgtgcgcctctgccccgacggccgtaattcggcacctcaggctcttcgtgcaaatctctgccgacaccgtgaccgacatactctctgactacaccgaaaccgttttcttctgcatgtttctgaacagcaaaaccgatgtcacccactctgttacctggttgtgcagccgctatacccaggtttaaacattcgttagtaacacgcataagcttttcagcaacagggctgacagcacctaccgcatatgtgtaagcattgtcaccgtggtagccgtcaatataggctcccacatctacactgacaatatcaccgcttcttataatggtctttttagacggtataccgtgaattacctcgtcatttaccgagatacatgcactggcagggaaaccgtacattccgaggaatgacggttttgccccatgtgcagtgatatattcgtgtataagtttatcaagttcgtaggtagacatacctgcagtaatttcttgcccagcgtattttagcacatctgcgctaattttgcaagctttttttagcttttttaaatcttcagggctttttattataatcacagcttaaactcctaaaactttgagaacagcagcagttgtttcttcaacgctcttttcgccgtcaacttccaccaaaacgcccttagctctgtaaaaatctttcaaaggttcggtaatcttgtggtagtttgcaaggcggtcaagaactgtggccggctcatcatccttgcggattgtaagtggcttgccgcatttatcgcaaatgccttcaactctgcttggtttgtatttaatatgatatgaagcgccgcatgagcaaactcgtctgccgcttacacgttcaacgatcacttcatcacgaacttctatatccaatgcaacatcaattttgatgcccattttttcgataacttctgcctgcggaattgttctcggaacaccgtcaagtatgaagccgtttttgcagtcatcctgtcccagtctgtcatgcaaaattccgaagataacttcatccggaaccaaatcaccggcgtccatgtagctcttagctttaagacccatctctgtgccgtctttgattgcttgacgaagaatattacctgtggaaatctgcggaatatgcagtctgtcgcaaatgatttctgcctgtgtgcctttgccggcacccggagcgcctaataatactatattcatagttagtgatctccttaattgtttaatcggctcttattccaagaaacctttgtggtgacgcatcaccatttcgttttcaagcatctgtgctgtttcaagagcaacaccgacgataatgagaagtgaagtaccgcccatctgaatacctgtgcctgtaaggttacctgtaataataggcaagatagccacaacacccaggaaaatagcgccgataaatgtaattttgctcaaaaccctctgaatgaaatcctgtgtcatcttgcccggacggaaaccagggataacaccgttgttctttctcaggttatttgcaatttcaaccggattgtactgcattgttacatagaagtagttgaaagcaataatcaacagcaaatatgtgacagcatatacaaaaccgttatagttgaatacgttcaatattttaataagaagttctgactgaacgttgaagaaacttctgatagtacccggaatagaaaccaaagcacttgcgaagataataggcataacgcctgtcatattaaccttgataggtatatatgtgttctggccgcccatcatctttctgcctacaactctctttgcatactgtaccggaattcttctctcggcgttgttcaaaacaacagcgaaagcaataactgctacggcaaatataagatagagaggaataaggaagaagttctgtgttttctggcttttaaccgcgtcattgaacatattaacaaagattgtcaccgtgcttgaaagtcttgaaactataccggtgaagataatgagagaaacaccgttgccgatgccttttttatcaatctgctcacccatccacataagtaaaagtgtacctgcaacaaatgttacaataataaccaatccggcaaaaaaaccttcaagcccgtttgtataaataagggcgccttggtttctgagaaccatatagtaacccaaagccaaaacggcaccgatacctatacttacatatcttgtaattttattgatttttcttctaccttcttcaccttcttttgacaggttttccaaataaggaatagccactgtcaaaagagtgatgatgatggatgcgttgatgtaaggaattacacccagtgcaaaaagagtagcattggcaaatgcgccaccgcttatcatattcagatagccaagcatgttgccgtcgccggctgaaatcatgcttttaagagcggagggacggataaagggcacggcaatggcacagcccaagcgatacaaaataagaactatcgccgtgaagatgattttctttctcaaatcttcaattttccacgcatttttaaatgtctctaacactttattttacctctgcctttccgcctgctttttcgattttctcttttgcagatgcagagaaagctttaagttgaacagtcataggctttgtgatttcgccgttaccaagaaccttgataccgtcgcaaacctttttaacaagaccgcttgctacaactgctgcttcgtcaacaacactgttagcttcaaatcttgcttcgaggtcactaaccttgatagttgcataagtggttctgaatggttcgttagtgaagccaaccttaggaagtcttctctgcaaaggaagctgaccgccttcaaagcctgctttcttagcgcctgaacgagccttctgacccttgtgaccgtaaccggctgttttgccgttaccgctgccgtggccacgaccttttctcttagcagcttttgatgaaccttctgcaggtctcaattcatgaagcatcatatttgtgcacctcctgtcgattattcagcgataacttcaacaaggtgtgagatttttgcaaccttacccattgttgccgctgtgttaggctgaacttttacgtcgcctactcttttaagtccaagagcttctgcacatgccttctgattctgaagacgacctgcaagactcttaacaagtttgattgttactgtttcaggcgcttttactgccttttttcttccagccatttaaaagtacccccttaacccaacaattctttttcgtcaataccacggatcttagcaacttcaccgattgttcttacagaagcaagaccggcgattgtagctgcaaccacgttacccgggtttcttgaacgaagtgattttgtacgaatatccttgataccagctgcttcgataacagcacgaactgcgccgccggcgataacacctgtaccaggagctgccggtctcataagaactcttgcagcacctgaagcacctacaacttcatgcggaattgatgtgcctttcagtgaaattctatacaaattctttcttgcatcctctgtacctttgcggatagcttccggtacttcagctgctttaccgataccataacctacaacgccgttgccgtcaccaactacaataagagctgagaacttcataatacggccgcctttaacggtctttgatacacggttaattgatacaaccttctcctgaaggtctaaagtacttgcgtcaattctttccattgtatccctcctacattacagcttgaggccgccttcacgggcgccgtcagccaaagcctgtacacgaccgtgatagatatagccgccacggtcaaacactacgtttgtaatgcctttttccaatgcaagcttagcaatcttttcgccaactgctttagctgcttctttattaccgccatagcttgtgaaatctttgtccattgttgatgcgcttacaagtgtaacgcctgcaacgtcatcaataatctgagcatagatgtgctttgaggagcggaatacattcagacgaggacatgcagctgtaccgctaatctttgtgcgaactctggcatgtcttctaagtcttgcccggttactgtttggtttctttaccataattagctcactcctttattatttacctttacctgtcttgccttctttgcggattacatattcaccggcatagcgaatacccttgcccttgtaaggctccggcggacgcttttcacggatttctgccgcaaactggccaaccttctgcttatcgataccgataaccttaatcttgttggcatccggacattcaatcttgataccttcaacttcaggaacaattacctggtgtgaataaccaaggttcataacaaggtttgtaccctgttttgcaactctgtaaccaacaccaagaacttcaaggtccttagagaagccttctgaaacacctacaaccatgttgtggatgagtgatcttgtaagaccgtgcaatgctttgttttcgttttcgtcatctggacgggaaacaacaactgaatcaccttcaacagcaattgtcatgtttgggtgaaaagtggaattaagtgttcccttagggccagcaactgtaacattatttccatcaactgtaacttttacacctgctggaatagcaatgggttttcttcctattctcgacataactatttacccccttaccatacataagcgagaacttcgccgcccacattttctttgcgagcttttttgtctgtcataacgcccttagatgttgagatgatggctgtgccgatacctctcaaaacctttggcaaatcttcgcagcttgagtagatacgaagacccggtttagaaactctgcgcaaacctgtgattactgaagcgcctgtttctgtgtatttaagtgtgattgtgataacaccctgtttatcatcctcagtcactgtgtagccttttacgtagccttcatcaacaagaatctgacagatagcctttttcatgttggatgcaggtacatcaactgtttcgtgtcttgcccgtgaagcatttctgattcttgtgagcaagtcagcgattggatcagtgatattcatatttgcctcctataatatttaaaagttaattaccagcttgcttttcttacgccaggaatttcgcccttgtaggccaattctctgaaacagatacggcaaatgccgtacttgccgatataagcatgtggtctgccacagattttgcatctgttgtactttcttgttgaaaatttaggttcgcgctgctgcttaaccttcatagatgtctttgccatagtatatatctccttccttagttagcgaacggagcaccaagagctttaagcaaagccttagcttcttcgtctgttgttgctgttgttacgaatgagatatccataccacggagagcatcgattttatcatattcgatttcagggaaaatcaactgttccttgataccgaatgaatagttgccacgaccgtcgaatgagttaccgttgataccgtggaagtctctaactctcggaagagcaacttcgaacaatctctcgataaattcatacattctttcgccgcgaagtgttaccttaacgccgattggctggccttcacggagcttgaagttagcaactgatttcttagccttgcaaacgatcgggtgctgacctgtgatctgctcgatgtcgctgataacagaatcgataacctttgaattgtccttagcttctgaacaaccaacgtttacaacaaccttttcaatttttggaatctgcattacactcttgtagttgaactgcttcataagagcaggagcaacttcgcttgtgtatttttctttaagatttgacataaaaagtttctcctttctcaattacagttcagcaccgcagtgtttgcagatacgaacttttttaccgtcaacgatcttgtggcctactcttgtagccttgccacatttcggacaaaccggcataaccttgcttgcgtagatagcgccttctgcgtctacaatgccgcctgtttcaccctgtcttctcggcttaacatgctttttaaccatgttacggccttcaacgattactttgccttcagccgggcttacagcgagcaccttgccggtttcaccgcggtctttaccgctaatgattttaacggtatcacctgtttttacatgaaccttattcattataattctcctattaaagtgattccggtgcaaggctcaatattttaaggtaacccttgtcacgaagttcgcgagcaacaggtccaaaaatacgtgtgcctctcggatttttatcgtcttttataataactgctgcattttcgtcaaaacggatgtaagaaccatcctcacggcgaataccgctctttgaacgaacgataacagctttaactacttcaccttttttaacaacgccgcccggtgttgtcttctttactgaagctacaacaacatcgccgatatttgcatatcttctgcgtgtgccgccaagaactctgatacacataagttccttggcacctgtgttgtctgcaaccttcaagtaggtctgcatctgtaccatgtacaagtcctccttttcaaaataagcttatttagctttttcaactattctaacaagtctccagtttttatcctttgaaagtggacgagtttccatgatttctacacggtcgccgatgccacattcattgttttcatcgtgtgctttgaatttaacagtctttttaacaatcttcttgtataaagggtgccgaactctgtcttcgatagcaacaacaattgttttatccatcttgtcggatacaactgtaccaactcttgtttttctcaaattacgttccattgtttttcctccccttattatttgtcgatagcgctgagagttgtcaaaactcttgcgatatctttcttaactgccttaattcttgtcggattgtccaactggtttatagcgtgctgaaaacggaggttgaaaagttctgctttcagctctttgagtttagctgtcaactcttcggctgacaagttacgaagttcacttgctttcattattcagcaacctcctctttcttcacgaatttgcacttgataggcaacttgtgcatagcaagacgcatagcttctttggctgtttcttctgaaacgccgccgatttcaaacataactctgcccggtttaacaactgcaacccatttttcagggctacctttaccggaacccattctggtgccggccggcttttctgtgattggcttatccgggaaaatcttgatccaaacctgaccgccacgcttgatgtaacgagtcatggcaatacgagctgcttcaatctggtttgatgtgatccatgacggttccaaagcctgaaggccgtaatcgccgtatgtcactttattaccacgcatagctttaccggtcatacgacctctgtgaactctgcggtatttaactctctttggcaaaagcattatttgttgcctccttctttacgaggtttagaacctttgagtacttcacctttgtaaatccaaactttaacgccaaccttaccaaatgttgtgttagcttctgcaaaaccgtaatcgatgtctgcacgaagtgtttgaagcggaatagtaccttcatggtattgttctgttctggcaatatctgcaccgccaagacggcctgagcagcttgccttaatgcccttaacgccaagtctcatggctctggacattgactgtttcatagctcttctgaaagcaattcttctttcaagctgtgctgcaatgttttctgcaacaagctgagcgtctgcgtcaggctgtttgatttctgtaatgttgataattacttcgtcaacaggtctcttaacctgctttgcaacctgaactctgagcttttcgatttctgcgccctgacgtccgataaccataccgggttttgcacagaaaatgtttattctcaatacttttgagtctctctcaatctcaatttttgatacaccggcagtgtaaagctgagctttgagaacttttcttattttatagtcttctacaagtgtatcgccgaaagctttcttttcaacgtaccagcgagaatcccagtttttaataacgcctacacgcaaaccgtgtggattaactttctgtcccatagcttcctccttattcttcgatttctttgagaactacagtcatgtgtgatgttctcttaagaattctatatgctctgccctgtgctctcggcataactcttttaagagttgggcccggtgttacaaaacactctgcaacatacagattgtttttgtccatctgaaaattgtgttccgcatttgccatagctgacttaaccaatttaagtaaaggttcacaagcagcctttggtgtgtgctgcaagatagcaacagcttcgtttaccggcttatttctgataaggtccataacgatctgtacttttcttggtgcgatgcggacatgtctagcgtatgcccttgcttccataattatattctccttacttacctgattttgtgcctgcatgaccacggaatgttcttgttggtgcaaattcaccaagcttgtggcctaccatatcttctgttacatataccggaacgtgtttacgaccgtcgtgaacagcaaaagtgtgaccaacgaaatccgggaaaattgttgatgaacggctccaagtttttaatactcttttttcgccagtcttgttcatttccttaactcttttgagaaggacaggctgtacgaaagggccttttttaatacttctacccatttcttaactccttttcttaaccgtttctgcgtcttacgataagcttgtctgaagctttgcgcttgcttcttgtcttgtagcccatagcaggtttgccccaaggtgtaacaggacccggacgacctaccggagccttaccttcaccaccgccgtgtgggtggtcaacagggttcataacgctaccacgaacggtaggtctccaacccatgtggcgcttcttaccggctttaccgattttaacattgtcgtgatcaaggtttgaaacctgaccgattgttgcatagcagttaagtgttacatttctcaattcaccggaaggaagtctgataagaccgtagccgttttccttagcgatgagctgaccgaagttacctgctgaacgaacgagctgtgcgcccttgcccgggtaaagttcaacgttgtgaacgattgtaccaaccgggatgtttgcaagcggaagtgcgttgcccggcttgatgtcggcattaggaccgcttactactttatcaccaacattaaggccgttaggagcaataatgtatgatttttcaccgtcttcatactgaatcaaagcgataaaagctgttctgttcgggtcatattccaaagtgataactgttgccggaacatcaagcttgtttctcttaaaatcaataacacggtattttgttctgtttccgccaccgtgatgacgaactgttatacggcctgtgttgttacggccggatgtctttttcataggttccaagaggcttctctctggtgcaacctttgaaagagccgaataatctgtcacagccatgttacggcgtgaaggggtagtcggcttaaatttcttaatagccatttaggttcactctccttatgagtctttttgcgagaaacggtcggtgccgcctcccatacttaaaaacgcttaatcatttaagcggagggattagttcatgctttcgaagaactcaatgccctttgaatcagctgtcaatgttacgatagctttctttgtagccggtgtgtaaccgcctttgataccctgacgacggaatctgccgcgtacagagattgtgtttaccttgcttaccttaacgccgaaaagttcttcaactgccttggcaatttcgatcttgttagcatctttggcaacctggaatgtgtatttcttgtcagcaatgcccatcatgctgttttcagtgatgattggcttgatgatgatatcctgtgcaaatttcattatgcgaatacctcctcaagtttcttagcagcatcaagatttacaacaagtgttcttgcgttgattgtgtcgtaagcgttcattgttgttgccaatgttgtttgtacacccggaatgttgccggctgacttaacaaccttctcatctgcaactgcctgaaccatcaatgtcttgcctgacacaccgatgtttttaagcatcttaacaactgcttttgttgaataatcagcgattgcgtaatcgttaacgatcacaagtttaccctctgcagctttggcagaaagtgctgagcaaatagcaagtctcttaactttcttgttaattgagtagctgtaatcacgtggcttagggccaagtgcgataccaccgtgtgtccactgtggtgaacggatagaaccctgtcttgcacggcctgtacccttctgtctccaaggcttacggccaccgccgcgaacctcagctcttgtaagagttgactgagtaccctgtctctggtttgcaaggaagtttacaactgctgcgtgcatagctttttcgttcggtgtaataccgaatactgcatcagagagttcaactgtgtcgactgttgcgccgttaatgtctaaaacatcaaatttcatttttgtttcctcccttaagctttcacagtgtctgtaagaactacgattccgcccttagcgcccggaatagcacccttaacagcaatgagattattttctgcatcaacctttacgattgcaaggttctgcactgtaactctttcagcacccaagtgacctggcaatttcttgcccttgtaaactcttgaaggtgttgatgtagagccgtttgaaccggcgtgtctgtgaacagggcctgtaccgtgagtagctctcaaagagtggccgttccagcgcttgattgtgccggcatatcctttacctttgctgataccgcaaacgtcaactttgtcgcctgctgcaaatgtatcagctttgatgatgtcaccaacgttgatttcatcgattgaatcaaagcggaattccttcaaagttttcttaggagcaacgcccgccttttcaaaatgtccttttgcaggttttgtaagcttgttagctttaacttcgccaaaacctacctgaactgctgtgtagccatcgctttcaacagtctttttctgtacgacaacacaaggacctgcttcaactactgtaaccggtactaccataccgttttcgtcaaaaagctgtgtcataccgatttttttaccgataattcctttttgcattataaatgcctcctgttaggttattggttggcctttcagccaacatgactccaacttgtggttgagaggttcgctcttaataatgagtaactgttattatttattagagcttaatttcaatttcaacgcctgccggaagttgcaagcttgtaagagcttcaacagtcttgtttgtaggtttcaagatgtcaataactctcttgtgagttctgttttcaaactgttcacgagaatctttatacttgtgaacggcgcgaagaattgtgataacttccttttctgtcgggagaggaatagggcctgaaactcttgcgcctgttctctttgctgcttcaactattttgtcagcggctgtatctaccaactggtgatcataactcttcaatctcactctgattttttctttgactgccattgtaacgcctccttataattttttgtttagcggcggtttatgaatattgaacaccgcgccgggtgtttcgcgtttccccattaaaaacaccgattaaccacacacttgcagttatatcggaactttgagaaaatctcatcaagtcgcatcgttaacggccagcggactgaatttcagtcattcaccctttgcattcaatattctattcgcccggttcaaagatcggacatactcagtggaaaaacccacgaagccgtggcaacctcccacttcatcgcatatctttgcagtcacctgtactataatactacaaaaccaattcaaatgcaagcatttttttatgtttttgtaactttgtacacataacttgttttcttgtgattatttcagcaaattttgtatattttgccacaatatcatgtctgatttttacagacaaggtaaattataccacatctttaaaaatttgcaagttttttattaaattttattttcattacgatgaattacttcaaaattcataaataaagttatatatatttgcatctctattttttcaaaataggcaaacaattataaaaccacaaagactgtaaacggtccttgtggttcataataatcatttgttgagtttgttcatcgtttcttcaatcgcaggtaatgcggacattataaatatagggtaataattaagtaaatatctcgtgccggcttcccaaagcaaaagaaaaagtaacataccaaaagaggcaagctgcgcaacaaaatactttctgttttttctcacagctcccatcgccatacctgcaacaatcattgtaaaaatcaaaatatgatagccctgaattatattatcatatatgagattatattttccttgggaatttaaaatatcaatcataacattttgatgcataggagagtctgccacagtattgggatagtccaaattgccggagccaaaactgcgaattgcctttttacctaaaaattttacatacccctttgcacccatgtattccaaccttgctttcagcaaaaattcggcagcctctactttttcttcgtgagtatcatgtgcccatacaaaatggttgtcatcgggagaatgggttccgtctccttgcattcccatagctatccacgctatataaggtgtttgcatgtcataggatttgtctttatcaagtatgtgtttataaataaatccgtcaaatatggttcccgccaccgaaaacccgactatacagctaagtacaacagacagcatttttttaaattcaaattttaaaatacaccgtactgcaacggcaataaccattattgcgacggaatattttattttcataccaaagccaattaacagtccgaacatccggcatagcaaaacttttttcttcaagctgttttcttctcccaacagcaagtagaaatacaaaatcacaggcggatatagcatggatgtggtatcggtataaaagatagaaatatatgtttgcaacggcagacagaaaaacaatattaaaattgccataacggcattttttgtgctgtctatttttttgaccgacaaaaatgtaaacaaatatgtcaaatcaatacaccgtgcattaaacacagatccgattacaaagtaattttcaatcccaaatttatgggcaattctaaaaatgaattgcaaaacaaccgtgatgggcaaattgttggggtatttgtaaaaataatcaagataaggatcctcaatcttaccggttattgtgtaattgtaagctccggtaaacacattggcaaaatcccttgtagggtagcctccccgcacattatacagtaaaatttgtacaatcgtcaaaataacgaaaaatgctattccaaattttaaaagattattttctatatattcaatgtttcttttaacaattttataaataaatgcaaaaattatgaaccacacaccggcaactggcaatacaatatatggtttataatcaaaatatgggttcaaaaaaacaattcccactaacaaagctgcaaaagaagcaaaaaacacccagtaaagtacattcttagtaattgtttcaaacttgttttccattattttatcctcttaagcctatcaataacatccatatccggggatatatacgccgtattatatgtgtcataaataaccattcccggctttaaatcatttgtctttttaatattttttacgaatgtatagtcgacttcaacctttgcctgtccgctgtaacttgaataataagccgccaacatagccgcctcattttgagtctgcaccggaatatctctgccctcgctcataacaacaacatggctgcccggggcgtttttaacatggaaccacaagtccttacctctggcggttttcattgtaagcttatcattttgcacattgtttcgtccgattagtatcaaaaatccctctgaggattcataccttataaagtcccggggcttttgctttttttcacggtttttatagtatttaagataacctgcatcgtgtaactcgctccttataagcataagttccgcctcggtttttgcactgtttacggcgtattccac

SEQ ID NO: 3083 - DNA, 4110 bp, Unknown
  16S sequences of unknown bacteria
gatgtgagagttggcagaagatcgctattcaatctggaagcgttatatcgaggagaagcttgcggactttctgccggaagcggagcagaagagccgtattctgtcagaggccatgcggtacagtctctcggcgggaggaaagcgtctgcgtcctcttcttcttctggaagcctgcagcgtctgcggcggagatgccgaaaaggcgctgccctatgcctgtgccgtggagtttatccatacctattctctgattcatgacgatcatccttccatggatgatgacgattaccggaggggaaagctgacgaatcataaagttttcggtgacgggatggcgattctggcgggagacggactcctgaattcggcttttgatatcatgatggaagatatcctgccggctgccggcaggggcgaggatgtgtcgtttctgctccgggcggcttatgagatttcatcgtccgccggagtgcgggggatgatcgccgggcaggcggcggatctgcagaatacgggaaacggatatcgtcaagatgcgaaattcgccgggaaccttcagggtaagagaacgacggtgcgtgaacggtgcgcggcagcagacagtgaagcgggcgccggaaccgtccgggaggaactcagcggcggcgaggaaggcagagagaagatgctgctctatattcataaaaagaagacaggggctttgatccgggcggcggtccgggcgggcgctctgatcgcaggcgcatcggagcggcagatagcagagctcaccgagtatgcggaaaacctgggactggcttttcagatttccgacgatattctggacgtcgtcggtagcgaagcggagatgggaaagcgcgccggagccgatcagcgtctggggaaactgacctatccgtcggtcttcggcctggaggtttcccgccggcggctggcggaagctacagagcgggctgtagaagcggctgcccggtttggagaggacggcggctttctggaaaaacttgctattgaccttcagagtcgaatatcataaaatgaatggaaagtggcgcagtattctagtcagaatttgctttttctgaagacggggctaaaaatccgtcaaatggcacatcgatgaagctccttgtttttgctgccgacgcccagtcgggggtattttcagggagaaagatggtcagggcgatccataatggcatatgggcgtgaaccctgttcatcgtggaggcttgcaccgccggaccgacgggaacggctgtgtaagaaataaacctgaagtaaggctgtatcgaaatcattcgctgaccttacctaagcgtagcttgccttgagtgggagcgggggaatacagatctatgcggcagtgttcgaggcctgggcgcggaccgcaatcgctgtgtgaaaccggttctgcaaaagaggataggaaaaagcaatactgttgaggaaatctcctagactgtttgatatacgtggattgcagtacggacttagtggcaatccggtaccgcagttggcaacgctgcgggcggagctttgaagggaaaccgctgatcaggcgacagatcagcagcaccgtaggaaatctgaccggacctatgccgtaaggtttacacgtatattgtccacttcatttttatttatgaaatgttaaagaggacaagattatgagaggaaaaaaggacagcgatcccgataaaatacgacgaagatgggtgatcttcatcacgattttcgcatttttactgtcggtttttatgagtactttttcggatatcctgttgagaaagtccaataccgccgtcgcgtttatcgtcctgatcgccatcatttttatcggtattctgtttgatatcataggcgtagcggtgaccgtcaccgacgagaagccgtttcactctatggcggcgtccaaggtaaagggcgcgaagagttcgctcatgctgatccggaatgccagcagagtttccaatgtctgcaatgacgtcatcggcgatatctgcggcattatcagcggaagttcggcggcgtttatcgtcactcaggtggatttttccgacgtcggatttatgagcgcggcggttttctccgtgattctgagcggtattgtggcgtcactgaccatcggcggaaaagctttcggaaaagaaatcgccatcaacaattccaaagagattatttcaatgatcggaaggattctctctgttttcagcaagtgataaggacatctttctcatgataaaaaagatagaagaaggaatatatccggcggatataaaaaaaatggatatcgggcagttggagcttctgagctatgagatccgggatacgctgatttccaccgtatcggacacgggaggacatctggcgtccaatctcggcgtagtggagcttacgattgcgctgcacaaggtgtttgatgccccgagggacagaattgtctgggatgtcggacaccagtcttatgttcacaaacttctcaccggcagaggcgcgtcattcggaaccctccgtcagatgggaggaatgagcggttttccgaagcgctgtgaaagcggatacgacacgtttgataccggccacgccagcaattccatctcggctgcgctgggaatggccgcggccagggatctgcgaaaggaggattatgcggtggtttctgtcatcggcgacggagctatgacaggaggcatggtctacgaagcgatgaataatgccggagctatgaataccgggtttatcgtcatcctcaacgacaatgaaatgtcgatctcgcaaagcgaaggcagtatggcacagcacctcggaaagctgcgttcctcggaaggatacaacaatctgaaaaaatccctgaaaaaatctctgaaaaaaattcccgtggtgggcgatcccctgatcgaagggttgggtacgctgagagacgcggtaaaatatacgatggtttccggtgttctcttcgaggaactgggatttgtctatctgggacctatcgacggacatgatatcggtgaactgacggaagtgtttcattatgccaagatgctgaaccggccggttctggttcactgtgttacaaaaaaaggaaaagggtaccatcctgcagagcagaatccgtcgaaatttcacgggatcgcgcctttcgatcccgaaacgggagcgctgaaaaagcagacggaacagccttcttattccaaggtgttcggcaataaattaaaggaaatggcgctgaaagattcttcgatcatcgcagtgacggcggcgatgacggaagggaccgggctttcggagtttggaaaatatctgccggaacgtcttttcgacgtgggcatcgccgaggaacatgcggtgacgtttgccgccggagcggctgcggaagggctccggccggtggtagcgatctactccacatttctgcagagagcttatgatcagattctcatcgatgtctgcatgcagaatcttccggtgactttctgcatcgacagagccggtatcgtgggagcggacggtgaaacgcatcacggcgtgttcgatatttcctatctcatttccatgccgaatctgatgatctttgcgccttcggaccgcagagaactggaagagatgctggaatatgcggtgttttctgaatgtccctgcgctgtccgctatccccggggagcggctccggcgccgctgtgcggttccggtggagaacgcagagaaaatgcaaaaaaggattccggagatcgtggaacagaggaagtgtttttgcaggcgcgtgtcctgagagaaggaagcgacgtgactatcatttccgcaggtgagatgacccgggaatgcgcggaaagctgcagaattctggaatcccggggaatccgggcggaactcatcgacgcccgggtgctgaagcctctggatcgccgcacttttgaggcgtcggcggcgaagacgggtctcgtatttgtcgcagaagataatgtggccaccggcggattcggcagctgcgtggaggagctctttgcctgcagtcctcagatcgaagtatataaaatcgcctggcccgacgagtttatctctcatggcacccaggcggaactgaagaaaaaatacggtatgaatgcagag

SEQ ID NO: 3084 - DNA, 12844 bp, Unknown
  16S sequences of unknown bacteria
ttttgatgttatacttgtcatagaaaattcacctcttatggtactttgtttttgtagttattaacatcataccatatttgagatgaattttcttctttttttgttacctatctattgtaccataacaggaaaattgtaaaatttcggtgacttttcggcttcgcttataagcactctttaagcgaaaaaccgcttattcagcggttttcagtctgtcactgaatttgaaaaattgtttttgcggaggtaacgccgcatttttcgtttttccggtgacacgtgcggcggaaaaacaccttaataagcgaaaaaccgccggatgagcggtttttcaagggcactggattggagtgtccacggagcataacaaccgactgccgcctgctgcggcggataaaaggagggtgctatggcgctgcggtcggcagaaaaacgaagctgcaaggaagtttttcgccgggcaccgcaagagtgaggagtgcagtccgaaaatctgtgattttagagtgaacggcattcccgtaggggagcgtgccgactttttcgacacgattagttattttattatgcggcttttatcttccgatgccgcgcgttctataaattcatccgccgacatagagccgaggtcgccgttttcgccgcgctctctgaccgaaagcgtgccgttttccacctcgttatcgccgattataagcatatacggtaccttttgcagccttgcttcgcgaatcttatagcctatcttctcgttgcggtcgtcaacctctgcacgaataccgttttcttcaaggcggcgcttgatatcataagcgtagtcgcagtggcggtcagcaatggtcaaaagctttacctgaaccggggctaaccacatcgggaatgcgcccgcatatttttcaataagcagcgcgagggttctttcgtagcagccgatagaggtacggtgaataatataggggtttttcttcacgccgtcgcggtcgacatattccataccgaacttctctgcgagcatctggtctatctgaatagtgatgagcgtatcttccttgccgtaaacattctttatctgaatatcgagcttcggcccgtagaacgccgcctcgcctatacctatcttatagggaatttccaggtgatcgagtatctttttcataactccctgcgcttcatcccactgctcgggagtgcctatatatttatcgcggtcatcgggatcccactgtgagaaacggtaggatacatcctcataaagtcccaaggttttaagcatataaatcgcaagctccagacagccgcggaactcctgctccaattgttcgggggtgcacattaagtgaccctcggaaattgtgaactggcggactcttataaggccgtgcatttcgccgctgtcctcgttgcggaagagggtagaggtctcgtcatagcgcagcggaagatcgcggtaggagcgtgcgcggtttaaatatgcctgatactggaacggacatgtcatcgggcgcagcgcaaagcactctttggtttcgtcgttcgggtcgcccaaaacaaacataccgtcaaggtagtggtcccagtgccccgaaagcttgtaaagctcgcgctttgccatatagggggttttggtaagctgccagccgcggcgcgcctcctcatcctcaacaaaacgctgcaaaatctgaattattttagcgcccttcggcagcaatatcggaaggccctgacctataatatcaacggtggtgaaaagctccagctctcgccctaacttattgtggtcgcgctttttcgcttcttcaagcatattaaggtgcgcttcaagctcgcttgccttcgggaaagccgtgccgtaaacgcggcagagcgttttctttgaggagtcgccgcgccagtatgcgcccgtggcggaggtcagcttaaacgctttgactgctcccgtgctcataaggtgcgcgcctgcgcacaaatcggtaaattcaccctgtgtgtaaaagcttatatcctcgccctcgggaatatcctctgcaagctccgccttgtaaggctcgttcttttccttaaagaactcaaccgcttcgtttctgctcttgtagctgcgctcaagctttatatcctcttttacaatcttcttcatttccgcctcgattttcacaagatcctcgggcgtaaatttggtttctacgtcaaaatcatagtaaaagccatcgtcaacagcggggccgattgcaagctttgcgtgggggtaaagcctttttaccgcctgtgccataatgtgtgacgctgtgtggcggaatgtccgtttgccgtattcatcatcaaatgttaaaatttcaagctcgcagtcttcgttcagcgtatcgcgcaaatcggcgtttttaccgtttattttagcggcgcaggcatttcttgcaagccctgtgcttatttcctttgcggcctcataagcggaaattccggcggggaattcctttacgctgccgtcctttaaagtaacctttatcataaccgatacctccgaaaaaataaagctccgcccctcggttaagagggacggagcaaaattaaacaatactccgcggttccacccgcattccgtttttttaaacggcactttactacccttaacgcaggtaaaacgtccgtgttgcaacccacggcgctcaaaggcggtgttcgctttttccggaatttacgcggctttcagccggcggcacgcgctctcttttaaattctgattgaaaaagctactgtccttttcaacgctttaacacctatataatagcgcgtttgaaggcggttgtcaagttcttttttagctaatggttcgtgtcaagtttttgtaggaagattttttgatgaaatctcccgttatctgtgttatactgttttttacaagagtatgcctccttagtgttttgggcccttcaaccttattgaaacacattttggcatactcttgtactgtttttttctacatttattttacactaaggggacaaacctgcaatatgcgcattttacggcttgaaaagcggcggaatatagtgtataatagatttaaaatgcagattgaaaagtgataaattttaaagggctggtgcggtatgacgagaaaacaggcgagggaagaggcgttcattcttgtttttgaaaaggaatttaacaataacggtacggacgaaatattggaaacagcaaaggaagtaagggatttagagccggatgaatatataagccgagtatttcccggcgtttatgacaatatagaggagattgacggaatcatttccgagaattcggtaggctggagcattaaaagaatttccaagaccgctctttgcatattgcgcctggcgatttacgaaatgaaatatttcgatgagatccccgtttcggtttcaatcaatgaggcggtcgagctttgcaaaaaatacgccactaatgatgacgcttcctttgtaaacggtattcttgcgaccgtttccaaatcactttaatatgataaccgaaattgccgcaataaccgtaaagcagcttaatttctatgttaagtcactgcttgagggcgacagtcatcttcaaagtgtgaccgtaacgggcgagctttccaactttaaaaaccactatgccagcggtcattggtatttcaccttaaaggacggggacgccgcagtccgctgcgttatgttcagagcaatggcaaacagcgtgcgcttcgaccctcatgacggcgataccgtggtgctgcgcggcagagtgtccatttatgaaaaggacgggcagtaccagttttatgccgagcagatgttcccggtgggtgcgggggcactggctatgcagtttgaacgtattaaggaaaggcttaagtccgaagggctttttgacgcatcccgcaaaagaccgctgccgaaataccccgaaaatatagcggtaataacctccgacacgggcgccgccgtgagggatattttaagcattcttgacaggaggtatcctgcggcgcgtatcataatgtgtccggttacggtgcagggtgagaacgccgtgcctcaaatgctctcggcacttgacaggctttacagactgggcaccgccgatgctattattataggcagaggcggaggttccgcagaggatctttgggagtttaacgatgaaacgcttgcgcgtaaaattgctttgtctcccgtgcctgtaatatcggcagtagggcatgaaacggattttacaatttgcgattttgtcgccgatatgcgcgcaccgaccccgtctgccgcggcagagcttgccgtgccgaattcggaggagctgaaaaaacggttcgcaggatttgaatcggcgcttaaaaatgccctcaaggcgaggtatgagcgggcaaacgcacggctttcgggcgctctttcatcccgctttttcaaagcgcctgaggctgcgataacagaacgacgcgcagagcgaaccgacagagcggcggataagcttatatcggcatattcagccttgctttccgaaaagggcgcgtatcttgcggaatatgccgccagactggacgctttgagtccgcttaagacccttgcacgcggctatgcggtcgcagtgaaatccggaaaaacggtgcggtcggtaagtgaaattgaaataaacgacggtataacgcttaaatttgcggacgggagcgttaagtgcgaggtaaccgaaaaggagcagagagtatgagccgaagcaacgactttgaaaaatcgatttcggagcttgaaaatatagtatcgctgcttgaaagcggagatattacgcttgatgaatcaataaagcttttcgagcgcggaacggagcttgcgggagaatgcagaaaaacgcttgaaaccgcaaagcagaaaataataacactgacgcaggcggaggaagaaaatgagcaggagctatgaacggtttttacccgatatagaaaagaagcttgagggcttaattgccgccgaaaattccgcggctgaagcgatgagctacagccttttatcgggcggaaaaagaatcagaccgattcttctgcttgaattctaccgccttttcggcagacaggacggtaatgccctgaattttgccgccgcgattgaaatgattcacacctattcgctgatacacgacgatctgccctgcatggataacgacgatatgcgccgcggcagaccctcctgccataaggcgttcggggaggataccgcactgcttgcgggcgacgcactgttgacgcttgcctttaaaacagcagcggatacagaaaatattccgcccgacagagtgcttaaagccatagccgtattagccgaaaaggcgggaataaacggaatggtgggcggtcaggtggaggacctcgctgccgaaaaaagcggggcggatattgaacggctccgcgggatgtaccttaaaaaaacctcttgtcttttatcggcggcggcggtttgcggcagtattttggcgggggcaaacgcagaggaaactgctttagccgaagaatacgccgagaaattggggcttgctttccagattatagacgatatcttggactgcacatctgatgaaaagaccctcggaaagcccataggcagcgatgagaagaacggtaaaaccacctatgtgactctgctcggtacagacggtgcgcgcgcagcggcggcgcagttgtctgatgaggcgcttgcggcgcttcacgaaataggcggcgacaatgcagccttatgcgaacttaccgccgagcttcttgacagaaagtattaaaaggaatgtaattataattggagtataagctgttaagcaaaataaaatcacccgatgatgtcaaaaaacttaattatgacgaaatatcactgctttgtcaggaaatacgcgactgcatagtatccaccgtttcaaaaaacggcgggcacttggcgtctaacctcggcgcggtggagctgacggttgctttgcacaggagcttttcttcacccgaggacgcgcttattttcgatgtgggtcaccaatcctacactcataaacttttaacgggcaggtttgataaattttccaccatacgcaccgaaaacgggctttcgggctatatgcgcccggatgaaagcgagcacgacccgtttataaccgggcacagcagcaattccatatccgcagcatacggtatttaccgtgctaaaaagcttaagggcgaggaaggcacggcggtcgctgtaataggcgacggcgctatgacgggcggtatggcatatgaggcgctcaataatgcgggctcgggcagaagcaatttcattgtggtgctcaacgataataagatgtcaatttcccgcaatgtgggggcgcttgcgcgcagccttacaaaaatgcgaaacaagccgcattaccaccacttcaagtttgccctaagccgctttttactggcaattccgcttatcggaagaccgctcaacaacgcaattttcacggtcaaagaggcggtcaaggagcttgtttatcacgaaaatatcttctctgcgctcggctttaattatttaggacctgttgacgggcatgatgttagagcaatggagcagctgtttgatattgcaaagtcctattcccgcccgtctgttatacatgttataaccacaaagggaaagggctacgcttatgcggaatcctccccgaaggattaccacggcgtttcggcttttgatattgataagggcgctaaattcggcggcaagcgcacatattccgatgttgcgggcgcggcgctttgcaaaatagccgaaaaggacgaaaaggtttgcgccataaccgcggctatggcggcgggcacggggcttgccgaatttgcaggcagattcaaatctcggtttttcgatgtaggcattgccgaggaacacgccgttacctttgcggcggggcttgcaagcgcggggatgaagccatattttgcggtctattcctcattcctgcagcgcggctttgaccagataatacatgatgtcgcaataggcggctttcccgttcgcctgcttatagaccgtgcgggaatagtaggggaggacggcgagacccaccagggactttttgatgttgccttcttaacaggcgtccccgggatgacaatttattcacccacatattatgacgagcttgaaagggatatcgagctgtcggcagaaagggacgaaattgtcgctgtaagatacccgcgcggctgcgaaaaatcgggtgcgcccaaggaaattacgggcgattacacggtatttgaaggggtcggcgataaggcgatagtaacctacggcagaatttttcaaaatgctatagaggcgcagaaggcgctgcccgacataacggtcataaagctcaataaaatttacccgatttcggacagcttgataaatgatataggtaaatacaaggagctgcatttttttgaagagggaataaaaaacggcgggatagctgaactttgcgccgcaaaactgcttgaaaacggctacaaaggacagtataatatacatgcggtggataataaattcgtacctaccgccgcggtttcggcggcgctgaaaaacgcggggcttgataccgagagtatgataaacgctttaaagggggcttatgaatgaccgaaaaaacacggctggatatcgctctctttgaacgcggctttgccgaaagccgcgaaaaggcaaaggcacttataatggcgggaatagttttcgtcaacaaccaaaaatccgataaagcggggaatacagtaaagcctgatgatataatcgaggtcagaggggaaaccctaaaatatgtaagccgcggcggcttaaagcttgaaaaggctgtagcaagctttaatataagccttgaaggctgcgtttgcgcggatatcggcgcctccacaggcggctttaccgactgtatgctgcaaaacggcgcggcaaaggtttattctatagatgtcggctacggtcagcttgcatggaaattgcgaacggacgaaagagtggtaaatctcgaacgtaccaatttcagatatgtgactcgcgagcaggtgcccgatgagcttgattttgcttcggtcgatgtttcgtttatatcgctttatcacatttttccgacactgcgcactctcttaaaggagggcgggcgtgcggtatgccttattaaaccgcagtttgaggcggggcgcgaaaatgtcggcaaaaagggcgttgtaagggataaaacggtgcatatcgccgtgattgaaaaaattatcggcttgattgcggagaataatttttcgcttttggggcttgatttttccccgataaagggaccggaaggcaatattgaatatttatgctttatagaaaaggacgaaaaaagcgaaaatcgctgcgaggtgaatgccgcgcaggtggttgagttatcatataaagcattggagaggtgaaattatgaaggcggcggtgttgccgaatcttgataagcgcggggcatacgatgttgtactgaagctcggcgaaatactgaaaaatgaagaaatagaggcatatttgcccgagggaatgatttttgccggctttaagcagctgcccgaggacgagctgtacggaattgcagatattataattacgataggcggcgacggaacgataatccgttacgctaagcgcgccgcgctcgataacaagccggtgcttggcataaacgcaggccggatgggatatcttgcaaatatagagcagaacgagttgggtctgctgcgcaagctgaagcagaatgagtattttgtggaaaagcggatgatgctctctgttacggtgtttgagaacggcaggcggctcggcgaatacaacgcccttaacgacgcggtcataaccggcggctttatttcgaggataatcgatatttcggtgggcgtcggcggcgataatatcaattacagagcggacgggcttatcctttcgacccccacaggctcaaccgcctattccatgtctgcgggcgggccgataatagacccgctgacccaaagcatgtgcataacgcctatctgctcgcattcgctttcggcaaagccgatacttttgggcgcggataataccgtaaaggtcaaggcgtattcaaaaaagcgaaccgatatatatttgactgttgacggcagaaaggttgccgcggtgaagccgtatacagatattctgatacgccgctcaaagcagtatgcgaagctgataaggcttaacgacaggtcattttataaaacactttccggcaaattcaaagacggcaggagcatttaaaatgaagagtaaacggcaggaaaaaattttagagcttattaaagaaaaaatatttttaacgcaggaggagctgcagaacgcgctgatagaagcagggtatgatgttacgcagtcaaccgtttcgcgggatattaaaaagctgcgcattgtaaaggggcatgaccgcgacgggaattaccgctacatagccgcagagcaaaccgcgccgcgttcggataatcactaccgcgagctgttcgcgcattcggtgaaaagcgttgcctatgcgcttaataatgttgttgtgaagtgctatacgggaatggcttccaccgcctgcgtcgcggtggacgagctgttcggcgatatgatgctcggctctcttgcgggagacgatacgataataatcgttacctataacgagcatggtgcagagcagctgtcgcgtgagcttaaaaatctgcttgtgtagcggggaagaaaaatgcttaaatttctgcatatagaaaatatagctgtaatagagcgctcggatattgaattctcatcgggctttaatgtcctgacgggtgaaacgggcgcgggaaaatccatagtgattgattcgataaacgcagtgctcggcgagcgcacttcgagggaacttatccgcgcggggtgcgatactgcagaggtgtccgcggttttcggcgagcttgataacgcgaccgccgcggcgctgtcggatatcggcgttgtgccggatgacgacggcaatattgtaataaggcgtcggctttccgcagcgggtaaggggcttataaagctcaatgaccgccccgtaacggcgaccgagcttaaggaggtcggcaggcatcttgtaaatattcacggccaacatgataatcaggcgcttttagacccggaacggcatttggattatgttgacgcggtggcggacgacgaccccattaaaggtaaatattatgcggagttccgtgagataaacaaaatcagaaaagagcttgccgctgttcaaaccgatgaggatgaaaagcgccgcagggtcgacttgcttaaatacagcataaacgagcttgaatcggcgggaataaagcccggcgagtatgacaagcttcgcaggaagcttgaaatcgcaaggaattaccaaaaaaccgcagaagcgcttgcccgcgcttattccgaacttaagggcgacgatgagcttgacggcgcggtatcattgttaagcggcgcggaaaaagccctttcgtccctgcgggatgaggaatgggataagagggcttccgtactgtcgtctgcggcatcggctgcggaggatgtgagctcggctatttacgattttcttgaaaacgcggagtattcggatatagatcccgatgaaataaacgctcggcttgatacgcttgataagcttatgcttaaatacggaggcggagagtgggagctgctcaaagcgcttgataaggctcgcgaggagctaaatgacatcgagttttcggataaaaaggcggcagagctgtcagagctgcttgacagctccgtggagaggcttgtggctctcggcgaagagcttaccgaggtaagaaaaaaagccgcggcggcgtttgaaaagcaggtctgcgatattctttcttatcttaatatgccggatgtccgctttaccgtgcagttcgcaaagggcagatacaccaagcgcgggtgcgatactgcggaatttatgatttccgcgaaccgcggcgagagcgtaaagccgctttcaaaaatcgcctcgggcggcgagctttcccgagtgatgctggcaattaaaagcgtgctgctaggccgtgaccccgtgggcactatgatttttgatgaaattgatacgggaatcagcggttacaccgcaggaaaggtcggaacgcagctcaaaagggttgcggaaaacaggcaggtgatatgcgtaacgcatttggcgcagatagcggcaatgggggatacgcacctgcttattgaaaagaaggcggaaggggacagaacctttacaagcgtttcaccgctttcctatgaggaccgtatcaacgagattgcccgaatcatgtcgggcacacaaatgaccgaaaatttatataattcagcaaaagagctgttagacaggagtaaacaatcatgaaaatttatgatgaacttgtagcgcgcggacttattgcgcaggtaacggatgaggcggagatacgcgagcttatagataacggcagggcgaccttctacataggctttgaccctacggcggacagcctgcatgtgggtcactttatggcgctttgccttatgaagaggctgcagatggcgggaaaccgcccgatagcccttatcggcggcggcaccgggtatataggcgacccttcgggcagaaccgatatgcgctccatgatgacccccgagcagattcagcacaactgtgactgctttaaaaagcagatgagccgctttatagaattcggcgagggcaaggcgcaaatggtaaacaacgccgattggcttttaaagcttaactatattgatttgctgcgcgatgtcggcgcctgcttctctgttaataatatgctgcgcgccgaatgctacaagcagcgcatggaaaagggactcagcttccttgaattcaactatatgataatgcagagctatgacttctaccacctctttaaagagtacggctgcaacatgcagttcggcggcgacgatcagtggtcgaatatgctcggcggcagcgagcttatacgcaaaaagctcggtaaggacgcatacgccatgacaataaccctgctgcttaattccgagggtaagaaaatgggcaagaccgcttcgggggcagtttggctcgatcccgaaaagacctcaccctatgagttttaccagtattggcgcaatgttgccgacgctgatgttttaaagtgcatacgcatgctcaccttcctgccgcttgaggagatagataaaatggacgagtgggagggcagtcagctcaacaccgcaaaggaaattttggcttacgagcttacaaagcttgttcacggcgaggaggaggcggaaaaggcacaggctgcagcccgcgcaatatttgtcggcggcggctcgcatgccgatatgccgtccaccgatttgtccgatgaggatttcgccgacggcgagatcggtattttggctatgatggtaaagggcggccttgccgcctctaacggtgaggcaaggcgcttggttcagcagggcggcgtgagcataaacgatgaaaaaattaccgaccccaaatttgcacttaaaaagagcgcgtttgaaaatgaggtaatactcaaaaagggtaaaaaggtatttcataagtttaaatattaaacatcggccacctcataacggcatcaaaaatccgaagcctgttgttatctttcaggatatcaacaggcttcggttatttgttttccgattaaataatgtctaccgaataattgcattagcaaatgcaattatataaaatcgagttaaaatctcgattttatgggtcaaaacctttgttttgaccgtcagtatccattgattgtcgcctgatttta

SEQ ID NO: 3085 - DNA, 32759 bp, Unknown
  16S sequences of unknown bacteria
tcctgcctgatgggtgattcgacagcgcttgcctcagcaattgtgcggtgctgccttagaaattttcaaagttttttagtgaaatattttgctgatgcaaaatgtgaaataatgctaacgcattgtgaaatttgatgccagcatcaagtgaaatgaaataaatccacgcacgcccgcaggcatttcacacgccataggcgtatttcacgtgcgaagcacatttcacaaatccgcaaggatttatttcgttgaaaaaagacctttgtcaatcgacaaaggtcttttttggagcggacgacgaggctcgaactcgctacctccaccttggcaaggtggcgctctaccagatgagctacgtccgcatttcggatttcgtgtcacttgtttcgcaacgtgacttattataacggagatgatccgatttgtcaagtatatttttgaattttttccgacttttttcgtaaatgcttgcaatccgtgaaaaaactgctatactttatgcaatgattttcggcagcactgtgcgaatacggagctgctttctgttattttaaaaggagttatgtttatgtattgtaaaacctgccgtcaaccgctgcctcacgatgcccgccgctgcccaaactgcggcgcacctgttgaaaacaccgtttcgcaaagcggcgcacgggatttcaccgccgactacgacccgcgcgacattcaggagaatcgcggctggggcattctttcctatttcggctttttggtactcatccccattttcgctgcgcgcaactcgtattttgcgcgtttccatgcaaaccaggggcttgtgctgtttcttttctacgcgtgctattcggtgctgacgcgcatcatcacgaacatcttaaacctcgcgctcggctttataccgtttgtgccgggcatgatctccgccgcgctgcaatttatcggcatcatcttctttgtgctgatgatcctcggcatcgcaaacgccgcttccggcaaagtaaaggagctgccgttcatcggccgtattcgccttttgaaataactgtatatagcaaaattgccctgcgggattttctttcgcagggtatttttatacgtgaatttcgcaaaaccgttgcgcacaaagtcgatatatgctatactgcgtaaggaaaaattcagcgttcggcggattttgatcaagcggcaacgcgggggagcgcccgatttgccgtgccggactgctttcacatagcgatgggactccgtgtttcggattgagaggaagcaattgagcttcgaccgcccggcctgaatttacattcgggcgcgcttcgctatgtgcatttgtgcgcctcttttaaatatgggtcggaaacgcttatatttagagaggtacaaaaaatgaaaagagaacacattctgaaaatggtcatgcttgcaatgctcgtcgccatcggtgtcgttatttcgccgattttgcgcgtggagggcatgtgccccatggcgcatctcatcaacattgtctgctccgttttcctcggtccatggtattccctgctgtgcgccacgcttatcggcatcattcgtatgacgctgatgggcattccgccgcttgccttaaccggcgcggtgttcggcgcgtttctttccggcgtattttaccgtctttcgggcggcaagatcctttgcgcagtgctcggcgaagtgttcggcaccggcgtcatcggcgcgctggcttcttatccggtgatgacgtacatcgtcgggcgcgaggggttgacatgggctttttatattccgtcgttcatcggcggcacgctgatcggcggctccattgcgttcgtgttcctcatggcgctgcgccgcaacggactgcttgcaaaattccagcatgatttgggggcgaaggtctatgacaccacagctgcaaaacgcgctgctcaaagcgcgaaatgatctgcgcgagacggcgccgctcatccactgcatcacaaatccgattgcgatcaacgactgcgcgaacgggattctcgccgtgggcggaaagcctatcatggcggagcatcccgacgaggtagaggaaatcacgtgcatagcgggagcgctcggcgtaaacatcggcaacatcacagacgcgcgccgcacctccgttttgacgagtgccaaggcggcgaaaacggccggtgtgccgatctcttttgacgcggtgggcgtgacgtgcagcgccccgcgccgcgacctgacgcacacgctgctgcgcgaggcctgcccggaaattttgaagggcaacgacgcggaaattcgcgccattgcgggcgcgcattttgaaagtcgcggcatcgatgttttacggacaaacacggcggaaacgattgaaattgcaaaaatgctcgcctctaccctgcactgcgtggtgctcgtcaccggaaaaacggacattatcacaaacggcgaaacaactgagctgtgcgaaaacggcacaccacgcctgtcgctcgtcaccggcacgggctgcatggtacacgcgttgtgcgcgtcatacagcgccgtgacggatccgtttacggctgcggttttgtctgtttccaccatgggcatttgcggtgagctggccgaacggaaatccgaggggctcgggtcgttccgcatcgcgcttttggacgcgctttcgctgctttcggacgatgattacacgcgtttattacagctgcgcgaagtttaaaagaaggagtttttctatgaaattcgatcctaccttataccttgtgaccgacagcaccggccgcacggacgatgactttctttccatcctcgaaagggcactcacgggcggtgtgacgctggtgcaactgcgcgaaaaagagcgcggcggcggtgaatacctgcgccttgcgcgcctcacaaaagctgtttgcgaccgctaccgtgtgccgcttatcatcgacgaccgcgcggacatcgccatggcggcagacgcggcgggcgtacacgtaggccaaagtgatctgcccgtctgtgaagcgagaaagcttttaggtgaagataaaatcgtcggcgcaacggcaaaaaccgtggagcaggcgcagaaagcgtaccgtgaaggcgcggactacctcggcacgggcgcgatcttcccgacgaccacgaaggtgaaaaccgtgctgacgccggtttcgcgcctgaacgatgtctgccgcagcgtgccgatcccggtcgtggccatcggcggtttaaatgccgagaacatggatgttttgaatggcagtcccattgacggcatagcggtcgtttcggccatcatgaagagtgcagatcccgaagctgccgcgcgggagcttttcgcgcgcgtgcgggtgattaaagagaataaccgctgaaagtcatagaatgctacactttgtgctgatttcacaaactgaaacaacatttggcggtgaaatcttttccgaaatgacacacggtttttacgcgcggtttattgactctgcgttttaccggtagtatgataatggtagaagcaaaattccccataatttgcgtacaagccactttttataaatccacaccttaaacgaaaaaatcaccgagtttttcctcggtgattttttcgttataaagcgtcgacaaaaagatttttcgttctttttgccggcgctctctgtttattcttaaaaacttttacagcgtaaacgtatacgtgcccgcggtgagcgtcatttcttccgtggtaccgtcttttttcggcagatagacttccgcttcggcgtcaaacgggatgacgacggtgtacgtcacttcgccgttatcctcgtactgccagccggtttcatagtagcctgcggcggtattgaccctggcttttgccgcaccgagtcttacatcgggctgcgggcggatgacggcctttttataaccgggcacgtccggcacggggttcaggccgcagacgttcttatacacccactcgaacaccgcgccgtaagcgtagtggttcatggagttcatgccgatgccgctgatcttaccgtccggattgacggagttccagcgctcccagatcgtcgtggcacccatgttgacctcatacagccagccgggattttcctcgttcaaaagcagcgtataggcttctgcattcgcgccgttatcggagagcgcgcggcacagcacaggcgtgccgaggaagccggtcttcagcttgcctttattcatcgcgagcaggccgcgcagggtttcggtaatcttctcgcgcgcgaactccggcgcaagcccaaacgaaagcgaaatggcgttgccggtctgcgttgcggccgcgcatctgccgcccgccgtgtagaactcgcggcggatggcgtcgagaatttcgtctgcacgctttttgtagacgtcgtactcggtcgttttgccgagcgcacgtgcggcgttggcaacgcacatggtgctcttatagtagtaggcggagcacaggaacgtgatgtccgtgccgccgagaacagactcgggattgaagccggattccgggccgtccagtgcgagccaatcggcaaagtggaactcaatgcccggccacagacgcgttgcgccgtgcgcttcgtcgtagcggtagatccaatctgcccacagcttcatgctctcgaagccgttttcgagcacgctgatgtcgcccgttgcaatgtaggtttcccaagggacgatggctgcggcgtctgcccagccgcagtgaccgccgccgtttgcgagcattgggtttgcttcgcccggcttgcggctgatgagcagcggggcgacatccggcaccttgccgtcgaggcgcttctgttcctccaaaaggtctcggatatacttcgtatagaacgcgccgcaatccatgttgtagttcgccgtggggcagaacgcctgcgcgtcgcccgtccagcccatgcgctcgtcgcgctgcgggcagtcggtcggcacgtcgaggaagttatcgcgctggctccagacggagttcaagtacaggcggttgaccttctcgtttgcggtcgtgatctcgccggtctgctcgaggtcggaatacatggcccacgcctgaatatccgtgacgccggtgaggtctgccacgccggagaatttgatgtagcggaagccgtagaaggtcgcaatcggtcgaataaaggcttttttgcccgtcgaaatatagcggtattcggaaagcgcggtgcgcaggttatcgcggtagaagcagtcgtcctgcaacagctcgccggtctgcacgcgcagctcaacgcctgcgggcaggtcggccatgaacgtgaaccagcccgtaatgttctggccgaggtcgaatacaagctcgtttttcggcgttgtgatctgcttcggggtgatgatatgctttgcttttacgggcagcgagaggcgcgcggaaattgcgccgaggttcgtcgtggtgttgcgcttcaccggctgccaatttgcataggtgcaggacggcgcgcaccagttttcgatttcaaggttcgcatcgtagcgttcgccgtcgtagatgttgccgaacgtcagcgggttcggcgcgcactgccagctttcgtccgtgacgatgacggtctcgccctgcgtggtggtgacgtgcagctcaccgaaaagcaggtattcctctgtgtacatgttgcagggttttcccgggaaattcgtttcgtaatcgccaacgacgccgtcaaaaccaaagcggcctttcgcccagccgttgcccaaaatggcgccgatgacgttttcgccggtgtggatgaggtcggtcacgtcgtaggtctggtactgaatccagctgtcgtaggcggtgcagccggggacaagatactcatcgttcgccttttcgccgttcaaatagagctcgtagatgccgagacccgtgaagtatgcgcgggcagagagaacttcgccggtgatctcaaacgcgcggcgcatgtacggggcggtgtccggcgcaaggcacggagaaatacgctgtgccgtgaacggctcgccgagctttgcggtctcgaaccacgcagtgtcgcttgtgaccaattcaccgttatcgcccataacggtaacgcgccagaagtagcgtgtgcggggctcgagggcgatttccaccggtgcaccgagggacgacgcggttttgcacgcgccggtatcaaagataacgtcggcaaaatcctccgttttggaaacctccacgcgcgcccaaagctgctttttcgcttcggtatccgtgactgtccacgagacgtgcggcgttttcagatcaaaaccgagcgggttgacgatacggtttgttttcattctctgaattttcatgttccgttcctttctgtgcgtttgcacgtgcggctttttcctttgccgcttcgtattccggccgcgtaaagctgcggcattttgttctatttcacagaatatcagatatgaagatgaaaaacaaggactcaatttccgcaaaaatacgtctttattttcagtaattgcatgcgaagatgttgaactaagccgttttcaaaagttcttataggttagccgcgactttagcttgacacaagtccatatttgtggtttaataagcaaacatgattatcggtgccgcaaagcgacactgcgataagggagtagtcggcgcgaagcgctgtatggtcgacacacttgaggaaactcacggctatacatgaaatgacgagacttatccgaaaggcatctccggcttttcgggtgagtcttttttattgcccgcgcacgtatatttttataacaaaacaacggaaaacggtgattaaaatgagcttatgggaactcttaattctggcagtcggtctttcaatggacgcatttgcggtttcggtatgtaaggggctttcggtgaaaaagctgaaagcgaagcacatgctgactgtgggtgcctattttggcggatttcaggcactgatgcctcttttagggtacattttgggtatacagttccagtcaatgattcagcagttcgaccactggattgcgtttgtgctgctggtgctgatcggcctgagcatgataaaggaatcgcgcgaggaagcggagaacctcaacgattcgttcagctttaagacgatgctgccgctcgcggtggcgacgagcatcgacgcgctggcggtgggcgtaacgttcgcgtttttgcaggtcaaaatcgtaccggccatcagctttatcggcgcaacgacgttcattctttcggcgatcggtattcgcatcggcaacattttcggcgcgaagtataaatcgaaagcagagcttgtcggcggcatcgtgctgattttgatgggtgtgaaaattttgttagagcacctcggcgtaccggatatgattttcggttaagaaccggaaacaagaaagcgccccgcttccttttattgaaagcggggcgctgttttgttttaatttacgaactaaagtaacccgttaaattacttctgtgcgtcgtagtaatcctgatatgcggtgtagccctggagctcgatgttcgctgcacgcttatcggtgtagatcttctcaatgtcatgaacctgattggactcagcaaagtctttcagatcctgaacgagcttatcgaacgttgcgtcgtcggaagccatgatgatctgcgggatacgcatcttgcactcatcggcgatagcctgtcttgccataccgaggtcttcggtcggatcgatctcaagagagaggttggcgttttcgtcggtcaggaacttctggccggggactgccggatggatggaatcttccggagtgaagacgtgagcctgaatggagataacccagcttctggattcttccggctgtgcatcgttaactgcatacttcgtcaagtcaacgttatcggcgtgagccggctgagcccagaaccagcaacctgctgcgttcttttcgtcagagctaagctcttcttccggcttcttgaggatcgggttgccgttttcgtccttgccttcccagaggccgccctcaggaccgtacatcatgttgatggagccgtccttcgtgagcatccaagaatagaggtcgaagatacgctgcgggttttcagcctttgtggtgatgcagttgacgttgctaccaggcgtgccgttttcttcgccatatacccaatctacgccttcagccggcgggaagatcggagaatccttaagctcccaaccgaggagatcgtaggtgttgccgtctttctcctgaaggagggtacggaagtggttggtatcgtcctgagagaagtcatagtacagaaccgctccacggccgttggagagcttctctacgtactgatcgttgctgtcggtataaatggtttccgggaagaggccttctctaaaccactggttagcaatcttcagagcggagacgtagttgtcgtcaaagacagcaagcttaatgtcgttatccgcctgagaccagtatgtatcaacaaggttcgggttgccgtaggaacgatagatagcggaaacggtgttgaagccgttatcgtcctgtctcgggagccacgggaagatgctctggccatcggaggtcttaacgcccttgtccttagcatccagcatgaactggtgcaggtcttcgagcgtcttgagctccggagaaccgagctgctcataaacgtcgtggttgaccatccagctcgcgttaccgccggtagcgcccttacgagcccagttcgggataccatagagaccgccgttaacggacagcagcttctgggaggattcgaggatgtcctcatcaaaggagcagccttcatacctcaaggtgttgatatcgacgagcttgccgaggctgatgagcttctgccagttcgcgttacgatccatgatgataacatccggcaggtcgtcggaggagatcatcaggttcagtctggaatccgcgtcagcttccgggcaggaatagttgaccgtgatgttgaacttttcgttcatgtacttcgatgcagcgtcttcgccccagggcttaacggaaccctgatagctgtaatatgcatcaaattcgtagtgctcggtggtgtcgtccgggccggaggaaccggttacctcggagcttgcgtcaccgccgtctgtggattccgctgcggaagattccgttttggaagatgtgctgctttcagccgtggaagagtttccgccgccgccgcagccggctactgtcagaatcatggatgctgccatgactgctgccagagccttcaagagagagtttctggacttcatactttgcctccttaaagaatgcttcgtcaatacaccttgcattgacaatttattttatgattagcccttaacggagccgatcataatgccttttacgaagtagcgctgcaggaacgggtaaacgatgatgatcggaatgatcgtaacaaacatcgtagccattgtgatggagcgcacgttggtctccttgcccttcaacatgttggcgtcgatggtgacgcccatgcctgcagaggccatctgttctgcgaacttcgcttcgttgacgattccgagaaggacgttctgcatcggcttcaggtaatcctgtgtaatgtacaggtttgcctggaaccagtcgttccaatgctgcacaccgaagtacagggcgatcgtcgcgataatcggtgtggagagcgggaagtaaattttaaagaagatggttatgtagtttgcgccgtcgatgagggcggattcttcaagcgcttccggcagagactggaagtagctgcgcatgagaatcatgttccacaggttgacgagtgccgggatgatgtacacgaggaagttgttcttgagaccgagattgaggatcaagaagtaggtcggcatgaggccgccgccgaagtacatcgggataagacacagcattgcgtaaacttttttgcctacgagattcgttctggaaattgcgaatgccagcataccggtaatgagcacgccgccgaccgtaccgatgacggtacgtgcgatggtgatgaagtacgccatccagatcttctggtttgtgaaaaccagctcgtagtttctccacgtaaacttacgcggatagatggtcaaaccaccaagggtggtatcgttggagtcgttcaaggaaatcgcaagggcattcaggaacgggtacagcgtaaggacaagaaccagaacgatggtgacgatcatgatgatatcgatcacgtagtcgctggccacgcgcttggcgcggattttgtttggattttttgccatctctctgttccccccttagaaaagctgtgcttcgccgaatttacctgctacgtagttggaaccaaggagcagtgcgaagttgacgatagacttaaagagaccggccgctgctgcgaaggagaaacgaccctggctgacacccaaacgataaatgaaggtatcgagcacgtctgcgtattctttcaacatggagttgcccatctgcttggtgagcatcatgatctggtcgaagtttgcattcaggatgccgccgacctggaagataaacatcaggatgatggtcggtttgatggacttaattgtgatatgccacatcttctgtgcgcgtgttgcgccgtcgatatcagccgcttcatacatatcctggctgatgctcgtgatagcggagatgaagataatcgcgttccaaccgagttccttccagatatccgtgaacaacgtgatgccccagaagtacttgccttcggtgaagaagccgatcggttccttcgtgaagccgatccacatgaggaactcattgatggcgcctccatcggtggacatgaggtcaaacatcaacgttgcacatacaacccaagagatgaagtgcggcaggtagctgacggtctgaaccgtttttttcagcggctggaagttcatttcgttcagcagcactgcgaagaaaatcggcagcgggaagccaatgaacatcttaagggcgctgatgaccagcgtgttgcgcatggccagtccgaagtacttatcggcgaacatggtctggaagtgtttgaagcctacccactggctgaagcccgggaaatcaccgagctggaaatcctggaagcccataaccacgccgtacatcggtacgtagctgaacaggaggactaagaggatgccgggaactaacaatatctgcagatcccactgggcaagcattctggaaaagacgttctttttgcgtaagaccgtatttccactcgcttgtgcttgtttcaatctcatcacgctccatttccacaaaagatggaaaattttttacaaaaagcagaactcaaagcctgcttaaagccaaaatttttttgaaacccgactgccttttgcagttttacggttttctcatcgaaagccctgaacgatgttcggatggtttccaaatttgtctaaatatccgtaacaacctcttcaggaattgttcatattatacacacgcatctgtaacaattcaaggacaaattgcgcaaagcatattgacaaattatgcaaaccgtgtacaatataggtataaaaagtaaattttgtggtgaagttggtgggcatatgtcacaaagtactatcttagacacacaaaaatgcgagcatgaaaccgcatccattttgaacaattttactatagccttcggaaaggtgcattggggcttcccggatttcgaaaacttggatgaattgttcgaaaatcaacagtttgttttgatgctctgtgtcaaagcttcgtctgaaaaaagcgatttatatttgaataacaacatttttaatgtaattaccggaggggtaatttgtgtgcgccgcagcgataaaatcctttggaatcactgctgctgcgacaacatgcagattctctggcttccctttacaatgaaatgcgtttccgactgttcctgcgaaggcgccgatgttttaaatgactttttgtgcggaaagctgagctctgtcggttataatacacagctgattgattacagcgactttctcagaaagcgcgtttgcagctatgccaagtgctgcctgaaccaagttctttccggatttatactggactgcatttttacccttaagcaaaattacgacggcctcaccaacaaggacaaaatcacccaatacctgctcgaccacgcaacggagaagatcagcgtgccggaacttgcgaaaaagctttcgatttccgaacgcgcactgttctattattttcaagataacttcggttccaccccgagcaattacattaaccgtatacgcatgaacgccgccgcagagcacatccaccgcgggttatccgtgaaagaagtgaccgaaatgtaccacttttcggaatcgtctgcgttctgccggttatttaagaagtacttcggcatcacgccgacggaataccggcagctggcagagaaatcgcagctgaaaatcgtctcgcgggacgagctgaaggattaaccgtatatctttcacgcgatccatagataacaaaacaccgcccgttcggaaaagctccgagcggacggtgttctttatcttatattatattgtattcgatcagtcaatgaccttgttgtcgcgatccggaacaatcttttcaaggaactgctctacggtcatggcgccgaggtcgccctctttgcgcttacggatagagatggtgttgttttcgatgtccttatcgccgacaacaaccatgtacggcaccttttcgagctgtgcttcgcgaatcttgtagccaatcttttcgctgcggtcgtcgacctcgcagcggaagcccttgtcttccaactgcttcttgacttcatagagatagtcgaggtggcggtctgcgatgggcagcagcttcacctgtaccggggcgagccacagcgggaacgcgcctgcgtacttttcgatgagcaacgcgagggtacgctcgtagcagccgatggaggtacggtgaatgatgcacggggtcttctgcttgccgtccttatcggtgtagaccatgccgaactgctcggcaagcatctggtcaatctgaatggtgataagcgtatcttccttgccgtacacgttcttaatctggatatcgagcttcgggccgtagaacgcagcttcgccgatgccgatctcgtacggaatctcgaggtggttgaggatgcgctccatgaggccctgtgcctcgttccactgctcttccgtaccgatatactttgcacggtcattcgggtcccattgcgagaagcggtaggaaacgtcctcatacagaccgagtgtcttcagcatgaagattgcaagctccaggcactttctgaactcgtcttccagctgctccggtgtgcacatgaggtggccttcggaaatggtgaactggcgcacacggatcaggccgtgcatctcgccgcttgcttcattacggaacagtgtggaggtctcgttgtagcgcagcggcaggtcgcggtaggaacgcttgcggtttaaataagcctgatactggaacgggcaggtcatcgggcgcagggcgaagacttccttgtccttctcctcgtcgccgagcacgaacatgccatccttataatgatcccagtgaccggagatcttgtacaggtcgctctttgccatgaacggggtctttgtcagcagccagccgcggcgctgctcctcgtcctcgacgaagcgctgcagaagctgaacgatgcgtgcgcccttcggcagcaggatcggcaagccctgaccgataacgtcgcttgtggtgaaaagctccagctcacggccgagcttgttgtggtcgcgcttcttggcttcctccagcatggtgaggtgctcttccagcaagctctgcttcgggaacgcgatgccgtagagacgctgcagcatcttgttgtttgcatcgccgcgccagtatgcgcctgtgatggaggtgagctttacagccttgacattgccggtgcgcatgaggtgcgggcctgcgcagaggtccgtgaaatcgccctgcttatagaaggagatgtgctcgccctcggcagcgtgctcacggatgagctcctctttatagtcctgacccttcatgagctccagtgcttccgcgaccggcagctcgaagcgttcgatctcgatgtcttccttgatgatcttcttcatctcggcttcgatctttgcgaggtcgtcgttggtgatggcctgcggcagctccatatcataatagaagccgttatccacagccgggccgatggcgaactttgtgcccgggtacaggcggtttaccgcctgcgccatgatgtgggacgcggtgtgccaatatgcctttttgccctctttatcgtcaaacgtcaaaatctctaccttgcaatcttcgttgagcacggtgcgcaggtcgcacacctcgccgttcacttttgcggcacatgcggacttataaagacccatgccgatgctttttgcgacttccgctacggaaacgccgctttcaaattccttttcgctgcccttcaggtcaaccttgatcatgattctcaatcctttcctaattctctgataaaataaaaagccccgggatccctcaccgggatctcggggcgacactgcgcggttccacccgagttcctgcgtgttaaaacacacttgtgttaacacacagctcgttcttctgccttaacgcggcggcaacgtccgccttttcggtaaaccgttcggcggcggctcaaaggtggtatttcggtttcgctttccgcggtgctttcagccggtggcaaccgctctcttttgaaaagacctgaacccgaacttccttatcaaagcccttttcttgtccccatactatcaccgtttttctgaaatgtcaacacccaagaaaagagtttttcacataaattcttcattgtctattatcgtagacagtaaaatgtctatttacgcatacaatttgcgtagaggtgatacacttgctttgggaaaataatattgtggggcaaacaatacggtctgtgcgcaaagcaaaaggcatgtcgcaagaggttttaagcggctttgcgggcatcgcgcgcacgcatttgacgatgatcgagtgcgggacaaagcaggcgaatttctcgacgatatgcaagattgcggaagcgtttgatatgcgccccagcgagcttgtccgcaaaatggaagaagcggaagaaaagcgggataaatagacccgcagaaaaaatttttcttcttaaaaacaaaaaaatcggcttatatactggactcttgtataaaacagaaagaaaccgtaactatttcttaaattctttggttgacatatgcaaggaaaagagataaaattgtacatggagtgttttacactttttaagtcagccgtgttccgagcagtttatgcggctgctttttgtgtggagccttcacagggaataacgcaccctgcataacctaatttagtaattgaatatcgaaaaccttagcgaaggaggtgcccaatgccacaagtaccaatttggggttgtgttctgatcgtactggcagtcgccgctttgtgcggcgctctcgctttctttgcgggtgtgaatcatcgaaaaagagaagcggaagctgccatcggttcggcagaagacgaagccaagcggatcatcagcaacgcgattaaaacggctgccgcaaagaaaaaggaagccgtgctcgagggcaaggacgaaattcaccgtctgcgcaacgagtccgaacgcgagatgaatgaccgcagaaaagaaattcagcgtcaggagcgccgcgtttcccagaaggaagaatctttggataaaaagatggaaaatctggaatccaaagaaaacgcggtcgaaaataagatgcgcaaggcggaggaacgcctgaaagaggcagaatccgttaagaaaagtcagatcgacatgttggagaggatctcttcctttaccgtggaccaggcaaaagagtatttgctcaagttacttgaggatgatcttgtgcatgaaaaggccattaaagtaatggagtacgaacagcagacgaaggaagaatgcgacaagctggcaagagagatcatttcggtcgccattcagcgctgcgcggcggatcacgtatccgaagccgccatcagcgtcgttccgctgcccaacgatgaaatgaagggcagaatcatcggccgcgaaggccgtaacatccgcgccattgaacagcttaccggcgtggatctcatcatcgatgacacacctgaagccattacgctttcgagctttgagcccgtaagacgtgaagtggcaagaatcgcccttgaaaagctgatctcggatggcagaatccacccgaccagaattgaggagacgattgagaaagcccgccgcgaagtggatgcgaccattaaagccgagggcgaacgcgccgtgcttgctgccggcgtaaacggcattcaccatgagcttgttaagctgcttggtcggctgcgttaccgcaccagctatggacagaatgtcctcaaccactctctggaagtttcttaccttgccggtatgatggcttccgaactgggccttgaccccaccattgcaagaagagcaggtttgctgcatgatatcggcaaagcgctcgaccacgagattgaaggctcccatgtggagatcggcgtggatgttgcaagaaagtacaaggaaagcgaagccgttatccacgcaattgccgcacaccacggcgacattgaagcgaaaacggtcattgcctgcctggtgcaggcagccgatgccatctcggcagcacgccccggcgcgcgccgcgagaacatcgaaaactatatcaaacgtctcgaaaagctcgaggccgtggctgcatcgtttgacggtgtggatcgctgctacgccattcaggccggccgcgagatccgcgtcatggtaaagcccgaagtgatcaacgatgagaaaatgacgctgctcgcccgcgacatctgcaagaagatcgaggaagacctcgaatatccgggtcagattaaggtcaacatgatccgtgaaagcagagcggtcgatttcgcgaaataacatagttcgtcacaacgctcaaccgaatcacaagcaaagccctccgggaggaatctcggagggcttttgttatgtaaaaccgcgcgtcggtggattctcccccgcctcggcacgcgattttgctgtaaaaaaagcaacacctcttaccctgccgacaagatcaagtataaatacccggattttcggtgctacggtcaaaaggtgttgctttgcaaaatacaattttaattatgtactgaaattcgtgttagctttgacaaacggatcacacaaaacatgtgtaaaaagttcacattttgtcgattaagacgcattgtccatctgcaaacacagtttatcggaaatcatggcgatgaactcgctgttcgtgggcttgccccgcgtattgtgaatggtgtaaccgaaatacgaattcaacacatccacatcaccgcgatcccaagcgacttcgatcgcatggcgaatggcgcgttccacacgggagctcgtggtctcgtactgctttgccacactcggatatagctgttttgtcaccgcgttgataatctccgggtcttcgatggccatgatgatggaatcccgaagatagtggtatcccttaatgtgggccggcacgccaatctgatgcaggatctccgtgacctgaatgcgcaggtcgctgcggctggtgccgtttgacggatgctgtgccgcaccggccaacgtaaagatacggtcgatgatctcggttttgctgaacggctggatggcgtaataatctgcgccggcctccatgatctgccgctccaaagtgtttgaggaatacgctgccgtgatgatgaacaccggctttggcagtccctcggctttcacagcgtgcataacgcccagcgcatccacgcccgccataaagagatccattacaaccacatccggtttttcatcccgtattttggtcagtagcgctgttccgttcctggttacggtcacaacctgtgcaccccgcgaagccaatgcgtcggtgttttcacggctccattcgccgtcatccgcacaaatgatgacctttatttgcttttccatggcttacctcctgcgtgatttaaattgtgaacaaattttaccatatcatacacgctatttcaagagggtaaatgaaatttctttaatttatttgtcttctaacaaaaatatgcttcttgattttgttagctttcatcgcgctttcggttgatacacttcttatttcgacaaaaatcagcagataataagatatttttattacagtcaatatctcggcgagtttcttaccaaaaagatgtatgaaacagaacgaaaaccgattctgtaagattgtgtcataccttctgtgagaaatatggcaatgcggcgcgaaaaagggacgcgtgtgccgcagcccaccgtccccctcgtcttaattttcgttcaggttttcgagcatcgtttcggcaaaaatgccatagccgcgtgtcgcatcatctacgaaaacgtgcgtcaccgcaccgaccagcttaccctcctgcaaaatggggcaaccgctcatgccctgcacaatgccgccggtacgtgcaagcagctccgggtcggtcacgtgcagcacaagggtacgtgtttcctgcttgccgtctgtgctgacgcgctcaagctccgcatcaaacagccgcataccctcatcgtcgatcgtggcggcgatctgtacggcacctgtatgcacatttccgcgcggcagcacctctacggtctcgccctcgtgcggtgcagagagtttgccgtaaagcccaagctccgtgttctgcgtcagcgtgccaaggctcttgccgcccgtaaaatacccgcgcaggcggcccggccgaccgctgctgccgcgctcgatgccgcagacggaaacggcagccggctcgccgctgcggatctccaaaacattgcgcgtgtcggcatcgcaaatgccgtggccgagcgcgccgaacgctttgccgtcttcggtgtaaaacgtcacagtgccgatgcccgcagcgctgtcccgcacccacatgcccgctttgtacgagccctcgcacaaaacggaagtaacctgcgccgtgaacgtttccgtgccgcgccgcagcgtgagcgtgttcgtttcgttttcggaaagcacagcggaaagcgcagcgttcgtctctacgttattgccgtttacggaaaggatataatcgccgggctgaatgccggcttcgcttgcagggcattttaagccaccgtctgcataaatttccgaaagtgcggcaacaataacgccgtccgaaaaaagttttatgccgaaaacatcgccgccaagctgcacggtgcgcaccgtttctgtctttgccgtgatatgggaagcggaaacggcgtgcgccgttgcgttttccggcagcggcaggccgatgagcccgcacacggaaagcatcagtaaagccgctgtgcccacgcttgccgcaaatgtgcggatgctctcaaaaagcgagatgtcgcgtcgttttggggcgtgcggttgcggttcattttcaaaattcaagtcttctcatctccttgcagaaaaattcagaaagctcaaacgagccttctgtttttacttttccacgcggagagaaaagtatttgcggcaattaaaaacacctttgcacaacgaaggaaatcgttacgcaaaggcgatcgtttttggtctgccgcactgccgggctcgcagcacccggcagaggacagtagggtaaaaaataggggtaatatcggaagaaacgaactgtttccgattttcggctccgcgtaaacgctgtggggaagcagcgcccggctatcgacccggtgcggaacgttttaaagaaatgaaggaagtaaaaaatgaagaagtttgtaactcattcggctctctcttgttcctcctgagtacattacgtagtatagaggaagaatatgaaaacgaaattgatatttcgtgaaaaaaggaggaagtttttttgaaaaacatgtgaacaaaaaaggccgcatactccacaaattttgattgactttcggcggaaaagctgttatactttggatagtgtaataaacaatgtcaatgtctcacaggttttctttgtaagtcattctttgggtggtttacaggacctgtgtttttttgtatggcgtttacgaacacaatctttatttttatatggaggtaccacaatgaacaacggtacagtcaaatggtttaacgcagaaaagggctacggcttcatttccaacgatgagggcggcgaggacgtattcgtacatttctccgcaattcagggcgacggcttcaagacgctgaacgaaggccagaaggtcacctttgagaccgagaccgacccgaagaacggcaagctccgcgcagcaaatgtcgtaaagctctaattgtaaattagaacagcgagataaaaggcacctgtgattgatttcaccggtgcttttttcttttgcataagcttcgcttttcggcgcacaatactgtgggaaggaagggatgccaaatgcaaaagaaaaacgaaaagaagttcacccacggcgagcatgtgacgatttaccctgatacgccggagagcgtcgcaagcgccacggagtgcaccggcctcatgcccacgccgccgcaaaacgacgcggagtttacgtcgtaccaagacctgcacagcatggagattcccaaaaagctccccggcaagcggaacttcgagcttggcgtgtacgacgataagccggaagatattcagttataaaaagtcagcctcatcggtcggattcggcgcgatgaggctggttactttttagctttatattcgcttgttttactcttccagctgtgcggtataaagctggtagtagtggcccttctgttccatgagctcgtcgtggctgccgctttcggcaatgcccttattcgagatgtacaggatgcggtcacaatttttgatggtggacaggcggtgcgcgatgatgaagcttgttctgccctttaaaagtgcctgcaagccttcctgcaaaaggcgctcggtcttcgcatcaatggaggacgtagcttcgtccagcacgagaatcttcgggtcggaaagcagcgttcttgcaaacgcaataagctgcttttggccctgcgagaggcgcgagccgcgctcgtttacctgcgtatagtagccatccggcatttcgctgatgaactcatgcgcacgcacggtctttgcagcggcgatgatctcctcatccgtggcgtccaagcgaccgtagcggatgttatccatgatggtgccggagaaaatgaagctgtcctgcagcatgatgcccatttgcgcgcgcagcgagtgcagcgttaccttggaaatgtcgtgcccgtcgacgagcacccggccggaattgatgttgtagaaacgcgagatgaggttgacgaccgtcgttttgccggcacccgtgggaccgacaagcgcgatggactcgcccgctttcacatcgagattgaagtgctccagaacgttgatggagccgtcgtaggagaatgtcacgtcgtcgaacgtcacgtcgcccttaatcggcggcagctccgttgcgtccggcgcgtcatcgacaagcacgggctcatcgatcatctcgaagatacgctccagatacgccacggcgttgatgaacgtattgtagaggttggaaagctgcaaaatcggctgccagaagcgccacgcatacgcggaaatggcgataagcgtaccgatttgcacggcgggacccaaaagcgagaagcccacaaggtacatagcgccaacgacccatgtggagatgttgttgacggaaaaccacacgaggttcgaggtatactgcgccttcatccagcttttgtacattttggtgttaagcttgttgtagatcttcgcattttcctcttcacgcgtgaacgcctgcgtgatcttcataccgtcaaggctctcgtgcaggtaggcgttgaggttagagctcttattggagacatcctgccaagcgcggcgctgtgcgggcttgatgacgagcacgatgatgaggaacagcggaatgcccgccatgacgacgagcgagagtctgacatcacacatgaacatgaacacggcgatgagaatgaggttgaaaatttcgagaatgaaattgatgatgccgttggagagcgcatcggaaacagagttcacgtagttgatgacacgcgtcagaattttgccgtgcgggcggtcgtcgtagaactggaacgaaagccgctgcaaatgctcaaagagatccttgcggatatcgtagatgatggcctgccccaccaccgtcatgtagcgtgagcgcttgacggaaaagaaaatggaaagcagaatggataagagcatgatgcctgccagaatgaacagcattttataatcgcggttcggcacggcgacgttcagggcggtctcgatgagcttaggacctacaagcgcacacgcggcggaaatggcggagaaaacgagcgataagatcattttctgtttgtgccgcttgatatacacgcctgcacgcagcaagtgtttgatattaaatggggtttccagcgtttcgtcaacgtcaaaacgatttcttgccattacgcagcaccccctttcttttcaccggcaatgccgttttgcagctcataaacctcgcggtaatagcccgggcgggaaatgagctcctcgtgcgtgccgacatccacaacgcggcccttatcaaggatcacgatgcggtctgcgcgcttcgtggtggaaatacgctgcgcgacaatgatcttcgtacagtcgaaatcaaggtgcgcaagctggtcttgaatatatttttcggtctccatatccacggcggaggtggtgtcgtccagaatgagaatagacggcttaatggcgagggcacgcgccagcgcgatacgctgcttctgaccgccggaaaggccggtaccgcgctcgccgatgaccgtatcaaagccttcgggcagcttatcaacgaaatcgacgcaggcgatctttgcgaagcgcttcacatcgtcctcggacatttcggggtcgccgtaggcaatgttgccgtctacggtatcggagaacaggaacacgtcctgcgtggcgatgccgacggagccgcgcagctttttgagatcatacataccgacaggcgtgccgtccacggagacggtaccgccggatacatccgaaaagcgcgggatgaggctgataagcgacgttttgccgcagccggttggtcccatgatggcgatggtctcgccgggtttgatgtcaagattgatgtcgtgcagaatctctgtgccgttgcgctttaaggttacgtggtcaaacttcacggcgccctgcacgcggccttccttcttcacggcatcctggcgcgtgacgatggtggagcgcgcgtagtagagctcgacaatcttcgatgcagaggcaaagaaacgctgcaggtcgttgatgagcatgccgagcgtgctcatcgggttcgtcagcgtccagcacagcgagttaaagagtgcaaacgtgccaattgaaatgcggcccatgatgaggaacgagccgccgacgagcagaacggcgatggaaagcgactgcgaaaaaccgtcgatatacggcgagaatttgaaccacagcagcgacgctttgaggttcgctttgcggtaatcctcgtttttcttatcaaactgctcgatctcgtagtcttcgcgagcaaaggctttaacgacacggttgccggcgatgttctcctgcgcggcggtgttcatgcgcgaaaggcgctcgcgcaggtcgacatacagcggatgcacctgctttgcgaaaaccttcgtcaggatgaaaataatcggcgttacggccagcatggcaagcgcgaacagccagtccacacaaaggaatgtgatggatgtggtgagaaacagcaccacgcagtcgatgatcatgcggatgacatagcacgtagtgtggcgcaccatgtcaaggtcgccggtcaggcgggtcatcagatcgccggtgcggttctttgagaaaaatgagctatcctgcgcctgcatgtttgcgtacagatcgcggcgcagcttaaagagcagcttctgcgagcacgtctcgtacgtcatgaccgaaagatagttaaagcacattctaaacatcgtgaaaccgatcagaatggagacgagcacaacgagccgatgccaaagctccggcgtagtgccctgcccctcttttaccggcgtaaatacggtgtccatgatctgcgcggtcaaaaccgagttgaccagcgccatcatagaaagaaccgcggtagagcacagcgcgaaaacatatcgctttcggcagccttccaggtttttccaaacccatttcagctgaaacatagcgttccctttcctttcaatgcatatcctgctttctttgtacccttggtacagttgtacctttggtacagtccgcaccgtacgtgcggtttcctcctcaggcgcatggaatatttacacagaaacacttcatacgcttgtttaaactattataactgtattctgttaaaatggaaccctttttcgcgattttctctccgtgagaacaaacaaactttggttgagatttttaggcaataaaacaaccccgcaaatcggacttttcatccgtttgcggggcatgctctatatgcttttattatatatagtatacgtacttttgtaatttagatttcaaagaccgtgtaggcgtaatcggcttcttcgccgggctgcaaagtgcgcatgccgtgcttcttttcaaacacgtcgtcctcctgtacggcggtggcgcagccggtccacggctccagcgcaacatacgggccgtcgtttgcggcagaccagataccgagcatcgggaagccggaaaactccatcatcacaccgcggccggactggcggcttttgagcgaaacacaggtggagttgaggttctcgaacacgagcgcgtccctatagaacaggctgtgctgcagcgggatggtatccgtatcgtcaagctcgaagttcgtcttctcaaaatcgatcaggcagctttccatatcgagcgtcgggcatttctgctcttccttttcctcgaacacgatgtcgtaatcttcaaaaacttcatcggactgaatcgggatattaaagcccgggtgaccgccgatgcagaacggcatgggcttcgtatcggcatttttaacggtaaatttcgtcgtgatgctgctgccggtgaggtaataggagaccgtcagcacaaaatcgaacgggtactgctttttcgtctcctcgttcgccgtaagctgcagggtaacgtagtcctctccctgctctgtgacggtgaattcctcgtggcgcgcgacgccgtggcgcttcatctcgtaccactcgccgttgatgcatgtgcggttatcgcgcagcgcgccgacgataggaaacaaaaccggcgcgtggccgccccaatatgttttatcgccctgccaaatgtgctcaaagccgtcatcgcccataaaggagacaagctcggcgccaagcgtatcaatggcagcagtttcgttttcgttttttatatggatcagcataattcgtcctttcaaatcgcggcgcttttgcgccctgtctttttgcatgcacataacctgattttcaatcaacagtattataacaaacaaaaccgcttgaagcaagagcgaaagcctgctataattgagaaaacaccgaagaaatctcccgttttatcggtcaaaatccaccaaccggaaaggaatttacaatatgagagcagttattcagcgtataaacggtgcagagatcaccataaacggcggcgagacccgcaaagtcggcgagggcctcgttgtcttcatctgcgccatggagggtgacacggacgcgcaggcggattttctcgtgcagaaggtgtgcggcttgcgcgtatttaaggacgaaaacgacaagatgaaccgctcactcgaagacatcaagggcgatatgctcattgtctcgaacatcacgctgagcgccgatatgaagcacggccgccgcccggatttcagccgttccgcttccccgagtgaagctttgagattatataactactttgtggaacaggtgaaaaaccagcctatcggcaaagtatgcacgggtgaattcggcgcgcacatgcacgtaagtgtggaaaacgacggccccgtgaacatcatcatcgacacggaacgcatcggaaagtgacggtgtgcctatgacgcgatttttaacgctgtttgacacggctgtcaccgacccgcttgaggacattcccaccgtgaacgagcttgaaaaatggctgaaaaacgtcggcgaacaggcgttttactttctcattcgcttagccgccgccgggttgcttttgtttatcggcagcaagctcatcaaatttttgatgaaccgcttcaagcgctcgaaactatatcaaaaaatggacccggggctcgcttcgttcatggcaagcggcagccgcatcgtgctgtatatcatcctcattttgatgtgcttcggcgttcttggcatcgagaccgcctcgttcctcgcactgttcacctcgggcggcgttgccatcggccttgcgtttcagggcgccgtgacgaaccttgcgggcggcgtgatgattttgctttttcacccgttccgcgtgggcgattacattgaaacgacggaaattgccggcacggtgaacgccatcagcgttttatacaccgtggtgctgacaccggacaacaagcgcgtgaccgtgccgaacggctcgctgacgaacgccgccatcacgaattacagcgcggagggacagcgccgtgtggagctgacattctccgtctcctacgattgtgacatcgacaaggtgaagcaaattttgctttccgttgccgaaagcgacccgaaatcgctgaaagaccccgccccgctggcgcgcctgaaaacgcaaagcgcgagctcgctcgatttcgtcctgcgcgtttggtgcgccccggagaattactgggacctctattttgacctcaacgaaaacgtgaaaaaggcgctggatgaagccggcatggaaattccgttcccgcagatggatgtgcacatgcggtaaagcacgcacgaaaatacgaatattcccgcagcagcgccgtgaaacttccgttttcggcgctgaaattttcgtggacttttagcagaacccccaaaggaagatttatccggtcttccttcgggggttctggatcttattctcatacttttgaaattgaatattctcttataactaaatcggtatataaatgtataatcgaaggacgatattgattcatctattcaacattttttcattctgttaaaactaaatcgaaaagaggagaaggatcaaatccctctcctcttcttttttagttattcagcggggtaaaaagcatcttttccgagaccgcaggtggggcaaacccaatcttcggggacatcttcccatgccgtgccgggtgcaacgccgttttccggatcgccgagtgcggggtcatagacataaccgcagggacactcatatttcataagatacactcctattacttgtcaccgaaatatctcttaaggagacctgcgaacgccttgccgtggcgggcttcgtcgcgggccatttcgtgaacggtgtcatggatggcgtcgaggtttgcggcctttgcgcgctttgcaaggtcgaacttaccggcggttgcaccgttctcggcttcaacgcgcatctcaaggttcttcttcgtgctgtccgttacaacttcgccgagcaactctgcgaactttgcagcgtgctctgcttcttcgtaagcggccttctcccagtaaaggccgatttccgggtagccctcgcggtgtgcaactcttgccattgcgaggtacatgccgacctcgctgcactcgccctggaagtttgcgcggagatcagcaaggatatcctcgctgacgccctgtgcgacgccgacgacatgctcagccgcccaagtcatgttctcttcctgcttcgtgaacttggaagccggtgccttacatacggggcagaactccggagctgcttcgccttcaaaaacgtaaccacatacggtgcatacaaactttgccataataagatcctcctaaaaattgattttcatttgcggcttttaagccgttttatttttgcttttttctttgcattcggcgcacacaccgctgaacagcaggtcttcttttgtgattgtaaacccgtgttccgcttcaatgcgctcgagtgtttctgtgtccacaagcggttcaaagatatcgagcacgcgcccgcagcagtcgcagacgaaatggctgtgtgccgaagtatcgccgtcgaaatgctcctgcccgttgatgacgccgacgcttcttgctttgccctctgcacagaattttttaagattgcggtaaactgtgccgagacttaaatcgggatattcgggccgcagcgcagcgtagagccactccgcagttgggtgcaccgttgtggcacgcagtgcgttgtagagcgcctcacgctttcggctgaacttttccggcatcggcttcacctcctttaggtttgtgggatttctttctctctcacttgttggcactattatagcacgcctttttcgatttgtaaatagtaataattatcatttttattattattttgtaaacaaattgtgaacaagcctattgaaaagctgccaaaaccccgtttacttgctttccgaaaacaagatgcaaaacggctctgcattttacccgcaaagccgttttcttagtttctatttattctcctttggtctcatcgttttccggtggaaacattttcatgaagttaagtgctgcgccgacgaggtcgtcgtttttcatcatttcgggaacatcctgcggccggaaccagatctgcgcaaacttctctatgacgggacgcaccatttctctttccgcatccgtatgcggtgtgccgatgccgcccgggttcatcatgtgtgcaatgaatgtcgcggcactctgcacgcgcgcttcaccctcggggttccacccgtcttttgtcatgcagttcacgccctgctttgcggcaatttcaattttcttttccgcgcggtgttcaaaatctgcgtaatcccccgcttcgttccacgcgatttcggatacggcatacaggcgcgggaacagcaattcttcgaggtgttccggcgtttccacctgctccgaccacaatgccgcttcgtaaccgagcatattcggactgtctgcgtagctcttgcccatgacgaccggctgataatggtaaaccttattcaatgaattgatgccatgcgggtaatcgaaatacaaagcggacatattggagaagatcaccttgccgccacgctcgataaatgccggcaccggcgcttcatgctgcgccgtccaatactgtatgatgttttcggtatcgacatctttggattccagaacatcgttccagcagacggcgcgcttgccgtgctttttgaggatagcgacgacacgcttcgtgaagtagccctgcaaatcttcataatcggtaaggccaagcgcttccatgcgcgccttgcagtgcgggcattttttccattcggtcttcggcgcttcgtcaccgccgatgtggaagcggtcgtccgggaacagtgcgcagacttctgtcagaagcttttcgataaactcgaatgtttcgtccttaccggggcagagaattttctcaaaaatgccgccaaactggcacagctccgttttttcgccaaagcagctcaaatgcggatatgccgcaatcatcgatctggtgtggcccggcatatcgatttccgggatgatctccatgccgcgcacgcgggcatattcgataacgctcctgatctcctcctgcgtgtaatacgtgccggtcgtttcgtgcagcagcggcagcgttttgcactcgatgcgccagccctggtcatctacaagatgccagtgcagaacattcagcttcacacgcgtcatctggtcgatgacctttttcacttcgtccgccgtaaagaaatgacgggagcagtcaagcgacaggccgcgatgaccgtagtgcggtgcgtcttcaatggtgacgattggcagcgcttcgccctctgctgtaagctccgtgacagtcgtcagcgcccatacggcgccgctttcatccgccgcttccacggtgatgccgtcctttgtgacggtcagcttgtagccctcttttgcgatatcggcctttttcagcgtgataaacccgttttcggcggtctccacgtggccgtccagtcttgcagcaaatgcctcaaggcaccacggtgcaaaatcaccgagcgaaacggtgacggtttccggcagcttcacactgccctcctgcatgtgcaccgatccgcgcggcgcgggaataagattcaacataagcaagattcctttcttcgggcaaacgaataacacgcttgtccttttacaacttctcctcggctgcaaccgaaccgcagcctttttgttctattaagaacattataccgcaatttgcttcttttgcaagaaaatcatgctatatttctatataattttcaaaattttaataattataagcagatatgacaaagcagaattttgaatctccgtctggacttgtcgaaatagatatggtatacttcaagcgaaaagtttttacatgacggaggagcaaacatgggcagattgatcttaattacgaatgacgacggcattgacgcaggcggcattcgccagctggcagagacagcaaaagcattcggcgaggtatatgttgtcgcaccggagagccagcgcagcggcaaatcgcacagcgtaacgtatttagagccgctttacgtgcgcgagcgtccgggttacatggacggcgtaaaggcatacgaatgcagcggcgtaccggtggactgtgtgcgcgtgggcatccatctgctcggtcgcaagcctgacgttgtgctttccggcatcaatagcggctacaatatttccggcgatattcagtattccggcacggcgggcgccgcgttggaggccgctttctggggaatccacgccatcgcgctttcccaggccaacctcgattatcatcccgtaaccgaccgctacttgcgtgcgctcatcggtgaatatatggataaacctctgccgcaaaacacggtttggaacatcaactttcccggctgcgcaccggaagactgcaagggtgtaaagcacggctgcgccgtttcgcaggatgatttttacacggacagcttcacctgcaaaacactcggggacggcacggtggaatacacggtcgtgcccggcagaaactggcatggcagcgaaggcaccgaccttggcgcagtgtgtgacaactacgtcgccgtcggcactgtgacgaatgtgcgataataaaaacatacagattttgcacctgctctttgaaatcgcaaaagcaggtgcttttctatttttaaaaaccgtgttatactgaagaaaagcaaaacattgaaaggaaacagaacatggttatattaggtgtagacctcggcaaagcgcgtacgggcgttgccgtatgcgataaaagcgagctgctcgcaagtcccgtagaggtcgtgaacgagcacaaccgcgagcgccttttggagcgtgtagcacagcttgccaaagcgcgccgcgccgagcagattgttgtcggtctgccgcgcaacatggatggcagcgagggcgaaagcgcgcagaacgcgcgcgctttcggtgcggagcttgcggaaaagaccgggcttcccgttgatttctccgacgaacgcggcacgactatcacggcacacggctttttaaacgaaacaaatacgcgcggtaagcgccgcaaagcaaccgtggacgccgtggcggcgacgatcattttgcaggattatctcgattatcggcgaaaccgcaaagggtaatttacacaaaaaacgcatagacaaattcgcttcgcctgtgctataataacgatgtgccgcgcagaaatgcgtttttaaggcacggaaaggaaagataactatgggttacaaaatcatcaccgattccaccatcgatatggatcataaaatgatcgaagagttaggcctcacagtggtgccgctccgctttacaatcgatggtaaaacatataaagacaaggcagatctttcggatatgccgacggaaactttctacgcaaagctgcgcgagggcaaaatgtccaccacatcgcagatcaacgccgacgaattcacacgggtctttgagcctgttctgcaaggcggcgaagacgttctgtacattgcgttttccagcggtttatccggcacctgccaaagcgccttcatcgcgcgcgatgaattgaaagaaaaatatcccgagcgcaaagtttatgtgttcgattcgctctgcgcgtccctcggcgaaggtttgctcgtataccatgcagccatgctgaagcgcgccggcacggacatcgattcgctgtataagtggctcggtgaaaacgttttgaagctctgccactggttcacggtggacgacctcaaccacttaaagcgcggcggtcgcgtttccgctacagcagcgctcgtcggcactttgctcggcgtaaaacccgttttgcatgtggatgacgagggccacctcatcccggtcagcaaggtgcgcggcagacggcaatcccttgatgcgcttgtgcagaaaatggaagagaccgccattcagcccgcagaccagaccgtgttcatcagccacggcgattgcctggcagacgccgaatacgtc

SEQ ID NO: 3086 - DNA, 1709 bp, Unknown
  16S sequences of unknown bacteria
ttgcgggtcaataagtcatgctttttcatgcaagcatgaaacgcatgaccttttgacccttgtatcatcatcattttatgcccgcagatcaaaacttatgcctgcagcggctgttcttccgatctttcttcgaagaacaccttattcagactctccgaaatcatgaagctcaaatacttcaccgtctcatcaatatccttcggtgtcacaaacatcgtattgagctgcgaagatatcagttcccggatcagctcctgcttttctgcgtgatcgagtgttccaagtgctcctgtgagccgctgcagcctctctgaacggtcaagctcctccaccagcgcttccatcgtatcatttacgattgtcaccgcatccacgaccgtcggcaccccgatcgcaatcaccggcacacccaacgtctcttcgttgatcgcatccctgtgatttccgactccggagccgggattgatgcccgtatccgtgatctgaatcgtccgattcagccgctttgtgctgcgcgccgccagtgcatcaatcacgatcaccagctgcggatgcgtctcatccacaacgccctttatgatctccagtgtctccatcccagtctgtgccatcactcccggcacaagtgcactgacctctgccgcctgctgcagctctgcggaaacccgtccgtacacccggatcatatgccgggtgatccgcagattgccgacgacctccggtccaagtgcatccggcgtcacctcgcgattgccgagccctacgacaagtacggatttccgcttatcatcctccgtccgcatcagcgcacggatatgaccggcaagcgcctctgagatttccgcatggtagtcctcgtccggcgacgacatattcggtgcctcgagtgtgatataggtgccgaccggctttcccatcacccgcgctccattttctgtctcgatcacgaccgttgtcgtataaatttcccgctccggatcttcctgctctgtgacgcgcacgccccttggctgcccgtccttcgcctcacagctctccttcgcctccagcgccaggtccgtccgtatctgaaatttccccatcatagccattctccttcgtattcatcatgtttttatcgctatttttcctcattttttgaaaaatatgtattgacacaccccgaactttggactaagatatatgagtatgtttacattaaacgtccgtgtccgattttaatgggaacaacaaaattcagaattaaaaatgtttggaggtgtacgaattggctaacatcaaatccgctaagaagagaatcctggtagcaaagaccagaaacgagcgtaataagtccgtaaagtctgctgttaagacggcgatcaagaaagttgaggctgctgttgctgcaaatgataaggctgctgctgaagctgcattattatctgctacttctattattgataaagctgctaaaaaaggcgtttatcataagaacaatgcagccagaaaggtatctcgtctgtccaaagcagtcaacaccctggcataagcatagatttatagtcaatgaaaaagaaagcagccgattccgtcatttcggctgcttttttatcgagtcaagcaagcctctatctactgcttcaattgcgcgaaacaataagtagtaggtggaggcttgcttgtatcaggaggagtgcaaactccttctgataagctgcgaagcagct

SEQ ID NO: 3087 - DNA, 2006 bp, Unknown
  16S sequences of unknown bacteria
tttcgtccgccgcctgtctgtaaagcggtcaagattttccagtccgtattcgtcaacacccatagaatcaagcgccattctcgccatatcgcgagtaatgcgcccatcgccttttacctgactgaaatcgcggacgcgttttaaaagtctgtttgctattcgcggtgtaccgcgcgagcacttcgcaagctcggaaagcgattcgctgtcgatttcaacaccgagtatatttgctgaacggcttattatcgtcatcagttcttccggcgtgtaaagctcaaatttagagagcacgccaaaacggtcacgcagaggcgcagacaggctgccggctctcgtcgtcgcccctataagcgtaaatttggcaagatcgagccttattgaacgcgccgaaggacctttgccaatgataatatcgagtgcataatcctccatcgctgaataaagcacctcttccaccgagcggtgaagcctgtgtatttcgtctataaaaagcacatcattgtcgttcaaatttgtaagtattgctgcaagatctcctgccctttctattgcggggcctgaggtaatcctgatgtcaacgccaagctcattggctattattcccgcaagcgtcgtcttaccgagacccggcggcccgtaaaaaagtacgtggtcgagcggctcgtttctaagttttgcagcttctatatatatcttgagattttctgtcgctgatttctgccctatgtattcctcgagccgatgcggcctcagagagacttccgccgcttcttcgccttcatttatttttgtctgtgtgattctttcttcataatccataattcaccgtctttataccgtcataaattaaaacaactttttaagcgcctgttttatatactcctcgcttgtaagtccatcctcatttatcgccgctacagcgtttgccgcctctgttctgctgtaaccgagcgatataagcgcatttatcgcttctgctctttttcccgcctcactgtcagccgcaccgatatccgcgtaaacaggcgctgccgccgtaccgccggcgatacttcctatcttgtccctaagttcaagcactatacgctgcgcagtttttttaccgataccgctggcccgtgtaagaaaatcgacatcttcaaaagctatcgcctttttcagctccgataccggagctacagacaatattgccatagccgccttagcgccgacaccattcaccgttatcagctgcttgaaaagcgttaagccctccttttcagtaaatccgtaaagactcacatcatcctcgcgtactgccatatagagataaagcgtcacagcttcaccttcctgcgcaagatatacagcagaattatcaggaacagccacttcatacccgagaccacccgcttctacaacaacgccgccttctatgcgcattgtaaattttccttttatgtaatgaagcatacttcttcctccattttacactattttcagtaaaatttcatgaaaatcagagtttattttcaaacctatttctgtaatttgccgaatgcccgcagcaaattgccgccgcaagtgcatcggccgtatcatccggcttcggcacgctcttgagcgaaagtatagtctttaccatttcctgcacttgttttttctcagcgcgtccatagccaacaagtccctgttttatctgaagcggcgtatattcatatacaggaagaccggaattagcgcatgcgagtatcgcaactccacgagcctgtccaaccattatcgctgttttggtgttagtattgaaaaacagctcttcaatcgaagccacatccggctgctcatccgcaattatattcataagcgagctatagagaactttaagcctcgatgtcatatccattcctgccttcgtcgtcaccgcaccataatttatgggaataaatttattgccgcgcatttcaataaccccccagccgagtatcgcgtaacccggatctatgcctaagattttcatctttacc

SEQ ID NO: 3088 - DNA, 4744 bp, Unknown
  16S sequences of unknown bacteria
ggcgaatgggatttcgacggctattgcattacggatatggcggcttccaatacggcgtatatcatgaactatcaggacggtatttcgcgcggtacggacgtatttctcggcagcggttcgaaaacggcgttgtcttcgtttaaaaacaacgcgagttactgtctgcggatgagagaggcgtcgcacagagtcctgtatgccgtatgcaattacagcgcggccatgaacggaattacgcccgataccaaggtgtcctcttctgcgtggtggtggcagacgacgattatcgcggtcgattgcgttttcggcgtcctcacgggcggcgcggcggctatgtacgttttgtgtctgataaaacaatacggcgcaaaaaaagaaaacgattgagcaaacgacaatgcgcccttcgtgtaagtttggggggcgccttgtttgttttggggaggcagcgatgaaaaaaacgaaaagacgcaaaatcgccgcgatcgtcttgtcctgtctttttgtcctttttgcggtttgcagtccctttatcggtatttacatcgcagggcaatgcgtgccggcccaatatacgcaaacctattacggagcgcttgcaaacctctatgcgcgtctgaaaaatacgacgggcaaaaaaatagtcgtgatcggaaattccaacgtcgccttcggagtggattcggcgcttgccgaaaaactgctgcgggaagcgggaatggaatattccgtttgtaatttcgggctgtacggcgcgctcggcacgaaaatgatgtgcgaacttgcctacgaacaaatcgagaaagacgacgtggtgatttttactcccgaacttgtggcgcagtcgctctcgacatatttttccgtcgaagaagcgtggtatgcgctcgacggcgacaggagtatgtacaaaggattttcaagggaatcgaaaagcgcgcttgcggcgggctatatcggctatacggccaaaaaatttgccctgtacgaaaagggcacgcctgcggcgggcagcggcgtttacgcaagctcgtccttcgacgaacgcggcgatttgaaaaattacgcccgtccctataatatcatgccggacggcgtggacgtgaataatccgatcgtgttcgacggggagctgttttccgcggatttcgtaaactttatcaacggatacgccgaaaagctgcaaaagaagggcgcgcgaatctattattctttttcgccgatgaacgcgggggcggtcgcgtttaaagaaacggaaaaattgacgggtttttatcgccttatagaaacaaaactgcggtttccgctcatcagcaatatcgaagattacctgctggataaagaatggttttacgactccaattatcatttgaacgaaaacggcatgaaggtgagaacggtccggctcgtaaacgatattaaaaatcaattcggaaatacgacgaaaacggattatccgctccccgacaaacctgttctgcccgatgcggacgtggagggagaaggggacaatagccatacggatatgttcgaataccgactcgacggaagctattatacggtggtggggcttaccgaaaaaggcaggaacgcggaggaattgattattccctatcaagtcgacggaatttacgtaaaagcctttctgcctctcgtctttttcgatcataaaaatatcaaaagcgttacggtgcagaaaaatattcataccctttccaacggaagttttttgggctgcgatcatttgaagcaaattgttttaaggcattccgagcccgcggaaatttccgtcggttacgaattattgacgggcgcgccgcaggattgtaagatattcgttccgaaaggcgctttgagtcggtttgagaacaattatttttgggggcgttatgcaaagcaattgcagggatatgaagaataaaagactatctcgcttagtcgttttgcttttggctctatgcgtcttggcgagcggttgtgcgcaggcggaacagcaaaataaagtgaaggtttccatcgtggacagcgtattgtttacggcggaaaacgcggtcgggaatgtggaaaagggagaggactttatcgcccttttgtcgcttcgcgccgggtatgagtttgtatcctgcgactattccgattataaggcgtccgaaaaagacggcaaaacgcaactgacgctgagaagcgtcgttcgtccttcgagagtcaccgtaaaatgccaaaagaaagaggtgcaaaacgccgtgacgatcgatttaaaatgcgcggtgcgttacgatttcaacggaggaaaagacgcggacgggtcggggacgcgcacggtgcgttattccctcaccgcccatcacaggccgaacacgataaacggcgcaaacgtcaaaagaagcggatttgtgttgatcggatggaatacgcaggcggacggaaacggcgcgcatatcggattgggcagccgcgttaccgttcaaaacggcgaagagaagaccttatatgccgagtggaaaaaaagcatcgacggctcgcaatttctttacaaagaagctgcggagggagcgatcgccctcacgggatatcgcggagcgggcgacgttcagccgttcgtgatcccgtcggagatcgacggaaaagaggtcgtagagatttcaagttcttttacgaccaatatgccctgtcgggaacttagctccgaaacgctcgttttgcccgattcggtgaaatttatcaagagcaattcgtttttgcattcggctttttcggagttgtatttttcggacaatatcgaagagatcgacgagaaagcgtttccccgcaatatcaaaacttttcatatcaacgcgtttcgagagccgtgttttcaagcggtcaataacagcacgatcttttccgataacatggacagactgattttgaacgcagacagacgcaaacttgtctttttctcgggatgcagtttcgcgtacggactggacagcaatgtcgtcgacgaagtttacggcggggattacgtcgtgttcaatatgggcatgaacggagatataaacgccgcgtttcaaatggagatattgctcgcttatatgggcgaaggggacgtgtttatccatgcgcccgaagagatgagtccgagtcagctgatgttcgggtattttgtcaacagcatcatgtttatcatggtggaaggcaattacgatttgcttgcccttgccgatttttcaaacaacagcggggtgatccgcgcgttttttgactatatcgaaattaaaaaggatgccgatccctgccgctatgacgagggcaggtatgaggatttcaacatttacggggattatatttatgaaagaccttacgacgaagctacggaaagcgagcgcgacgttacgtacagcgataacgcctactgttatgcgcccgagcttttgacggatgcgggaatcgaaaaacttgcggggtattacgacgaaatccgtgaaaagggcgggagggtttatctgtcgtacgcgcccgtaaatataagtgcgggaacgggaaacgacgtgagggaaaaaggatatgaatttgccgaaaaatttgaaaatatgttttggggttacggttacgaggcgatttccgacgtggaggaatatatgttcccgggcagatacttctatgacagcgattatcacttaaacgatttgggcgcggcgttgcgcacggagcgtctgcttgcggatttaaaggcggcgggaatctgacgggggaggaaaaaattatggaagacagcgtaatcgcaaacaacccgatcctgatcgtcggctttatcgccgcgctgttgctgggcggatacggattgatcaaaaaggcgcgtttctgcgtcacgggcctatccgtttttctctttctttccaccgccacctacgcgttgctgagaggcgcaacgctctatgaagtcggtgccgtcgccgccttgttctttgtaataaatctcttgccgctcgggaagaaaggaggaaaatgagttgagtttcaattctttggagttcttgctttttcttcccgccgtcgttcttttgtattggcttttgccccataaagcgagatggatattattgctggcggcaagttacatattctatatgagctggaacgtgtggctgataggcttgatcttagcggtcacggtaacggcgtatgtcgcgggaatcgcaatcgaccgcgccgacaatcggaaagcgaaaaaggtatggttgatcgttactctcattgtctgcttgggattgctcatattttttaagtatataaactttattttggagagcgcggtgggcgtcataaggctattcgatgcggggcaggaggacatcgcgttaaacgtcatcctacccgtgggtatttccttttacacttttcagaccttatcttacgtcatcgacgtttatcgcggagagttcaaggcggaaagacatttcggatattttgccctatacgtttcgtatttcccgcagcttgtcgcggggccgatcgaaaggcctcagaacttgttgccgcagttgaaagagcggcaccgcctcgacgaagacgatatgcggacgggtgcgaaatggcttttatcaggttttttccgtaaatgcgtcgtggccgatttttgcggaatcttcgtcgataaagtttacgcggatccgggcggagcgaacgctttggcgatgtttgtcgcttcggcgctgtttctgatacagatttacaacgatttcgccggctattcggaaatcgc

SEQ ID NO: 3089 - DNA, 1657 bp, Unknown
  16S sequences of unknown bacteria
cgcgagggcagaggcggcaatggttcggtaactgcatggcgtttctcgctttcacaattttttccgtttcattttaccacaaacggagaaaatgtggtatactataaagaacaatctcaaatataaaggagtgcatgactatgtctacccctcataaccgcgctgaaaaaggtgattttgccaagaccgtgctgatgcccggtgatccactgcgcgccaaatttattgcggaaacttttttggaaaatccgcgccttgttaccgatgtgcgcggtatgctgggctataccggtacatatcagggccgtcctatcagtgtgatgggcagcggcatgggcatgccgtctcctataccgaaaaggccaaactgttcgatgtggtgttggcggacggtgcttattcggaaagcaactatgcggtgacccagagcggcgacaccgacgagatccagaaacccagtgcagagctgaatgcggctctgaaagccagcgcggcggcgcagaatatccccttgattgagggcaatatccattctgccgatgtgttctatcgggaacccaacgacgaaaagccggcctactgggaacgtctgcgggacgagaagggctgccttgccgtggagatggagagttttgcgctgttccacaatgccaaggtgttgggcaagcgggccgcttgcctgctgaccatctcggacagctttgtctcgccggaaatcaccacggcagagcagcgccaaaccagctttactgctatgatgaaggtggctttgagcgcggaggcatatctggagaaataagccatggaaaaagaacagatccagtcattgattcgggctgcctttgcggcacgtcgttttgcttacacgccgtattcgcattttcaagtaggggcggcgcttttggcgaaaaacggaaaggtctacaccggctgcaacattgaaaatgcgggctatacgccgaccaactgtgccgagcgcactgcgttgtttaaagctgtcagcgagggagaacgtcagttttccgccattgccattgtgggcagcatgcagggaacggtcaacaccttggtgacaggaccctgcggtgtatgccggcaggcattgtatgagtttggcggccccgaactgaccgtgattatggcgaaaactgaggaagactatattgtaaccacgctgggggcgttgcttccctatggttttggcccggccaatctggaggctgaagaaacccaatccccaatgtaaggagttcccgttgttcatgaaaaaaattattgcactgctgctttcgctgctgctgttgatcagtttggcggcctgcgcttcggaagagcaggggcagacgtccagcgattttacggtaccgttggatgatgcatcctatgtataccaagcgccggaggatgccacacccttgcccggcggcgcggtgattgcgctggcggctgagagcagtggtctggaattcgggccggaagcattgctttggaaaggtatccaaacctttgcttccaatttcggatatacggcacagtcctacgtctatggcgagggcgaagcggccacaaccgcagaggaagcgctgcagcaagcggcgcagagcggcgcggccttggtggtctgccgcggggaagagatggcccgcgcgttgttccc

SEQ ID NO: 3090 - DNA, 13678 bp, Unknown
  16S sequences of unknown bacteria
atttatacggatattcacaaactacaagataaagccaaaacttcatatactctaccctgattgtatacgattgaaaaaagcacccctttaggggcgccagaggaagtaatgcaggcggcaaagcttctcggtgctcctaaagaggcgtgctctgtaagctgccctttttgggggcggctcagtggctcaaggcatagccttgagccactgactgccgattatggataaatcagcagccgcaaccgcagttgttgtcgcaaccgcagccgctgttattggaagaaccgaaaccgcagccaccgcagcaaacaagtatgaggactaagataaggatccaggtgcagctgtttccgccaaagcaattgttacacattcaaaagacctcctttttctgtcttcatcacatactatgccgtaatttaaaaatgtgttacggcaaattaaaagccctgcagcgggtcttaaacggaggtatcggtaatcaccgttacttcattcgtcgcgcagatattatacatatatttttggtttttcttgcttgagtcgcataaataaaagcttttggcggcgtttttaagcatagcctttttaacgcaggattcttctatggaggaatcggttataaagccatcctcggtgtagccgcggctggaaaagaagaatatatcggcgtttatgtgagaaatgaacttttcggtttccgagcctatgtaggctattgaatgaaaaagcagcagcccgcccgtgcagtagttttttatgcgctgctcgcccaatttaagcgatattttagggctgtttgtaacgactattatatcgctataagcctttaaatgcggtattatgtaagaaacggttgaagaagcgtccataaaaataatatcgccgttatgtatatactctgcggctttttccgctattttcttttttgatgcgttgttttgctcctcccgccataaaaggggtatttcgttatcgggggcgtttcttattactaccccgccgtgcgttcgtatcacctttttttgccgttccagctcgtttaaatcgcgcctgacggtgggttggcttacataaagaagctttgaaagcttagcaacgcttatgcttacattttccgataataggcttagtattttttcctgacgctctatgccgtacatttatttacctgctttcgttttgtttcatatatgcttatttataatcgtttatgtgattgttaatcaatatttgcgccgtttattgcgaaaatgcgcatatttgattataattttatcacataacaaaactattgtaaagagggcaaaaaatatgaaacgtaccgttaaatgcgcaaaattatacggtataggtgatttacggtatgaggacgcggcttttcccgaatgtggcggcgatgaggttatagtgcaggtgaaaagctgcggaatttgcggcagtgatcttggcagggtgtatgttaaaggcacatacacctttcccacggtaatagggcacgagttttcgggcagggtggtggttgacccgcttgaaaggcttacaaacgaaaatgtatgcgtatttccgcttttgccctgctttaagtgtaaaagctgcaaaaacggcgactatgccacctgcgaaaattacgattattacggttcaaggcgcgatggcggaatgaccgaatacattgcggttaagcggtggaatattgtaaaaatgccgccgaatttaagctatgacgagggggcaatgtgcgagcctgtgtcggttgcgaggcacgcggtgggaaagcttgaaatatcaaagggagagaccctttttatatcgggcgcaggtcctataggtcttatagcggggcagtgggctgtgcttttcggcgcaaagagggtatattataccgatattgacaaccgaaagcttgaatttgcgaaaacacttggcttttatgagtacgaaagcggcattgctgccgattgcgcgcttgagggaacggggtattccgacgctctgcaaaaatgccttgaagcggtaaagccgcacggcagaatggtgcttatgggaaacccggcgggcgaaattacaatgtcgcaaaatacatattggcatattctccgtaaggagctgtgtataaacggcacatggaattcctcttataacgataccgtgaacgactggcgggaaagtataaaggcaatggctgacggcagacttaacgttaaggcgcttattacgcacaaattcccgctttcggaatgtaacgccgcttttgaaatgatgaaaaacaaaacggaattttacaataaggtcattttaaatatgaactgacgggagacagcagacaatatgaaaaagaaaatttccccttcggttatgtgcgccgatttttttgatttaaaaaattgcataaggcagtttgaagaaaacaaaattgatatgcttcatattgatattatggacggctgctttgtgccgaattacactttgggcacggattttgtgaaaatacttaaagccaatacagccattccgcttgatattcacctaatggtggaaaatcccgaaagtaagcttgattggtttcaattatcgccaaacgattatgtggcggtgcactgcgaatcaaccccgcacattcacaaagcggttgcagcggttaaagctaagggctgcaaggctttagcggcgcttaatcccggcacgccgatatgtgcgcttgaaaatattttggacgatattgacgcggtgcttgttatgaccgttgaccccggctttgcgggtcaaaagcttataagctctgcccttgcaaaaattaaaagcctcagagaatatcttgatgaaaagggctatgaaaatattgaaattgaggttgacgggaacgtaagcttccacaatgcggcgcttatgaatgaaatgggggcgaatatttttgtatcaggaacctcgggcgtattttcaaaggacggaacaattaaagaaaatattgagaaattacgcgggattatagatagatagatgaagctatggtttgcacaaaccgctgccctcagtgtttggtatgactcatcacaatgtgggtaaagctgctattctcgtcagagtgagacgagagatttataggcaaataaaatattttagagacgaaaaagcaacccgccgtttttaaactctgacgggttgctttttgtgcttgcattataattcaactatcaaaaggtatactttttgatagttgatactctgtttaaaaatatatcacattgtgtcctaaaaaacaataccttaatgggaaaaatttcaaattttgttatttttaacgactgaaatcagcttaaaaaatgtttccacacaattatcaaaaagtataccttttgataattgtatgaggtgataaggaaatgaaaaataaaattttaaaagcaacggcgctttttcttgcggcaatatgtatattgagctgtgtgtgcggctgcggtaaaaagaccgtcagcaccgccgcaaagggagaattgacccgactgaaatggatagaaatgctgtccgacagcttttacattcaaaacagtaaaacggaagacccgtatttttccgatgtttccaaagaaaacgagcttttcggcaagattcaggaatgtgtggaactgggaattatttccgatgaaaagcagtttaacgcaaattcttcggtttcttttaaggaggcggcacttaactgcataaacgcaataggaaaaagcacggtttcggattatttgaaaacggataaagaactcagcgaaaaagagttgttgaagtttgcaaaggaaaagatacttaccgaaatttccgataaaaaaatgcttacacaggctgacgccgaaaaagctctgaaaaattcaactgagttgctgctgaacaagccgttatttgaaaaggaaaagataaagcttgccgaaggcgttacggatctgcgtaactcaaaggcagaatataccgattcatcggcggttctttcggatgttaaggacattaaaaaggattccgttataattcttccgccgagcgcggaatatccggcgggtcttgcaagaaaggtcgcttcggtttcgggaaataccgtaaccctcggcgaagcaaatattgacgaggttttcgatgaaataaaggtatctaaaagaaccaaacttaacagtacggattttacccccgcggcgggcgttaccgtcggggaatattcggcagttgaaaacacaagccgcaccgagggggcgagcgctgcaccgacgctgttgaccactcaaagcaacagtaattcttataccgagttagcgtccgacggtaaagcgtcatttgatattgtgcttaatctgacaaagggagagctgtcgcttgacgaaaagtggggctctcttaaagggagttattcggacgcaaagtcgcccgagaaagcaagcgattttaaatttgacggcagaaacctctataccgaaaagtataaggcgggctatgagatcaagggaaagataagtctttcggatatatcactggataacgacgttgattacaagaagatagccggcattaaggtcggggtgaaccgctgcgaaacaaaggtgaacttcaaagcaagcgtcaatttgtcggtaaaagggaaaatagacgatgatatagatgttcttaccgccagaattccgataggggtaagcggactttcggtgaaatgcgtatttgtgctttcaatcggtgcaaacggtgaaatatccgtaaaaagcgaaataagaaatactacatcatatatatacgaaaaagggctgaaacaggtcaataacaccgatgtaaaaaacaaggcgaccgtaacagggaaattgaccgcacaggtaggaccgaaagccgtattgtctattttaggaatggatttctttgatatacaggcattgataggaatgggagcaaaagccgaaataagcgcggagcagggcagcaccgaaataccgtgcgttgatgttaaggcgtatgcacccatagttacgcttaaatttgcgggggataaaaaaaccgtgcttaacgcattgggcttttccgccgaatggaaagcctatgacattgaagacggttggaaaaaatcaagcgtggtaagcacatatcactgggaatcaaaaaaaggctggatagataagtgcacgcatcctaccgatgatgaggaaagcggcaatcaagctggcaatagcggcagtagtcggaataataccacatctgctggttcaaaaacagaaacaacgaagagtaattcttctaaagctaccaatgctgaagaaaaccgtaatgaaaagttgaactataatttatatgtcgataatgtggcgtgtatgccaaattatatggcttggatatttggtaatgagtcaaatgcaaaggataaagtagattatatcaggatagattgggtaaaaatcaacggaatagaatgcaaaattaccgataaatgttcaagcaataaagatgttcgtaaagtttttaaagagaatgaggcagacccctcagacgataactatgggtatgtattaagcgaactgacaagaaaatataacgggacaacggatgaaccgatagcgtatgtatatgctgaaataccatgttctgaaattgacgacagtgtaacagaaaaaaccgatgacggttatgatatttggaatatagaatatcttttaacctgtaaaataggtgataaagaatttcagcatttaataaagcaaaaatttattagagacggatatggtggtattgtgtaaaatcagtaaatgaaactgtcgcattaaaaatattaaaaaaacaagtcttcctctgattagaaagagacaattcccccgataaaacgggggattttttattttccaaaaaaaattttaaaaaaattgaaaaaagtatttgacttttcctgactttgatgtataataatagtcaggaaaggtcaaaaatgaggtgcaagacatgagaatgagcgatttaataacacaggaaataataaaaatgttaaatgagtcgggtgtgaacaccgccgaaattcagcgcaacgagtttgccaatactatcggatgtgccccgagccagataaactatgttctttcctcgcgatttacgcccgagcacggctatatgattgagagccgccgcggcggcgggggatatataagaataaggcgtgttgttatgaaccatacctctgctcttatgcacattataaattccataggcgatgcggtagaccccatgacgacgagaattattcttgaaaactgtatagaatcggggataataccgtcggaggtggcaaagcttattgccacggcggtatctgccagcgtattgcaggcagtgcctgttgagtaccgcaatacgcttagagcagcgcttttaaaacagctgctgctcacccaaattaaataataaggagcgatttttatgctatgtgataaatgcggaaaaaataatgcgacaacgcacattaaacagataataaacggcgtggtgacagagcgaaacctttgcagcagctgtgccgcggaagaggggtactcaaaattcccgcacggtgggcttgccgatatgctggcctcaatgttcggggatatttcggggctgggaatagaatcaaacgagacccgctgccctgtttgcggcgcaagattttcggatattgccgaaaccggcaaggcaggctgtgccgagtgctacaagaccttttacagtgagctgctgccctaccttaaaagggtgcacggcagcgtaaagcacattggaaaggtgccgaacagcgcaccgcttgccgttaaaccgcaggaggaaacggctgataccttaaggctggagcttaaccgccttgtaagcgaggaacgctttgaagaagcggcggttgtaagggataagataaagaaactggaggagacggaaaatgagtagctggtatacaactcatgcgcccgaggacgatattgccgtaagcacgagaataaggctggcacgcaatttatcgggcttgccctttcccgcgagaatgacccccgagcagcgcaaggagcttaatttaaaggtaaaaaacgccgtgctgcaaagcaacactccgttcgcgaaaagccttaaatatattgatatggcggatgttccgcaaaccgaaattgcggcgatggtggagcgccacataataagccccgaatttgccgaagaaaacgccgaccgcgcaataattatttcggcagacgagagcataagtattatgataggcgaggaagaccacgtaagaatacaggtaatcttaggcggcttgcagcttgaaaaggcttacgataccgcagagcagcttgattcgctgctttataacgagctgcactttgcctttgaccgcagcttgggctttttaaccgagtgccccaccaatttgggcacggggctcagagcctcggtaatgctgcatttgcccgttaccgaatcgaacggtgaaatatcatccattgccgaaacggtgggtaaaataggctttaccgttcgcggaatgtacggcgagggctcaaaggcgagcgcctcaatgtatcaggtttcaaaccagataacccttggtataagcgagaaaaacgcgatagataaccttaaaataataaccgcgcagctgattgacaaggagcgcaaggcgagaaacagccttaacaaaataaagcttgaggatatgtgtttcagggcgctcggcactttacaaaactgccgcgtattatcaagcaaggaaatgatggatttattatcacggattaaactcggtataagtatgggcataatcaaaaaggacgttcttcccataaagctgtttatagagggtcagcccaatatgctgatgaagaaatacgggcagcttgaacccgaagaacgcgatatataccgcgccgcctttatgcgcgacgcattaaaataaaacagatagaaataccctataagggaggttacattttatgaaatacaattttaacggattcactacaaaggcaaacgaggctttaaatcaggctatcggctcggctgagcaattgggtcacacatatgtgggcagcgagcatttgcttttgggacttttgaaaataggcacgggcgttgcggcggcggtgcttaacaaaaacggaataaccgcagaaaatattgaggagctgatccgcgcgaatatcggctgcggcaccgtaacaaggctttcgcccgattactttacgccccgcgcaaagcgggttattgaaaccgctatggcgggctgcgccaatatgggcaaaaagtatgtgggaacggagcatttgctcataggcattttaagcgagggcgataactacgcaatacgctttattaacgagctgggcgtggacgcggctgcccttaccaccgaggcgcttaaagcctcgggcattgacccggaagaaacgcagagcgtaaacgccgcgggtacggcaaacgacaacgccgaccccaaagcccccacgctctcaaagtatggcagagacttgaccgccgacgccaaaaagggcaaaattgacccggttataggcagagaaaaggaaattgaaagggtaattcagattctttgccgccgcaccaaaaacaacccctgtttaataggcgagccgggcgttggtaaaaccgccattgttgaaggtctggcgcagaaaatagcctcgggcgatgtgcccgatattctcgaaaacaagcgcgttttcacccttgaccttacgggaatggtggcaggcaccaaataccgcggtgattttgaggaaagaattaaatcggtaatagatgaggttacaaaatcgggtaacatcatactttttatagatgaggttcacaccattataggcgcgggctctgccgaaggctcgaccgatgcggctaatatattaaagccggcattggcgcgcggcgaatttcagcttataggcgcaaccacaatttccgagtaccgtaagaatattgaaaaggattcagcccttgagcgccgtttccagccggtaaacgtggcagagccgagcgaagaagacgcggtacttatccttaaaggcttaaaggataaatacgaggcgcaccacaaggtaaagattaacgacgcggctattgaggcggcggtaaagctttcagcccgctatataagcgacagatttttgcccgataaggcaatagatttgatagacgaggcggcatctcgtgtgcggcttaccgcaagcgccgcgcccgcggagcttaaagagcttgaagaaaaaatagccaatgccgaggcggaaaaggacgaggctataaattcgcaggaatttgagcgcgccgccgctttgagggacagcgaaaacaagctgaaagacgaatacaagcaggcaaaggaaaactggcgcagagagagcagtcactccggcggcgaggtaggcgaagaggagattgccgaaattgtatcaagctggacgggtgttcccgtggcgcagcttaccgaggaagaaagtgcaaggctattgcggcttgaagacgagctgcaccgcagaattgtgggacaggatgaagccgtaacagctgttgcaaaggcgatacgccgcggcagggtagggcttaaagacccgaaacgccccataggctcgtttatcttcttagggcctacgggcgttggtaaaaccgagctttgcaaggcgctggcagaggctatgttcggcagtgaaaatatgatgataaggcttgatatgtccgaatatatggaaaagcacacggtttcccgccttgtgggttcgcctcccggatatgtcggctttgaggagggcggtcagcttaccgaaaaggtaaggcgcaacccctactcggtaattctttttgatgaaattgaaaaggcgcaccccgatgttttcaatatgcttttgcagatacttgaagacggcatactcaccgattcgcaaggtaggcgcgttgactttaagaatacggttataattatgacctcaaacgtaggtgcacggcttataaccgataaaaaggtatcgttcgggtttggtgacgcagacgaaagctcagacaccaaggacgttaaagaggcggtgctcggcgagctgcgcaacaccttccgccccgaatttttgaaccgtgtggatgatattatagtattctcaaagcttaataaggagcagattgccgaaattgcggataagatgctttcagggcttaaaaaacgccttgaagcgcttaatataacccttaactttgatgaaaaggttaaatacgcgcttgccgaaaagggctttgaccccgtttacggcgcgcgcccgctccgccgcgaaattcagaataaaattgaggacgctttgagcgagaaaatacttgattcaagcgttaaaaacggcgatacggtgctttgcaccgagcagaacggtaaatttgagtttaccgtgcaaaagtaattaaagtacctttttcagtgcttcaagagccggcggtatatcgttttccgctattcccgcaaggcagaggtataccgctccggctcttttcgacgggattattttaatcccgtttttttctgcggcggcgcaaagcagggagctttcggttttaattcccaaatcaagcatggcggtaagcgaaggctcaaaaagggttatatcggcttttgggaaaagcctgcccgccgtttcataaaaaagcttgctttttacgccgttcagctttctcagccgccgtaaatgcttttcaagcgagccggaggatatgtaattttcaagcgctagctgttcaatttttccgcaggtctggttgtaaacgccgccggacctgcggaaattttctgccagaccgcccggcagtgccatatacgcaattcttacgcttggcagcagcagctttgaaaagctgcctatgtataccgttttatcggggcagccgctttgaaacgcgcaaaccgcccgcgccgatcttctaagctcgccgttgtaatcgtcctctataattattctgtcatcacgcgccgcaacccattcggcaagcgcgtttctgcgtgaaaaaagtccggttacgcttattttcgcaagctgcgatggtattaaaaacagtgtgtttacgccctgctccgtaaactcttttattataacgccgtttttatcgcttttaagcgcggtgcagggaatagagtggtctttaaatacccgctctgcctgctcaaagccgtcgccctcaaagcctaccgcacgtttattgcctataagtccgcaaagaatactgagcagcggccccacacccgcgcctataactatattttcgggagcggttttaacgccgcgcgctttatatgagtaatcggctaaaacccgccttaagcccggctcaccctgcgcgtccccgtaggaggttaattcctcggtatcgcgcaaaacctcgcgtacggtttttttccacaggtcggtatcggcagcggcggggtctatttttttgccggaaaaatcgtaacgtatttcatatttttttatttcctcgggtattacgggctttgcaggcaataccccgcgaataaaatatcctctttgcggcaggctttccgcaagcccctccatacaaagccttaaataggcgttttcaaccgttgttcggctgacggatagctgcgccgcagcctctcttattgagggcagacgctcgccgtcctttataactccgcttaaaatcgcggcgtatacagcgccgtaaagccgtttatacatagcgcccgtgccgctttgcaaatcaataaaatccaatagcactttacaaactgtcctttaaaaaataattaaatttggctatttaacagtgtacactttactgctataataataacaccaatcaatttgatatgcaaatacttttttaaagaagggctcaaaatgaaaaagacaaaacacgagcaaattgtaaacataactatgataccgcttttcgcggcgctttgctatattgcgcttacggtgctgtttattccttttgcgaatatgtacatacatttcggcaaccttatagtggttttggcggcgctgctcataggcggctggcagggcggtcttgcaggctctatcggtatgggcttttatgatattttcaacggtcacgccgattcctcccccaaaacctttattcttaaaatgcttataggtcttgcaacgggtcttgtgtataactttattaaaaaccgcaaaaaatatcccgccgcggcgctttatgtttcgggcattatatcgcttatgataagcagcggcatacttgtgcacacccttactcaaaatcacgcttacacgggcaagggcgcgtggcttttcccgctgtttttaataatcggcttaatatgcatagttttcggtctgcttaaaaataaattcccgcagaaaaccgccgccgcaatagtgggcgcctcctgcggaatgttggtaaaccttgtaggcgaaaccgcgtggaaagccgtaacctacacattggcgggctcagcgcccggcgccgcgtttacaaccgcggtgctcggtcaggcttcaacccttataaacgccggaattgcaatagtcggcggggtagcgctgtttacggtgcttgaaaagccggttgaaaaaattaaaaataaataattcaaaggtgtaaaaaggctcccttcttttgcgttagcaaacagaggggactgaggggcatttagctttaatgccgattttattttgaggtaagagtgaagaggtaagaggtaagaagtaaaaatcccgttcacaaaagtgaacgggatttcagtctgtcgataaacctaaaattttatttttgcggcgttcacgccgcatctttcgtttttccgctgacatgcgcggcggaaaaacacattataagcgaaaaaccgctgaataagcggtttttcaagggcactggggtggtattggcggggatagagtgcagtccgaaaatctttgattttcgagcgagcggcattcccgtccaagagcgtgtcgactttttcgacacgctcaaatcccgttcacaaaagtgaacgggattttttggtcggggtagcgttatagtaatcgggctgaaacccgcataaataaaggctttttacgcagtcaaaacagtacattaactcaaaatttaagcaaaacaccgaccgaaaacagcatagttttaagttttaaaagtgaaatgagggaaaataatgcttagcataaaagaatctgtaaaaatactttttattgttactgtatcggtattgactgtcggctgtaaaaagcataatgccgattatacttcatcggaaaataccggagatgtaagctccgttgtttccgaaacgacagcagagagcgatatgatttcttcggcggagaatgtgtcctcggagccctgtgcaactgttgcacaaggttcatcaactgaaagctatgtagggaaaccggataaaacggtatcgcaaatcagagaacaaccgaaaacttcttcggctgcaccgcctaatacaaatatcgcacaaaccccgccggagataaaacccgaaacgcctgcaaacgcaaccgaagcggataccaaagctgttgccgaccgggttatatattacctgaaccgcgcaagagcgaatataggcagcggggagcttaaaaggctgccgcgcctgacagggtacgcagagtacaggagcagtcagctgccgtcaaactttgcccatgatatatcc

SEQ ID NO: 3091 - DNA, 3505 bp, Unknown
  16S sequences of unknown bacteria
tacttctcgccctgcaagtgtggaatttctgcgccgaaggcgtggaaattatgcgcgcagcagggtgcggtcccttcaaacgcgagcccagcgaagcgggtcgcgtttgagagcttgtcaaaaatactttttgacaagctctcaagcgccccgccgacagataccggcggggcgtttttttgcgtacatattccggacaggccgcccataggatagggcagggagggatggcaatgaaaaaaacgcaaagggtgcgcctgctggtggtggcgggcgggatgctgtgtctgctggggctggtctgctgcgcccgggtgatcacatgccgggcagtggaggccaatagctggggcctgagcttccccgagcccgggcaggccccggtgggcaatgccacacaggacgcgctggcccagtacgacgccgccttcctgggtccgacagaccagccggtgatctatctgacctttgacgcaggctatgaaaacggctgcacggcccagatcctcgatacgctggaaaagcaccaggtcaaggcggcgtttttcctggtggggaattatatcgagcaaaacccagagctcgtttgccgcatggccaaagcggggcatacggtgggcaatcatacgtatcaccactacgatatgtccaagatcgccgacaaggcgacgttcacagaggagctgcgcagcctggagcagctctacgaggagacgacggggcagcagctttccaaattctaccgtccgccccagggagtctacagtcaggaaaacctccagatggcccaggagctggggtatcacaccgtcttctggagccttgcctatatggactgggtcaacgacaagcagccgacggccgatgcggcattttccaagctgatcccccggatccacaacggcgcgatcgtcctgctgcacagcacctcccggaccaatgcggagatcctggatgagctgctcacccgctgggaagagctgggctaccggttcggaacgctggaggagctctttgccgcatcctagcggcgatgcacaaaaatgccggtgcgtcataacatgaaatgagcgggttccaatccggtccggacctggaccggcgctgcgaattttatgaggaggtacgcttatgtcttgcaataccggcatttttgcttatgggaacagttggtggtggatcattgtcctgattatcatctttatctgctggggcggtaataactgctgcggcaatggctgtaacaacggctgcggctgcgagaataactgcggctgcggctgctgaaaacgcaccggcggcgcttgcaccgcccaaaaggaaaagacctgcggagcacccgcaggtctttttttgcgcgccgcaaggcggcggtgtctcgcgtttaagaatgcatcgcccgtttgcgccggtggtggacgagctgccagagcagcagtccggcggcggcccccagggccagcagcgcgcccaggcggatgggggaaaggtcctgcagataggctggctgcggcgtcggctgcggcgcttcggccggttcccggtcggcttgggcaaagcgctgctcatcggctgccagcttggcaagccgcgccgcttcccgggctgccgcgcttgcccgggtggccttttccgtattatagcggcagacggcttcattgacccgggcgacgacctcctcaccgtctgataggccgtaggtatagactgccagcaggtaaggctcctcggtgtagacgatgccgacatcgttttccgccccgtcaaaggagccgtacttgtgggcgatggggtactgggtgacatatttcttaaaataggcctccggttgggcctccttgaggtaggtcagcagctgggggaaccggtcagcgttctcgtagagatactggagcgtatcgcacaggaagcccgttgtgtaataattcccggtccaggcgatatctgcgatctcctccggggcaaggtgactgaagctggcaaacattttctccttgtactgacggaaggtgcctaagtgatagatcagcgcttcggagaggtcgttgttggaatttacgatgctctcataatggatctccgagagccgccgcccggcgatccacgtctccgggtcaatggccccggcggcctcctgctcgtaataatagaggttcagcggcagcttgtaggtgctggcggcgatcatccagcggtcggcggagaagctgtaacgctctttcgtcacggtattgtaatagcagatggagaaattctccgccgtcaggccgtattgggcctgcagctgggagatggtatccgccaaactcggcgccgctgcagtatccgccgcccgccccggcggggccagcagcaggcagcacagcagcaggcagagccagcgcagtgtctttttcatgggaaaacgatcctttccggtctgaccggtgtgtttttccctattttataacaagatgcggaaaaaagcgaccccttttcgcaaaacggcagaattttcaagcctgcccgtctggtcgcccccctcgcctttgacatttcccacctgatgtgataaggtagggggcgtaaaaaatagtctgaaagattttaaaagatggagcataaaaatggctgatttttctgatgtattgtttgtctctgattttgaccacacgatgaccgggacggacgggacgatcccgcttgccaaccgccgcgccattgcggcgtttacggcccggggcggctgcgtgacggtctgcaccgggcggtccctgccgctgtttcggtcgatgctgccgcagctgccggtcaatgcgccggtcattttgttcaacggcggcctttgctatgattttgccaggcaggcggccctgttttcctatcccattgagctggacgcccgggcgctggcggcggacctgctgcggcgctacccggatgtgctgctggaggtccaggccgaggaggcccactactgcctgcggccggatgcaaatctggaggaattttgccgcatctcccagtgcccaatccattgcctgccgccggagaaaatgccccgcagcattatgaagctggcgctgtatcaggacttccggtcgccggatgtggggcagctgtttgagatcacgccggacgaggagacgttttttgccgaggttgcggcgtatctcaatacccagtatgccggggtgctcagcgccgtgcgctcggccccgcgggtcgtggatatccaggctgcccaggcgaccaagggccaggcagcccgcaggcttgcccagctgctgggcaaaaagatcctagccgtggcgggggactcgcagaacgatctctccatgctcgatgcggcggatcttgcctttgtcccggcggatgccagcatcgacaaaacgccgtactgtgaggtcgcgccctgcagtaacggcagcgtggcgagcgctatcgccatgctggagacgcttttataaaggctctatgtcaatagttggggtagagacaaaacgcaaataattgggttgtgccg

SEQ ID NO: 3092 - DNA, 22407 bp, Unknown
  16S sequences of unknown bacteria
ctcgaaaccgccaaagcgaacaaacattcgccgacggtgatcgagtttatcatcgaaaaagaaacgaatatattacccatggttccgggcgggaacgcgctttcggaaatgatttacgacatggacgaggagggttgagcatggacagcgctatgaaaaagagatggatctcattatatgtggaaaacgacgtgggcgtgctcgccaagatatcgggcttgttttcgggcaaatcgtacaatctgaccagcctcaccgtcggggagaccgaggacgaaacagtctcgcgcatgaccatcagcctgatcagcgacgacaagactttcgagcaggtgaaaaagcaacttaaccgctcggtggaagttatcaaagttttggattttaccgaaaccgccattcataaaaaagaaattttgttcgtcaaactccgcagcctgaaaaaggacgaaatggaggaagtgttccgcatcgccgcggtgttcgggctgactgccgccgattacgacaagtccaccgtcattttcgagtgcgccaagaccgagtcggaaaacgacgagatcctacgcctgttcaaaaaatattatctcagccgcatggaagtcgtccgcggcggctcggtcgccgtcgaggcgatcagcaaagccgaacgctgaaaaaaacgcccgtatctcaacgggcgtttttttgtcagttataatcgaaaatcccgccgcgcggtggtataatcgactcgtaaacacggggaggtatcacttatatgtcagttacgaattatgccacggcggaaacaataaaatgcgtcgtcgacggggagatcgtacccgctagatccgcggcggcggacaaagtggcgcacgcgctttcgctcagcgtcaacggtcgggcggcaggctcgttcgacggctccgaggaagtttcattggatattcagacggcgacggcgatcgtcgagcgcttgtcggaacttcccgaagcgggcgagacgagcgcggatatcgtggggctggaaaacgaaacgtgcgtcaagcagaaatcgggcgacgcttattcctacgcgagcgtcatcgtcagggatacggataagatcgccgtcggcaagagcgcggaggcgcccgcgatgaacagcatttcggtgggcgtgcaggcgatctgttcggggatcaacggcatcagtatcggcagaaaatcggcggcgacgatcacggaggcgcttgcgatcggttcggcggccatggcaaaacagatcaattcgatcgccgttggcaagggggcgcttgccgaaggcgacgccgccgtcgcggtggggaaagtggcgcacgccacggcggcgaattccatcgcgctcggtcagggcgcgacagccgatacagcaaatacgatttgtctggggaacgataagatcgccgctctgaactgtcaggtagatctgagcgtcacttccgacgagcgcgacaaagcagatatcgaagaactggacaaggaaaaggcgctcgaatttatcgggcgcgtgcaggcggtgcgctacgttaacaaccgacgttcctattatgccgaagaggggaaaaaatacgatagagaggcgcacgggcgcggcgagaaaaaggggaaaagaaagcgcgtgggcgtgctcgcgcagcaagtgcagaaagaacttttcagacttttcagtacggacaatttcgccgatatcgtcaacgacgacctgtacgacgcgcccgagcggaaggggacggaagagaacctgctgacggtgcgctattcggcgtttattccttttttgatcgcgtccgtgcaggcgctcggtgaaaaagtgcgcattctcgaagaaaaaatcgttgacaaatccgcgcaaaagtagtatcatatttactgcaagagcgcgggggtgtagctcagttggttagagcgcatgtttcacatacatgaggtcataggttcgagccctaccatccccaccaattcgttcgtaaagcgaacgcgcagaaaagtccgttacaaagtaacggactttttttattgccatggatcaccgtgcgtttgttttttgaatgtttgtagttgcgatgctctctcttttttaaccgcgtccatatcgtcgggcgtatcggcacgatttgatttgcgaagatttttcatgttccgcatctaataaatttctcagatcacgatcgtccgtgattttaattttaacgcgcgttgccatacggatactataacatataaatttatatagtcaaaccgaaggacatctcgggctatcaagaagacaaaaagattgccaaaatttggttatattacaaaatttgggtatagtaatatatttatgactgacaaaggagtaaatatattatggaaccgtatcttgcacttataactcgtatcaatgaactcatggcccgtaagggaatgacgatgtatcaattggcgcgccgcagcgcgattccgcattcgactttatcgagcattttaaacggacagacgaaaaatacgggatttttgaacatcatcaatatttgcagaggattggagatcactctgcaggattttttcgattctcatcttttcactcccgaaaatttattggataattgaagcgaaaaaccccacatcttttgcggcgccttattttagatatttgttgacaaatgcctccgaagatggtaacatgggggtgttatgataatatttaaaaaagataaggaatcaatggatattaatgaattttacagggagatcggggtggacgcgaaagacgttctgaaccgtcttggcagcgtggttctgataaaaaaatacctcaacaagtttgccaaagacggcacgtttgccgatttgaaaaaggggatcgcggaaaaagactatcaagcggcttttcgcgcggcgcataccttgaagggcatctgccttaatctcgaattattacccttgagcgaaatatccgtgaacttgacggacatactgcgcaattacactcccgatcgcgaaagcgatctcaatggaacgtttgaaagtttttccaaagcatattcggaaatcgtcgcaaaactcgaaaacttgcagtaggtcggagcgcaaaagatgaaaaattccaaaaagaagatactgattacggacgactcggagatcaaccgttctattttgtcggatatgctcgaagacgaattcgaaattatcgaggcggaaaacggattgcaagcggtgtcctccctgcaaaaatacggcgacgagatctcgctggttttattggatatcgttatgcccgaaatggacgggttcgaagttctggcgatcatgaataaaaaccattggatcgaagacatacccgtcatcatgatcacggcggaaaatacgccttcgtacgtcgaacgcgcgtacgatctggggatcacggatttcatcaaccgtccatttgacggccgtatcgtgcatcgccgcgtcatcaataccatcatgctctattccaagcagaagaaattggtggggcttgtcgccgaccagatctacgaaaaggaaaaacagagcagtctgatgatcgagatcctcagcaatatcgtggaatttagaaacggcgagagcgggctgcacgttctgcatatccatattctcaccgaacttctgctgggccaactgatccgaaagaccgaccgctataaactttcgcattcggatatttcgctcatcggtatcgcgtcggcactgcatgatatcggcaagatcgtcattcccgaaaccatcctcaacaaacccggcagtctgactgccgaagagttcgaaatcgtcaaaaagcacccggcggcgggcgcggcgatgctgaaaaatctgcctttccgccaaaacgaaccgttggtcaggacggcgtatcagatctgccgatggcaccacgagcgatttgacggcaagggatatcccgacggattggcgggggacgagatccccatcgccgcgcaggtggtcgcgcttgcggacgtttacgacgcgctgtcgagcaagcgcgtttataaggacgccttttggcacgaaaagacgctcgaaatgattttgggcggcgaatgcggagcgttcaaccccttgcttttggaatgtttaaacgacatttccgacgtgttgcagggagaattaaaagtcaattcgcttgtcgatttcaatagaaacgaagtgcgcaatatcaccgacgaaatgatcaagcacgaggaattatccgcttccgagcgcacgctgcgccttttggaacatgagcggacgaaatatcggtttttcgcgtccatgtccaacgaagtgcagttcgaatataccgtttcgcccgcgatggtcacggtttccgagggcggagcgaagcaactgggaatatcggaattcattatgaatccgttcgaggataaagaaatcaattccgtattccgcgccgacgatctgaaacatatggaaacggcgctgaaaagcacaacgccgcgggagccggtcatccagcgcgtctgtaaaatattcgtgaaaggggaagcccgctggtgccgcatcatcgcccgttcgatgtggtcggcggacgatatcccgcagtttatcggagccatcggcaaattggtggacattactgacgagcagcggagattgacgaatctcgaaaaaatggcgcatcacgacacgctcacggggcttttgaacagcgttgccgccaaggcacagatccttgaaaggctcaaaaaaaatcccgggtcaaaattcgcgctcatcatcgtagacgtcgattatttcaaacaagtgaacgacggatacggacacctgttcggggacgagatcctcaaaattatcgcggataagatctcgcaaaacgtgacgcccgacgacgtggcggcccgtatcggcggcgacgagtttttattgttcgtaaaattcgaaaaggatatcgaggggcgcatagaaggaatcttcgaaatactggcagccaataaacaggccttccgtgtttcggtgagcatgggcgtcgccgtcatcgacgggaaaaacgtgcgttacgaaacgctttttcatcgggcggatcaggcgctgtacgcctccaagcgtgcggggcgcggcacttaccgtatttacgacgagagcatgtgcaatatgttttcggcgctctcgcccatcgacggagaagtcgaaaaggggctgcaaccgtgaaaaacgtaatcagaaagatcgcgcgaactttcgggctgctgcttttatttttcgttttcaccgtgcagttgatgccgttcgcgccttcgcacgcggaagagacagcgtccgttctcaaagtcgccttcccgatcgtggaagggatcagcgaaaagacagccgacggaaaatatacgggccttatggtcgattatctcaatgaaatttccaattatacgggttggaaatacgattacgtggacgtgaccgacgtttccgatatgctcaaagattttacggacggaaaatatgacttgttgggcggcgcctattatatgaaatcgctcgaaggcatatacggatacccccgatacaatatggggtacagcaaatccgtacttttggcgcgttgggaagacgagagcgttcaaagtttcgatctgaaaacctttaacggcaaaaaaatcggcgtttataccaacgccaaggaaaatatccgtcgcctgaaacaatatttggcgatgaacgatttaacctgcgagatcgtcgaatatcaatacgcagacctttccgaggacgggaatttatataaatttctcgcagacggcagcgtggatctgctgttgggaaacagcaacgatatcggaaaaggcttccgcagcgtggcaatgttcgaatcgcagccctattatatcgtcacgcagcccgatgccgcggaattattaaaagaactcaacgatgcgttgggaaagatctattcttccaatccgagtttcgcggaagaacggtacaaagccaatttcggggatatcatttcggaaaatatcaaactcaacgacgaggaactggaatatattaaaaacaaccccgttgtgaaggtcgccgtgccgagagaagcgcatccgctgttctgtgtaaatcaaaatgcggggcacagcggcattcttcccgaagtactcgaaaagataacgcttaacacaggtcttcaattcgaatacgtacagggaaaaaattattccgaaaccatacgtatcgtacagaacgggcaggcggatattttaggatttttcctcgacgatcaaagcgcggcggacgctgccggattcgcggtgaccagatcgtacgcttccgtctaccgcacgctggtgcggaacaaaaaggtcagttacccttccaaggggcttaccgtagccattgtcgagggacggcagaaacccgatgagatcgacgcggaagtaaaatattatcccgatatgccgtcagcgctccgcgccgtcaaccgaggcgaagtcgaacttgcgtgcggcatttccgcgcagattgagaggcagatacaagaggagcactttaccaatcttgtgccggtggcgttggcggacagtaccgaaacgctcaatttcgcggtgaagaagcctgccaagacgcaacttttcactattttgaacaaagccgtcggtatgatgagcgaagaggagatcgcctccatcgtcaaccgaaatatcgaatctgtcggcatcggcacttatactctgacggactttatctattccaatcctttcgcctttctcaccattatgtgcgcgttgctgctgttgaccgtggcgatcattattatcgtggcggttttccgcgtgcgttccgcgaacatggaactcgcgctggaaaaatcagacgcagataaccgtgcgaaaagcgagtttctctcgcgcatgagccatgagatcagaactcccatgaacgcagtcatcggtctgacggatctgaccgccatgcaggagggcgttcccgaacccgttcgcgataatctgttcaagatccgttcctccgcgcattatctcatatcgcttctgaacgatatactcgatatgagccgcatcggaaacgatatgctcgccatcggcaacgaacctttttctctgtcgcagatgcttgacgaaatgaacagcatgatgacggcggaggcgcagcgccgcggcatctcgctgaccgtagagaacgaagtaaaggacgacgtgctttcgggcgactgtatccggctgcggcaggtactgaccaatcttgtttccaacgcggtaaaatttacgcccgcgggcggaagagtgaacgtgcgcgtaaaatcggaagaaaaaggtttcgtttccttttccgtcgaggatacgggcgtggggatcgcgcaggaggactgcgaacgcatttttctgcctttcgaacaggcgggcaacagttatgcaaagagtcagggaacgggcttggggctttccatcagccgctctatcgtcgaactgatgggcggcacgctgcaagtaaaaagcgtcgtggggcagggcagtgaattttatttcaccattccgctggattccgcggaagaggtcgcaatgccgcaggtgtctgaagagggcgattttttggagggcatgcgcgtgctgattgcggaggacaacgatctcaacgccgagatcgcgcaggacattctcggaatggtgggcgccaaagtaactcgagtggcggacggcttgcaggccgtcgaagaaattgcccgcaacggcggacagtacgacgcggtcctcatggatatccagatgcccgaaatgaacggtctggacgcgacgcgaaagatccgcgagatgcacacgccgtacgcccgtatccccatcatcgccatgaccgccaacacctttcaggaagatacagacgcggcgctcgcggcgggcatgaatgatttcgtatccaaaccgatcgatatcaatattttatacaacgccttaaaagaggcgaaaaaataaaaaatccggcgcgaggcgctgtccggatggttgtgtgaggtaaaaatgaaacacactttaagttatatcgaggggcatccgaggccgcaattcacgcgtcgcgcctttatatcgcttgacggggaatgggacttttgtttcgatgaaaaaaattgcggaaaagcggatcgtttctatcgggatttccccgcaaaaccgagaaaaatacgcgttccctacgcttaccagagcgaggcgagcggcataggcgaagagagaaaatgcgacgtcgtctggtatcggaaaagaacgaaggtcagcgtccccgcaggtaagcgcgcgcttttacatttcgagggcgcggactatcttgccgaagtctggataaacggcgcatttgtcggcagccataagggagcgtacgcgcgctttaccttcgacatatctgagtatctgtcgggagaagatgcggagatcgtcgtgcgcagcgaggatacggaatcgtgtgcgcagccgcgcggaaagcaaaagtgggaggcgcggcctttcggttgctggtacaccgaaacgacgggcatctggaagagcgtatggctggaatacgtagggaagagttatctcgagcgcgccaagatcacggcggatatttccgactattccgcgagattcgagtacgatatcgcgggttttcgggacgatctccggctgaaaacgaggatttcgtttaacggaacgaccgtcgcggaggacgaatgcgccgtgtgccgcccgcatgtcgctcaaactttcgatctgacttcggaaacagatccgttcaaaaaacatttctggtttccgcacgcgcccgaattgtacgacgtggaatatttcctgtatgaaaacgggaaggagatcgaccgagccgcatcctatttcgggctggtcggttataaaacggaacaaaacaacgtgacggtcaacgactatcccgtgtatttgaaaatggtgctcgatcagggctatttcccgcgcggctggtacacgcccgacgaagagcagatcgtaaacgacgtgcaggcggtgcgcgcgctgggcctcaacggcgtccgcaagcatcagaagatcgaggacgaacgcttttattattactgcgacgtactcgggctgtacgtatggctggaaatgccctccgcgttcgagtattctgacggggctgccgtagaatttaccgcccagtggctggagatcctgcgacagtacgaaaatcatccgtcgatcatggcgctcgttccctttaacgaaagttggggcattccgcaggtgttttccgatcttcggcagcaggatttttcgcgcggcgtttatcgcctgagcaaagcgttgctgcccgaaaaactcgtgatttccaacgacggatgggagcataccgaaagcgacgtcgtgaccctgcacaattacgccgaaaacggcgaacaactcaaagcggtatatgattcgttggaggacgccctgcaaaacaacaagacggcgggcgttccgcacaaattcgccttcgcaaagggattttcgtatgcgggccagcctgtgatgctctcggaatttgcgggcatcagtttcgaaaaggaccgcgcgaagggctggggctacggcgaacccgtcaaggacgagcagagttttctcgcgcgcctatcctccctcgtatccgccgtccgcgcggaaaagggcttttgcggctactgcataacgcaactgacggacgtgcagcacgagatcaacgggctgttcgattttcagcggcgctgcaaagtggatcaggaaaaattaaaacgaattttctcggaataacgaaaaaagaccggcgtcggatgatgtcggtctttttttatgcgcaaactatacgaggggcgaccgcaacaggggcatggtcgtttctctttggatgtaattgcagaaaattcctatcgtgcggctttgcagcgcggggttggagatgcggtccatcaaagtgcataccgcctgccttcccaagacttgtttgtctatattgatggtggaaagtttgggcgaactcaaacggctttcgggaatgttgtcgaatcccaacacgttgattttgtcgaggtgcagttttttcatctgttttaaggcgtcgatgacggaaagcgcgataaaatcgttggcgcagacaaaacaatcgggcaagcgcacaaaacgggagaacgcctccgcgagcgcctccgcgctgccgtagggaaaagaattgtcgcgcgttaaagacaattcgggagaataggggaggccctcttcgtagagtgcctcgcgcattcccagaaaacgttcgtaaaaacttttgcagttgcgcggatttccgataaaggaaaagtcgtccgcgcccgccgcgataagttttttgcaggctgatctgacggcattcacattgtcgggtagtacgatatcgtattcaccgttcaaatcttcatcgccgtaaaaatgatccataaaaacggtggggatgcccagcgacaagatcttgtccgcactcctgcgcgtgaagaattcgatgcagatgatgccgtttacgtcgaactgccgaatgtattctttcagcgtttccagatcggaattggggcggaatatatattgcagcacttcgagcgagtgcccctccgcctcggacatgatgccgcggatgagatagatatagtagtttgccgaaatcagcggaacggaggaaagaatcaggattttcccctcctcggcagcactcttttcgggggcaatgacatcgaaacttttataacccatacgcacggcggtatccagtacgagcctgcgcgtctttgcgggcacgtatttgccgttgagcgctttggaaacggtgttgcgcgaaagatgcagcgcgcaggcgatgtcgttgagtgtgatggcttttttcatctaattctccttttctctatcatatcatactctgcgcgttttggcaagaaagaaatacgtatgtaacaatttatttaaataattttacatatgcacaaaaacgtgacaatatttttctgtttatcttgattttcgcaagcagaaagttataatatgtgcagaaggaggggcaaaaatggagcaagtgaaaaagacaaaaatttccttgaatgaaatcaagaagcggcaaaaaagaaactatatcctgtggcttttcgtgctgcctgcctttttgtttattctgatattcaactacgttcccatgtacggggtccttatcgcctttcaggattttgtgcccggggatgagatcctgtccgcctcgaccatctgggtgggattggcaaactttcaaatgtttttcgaagattacatgtttttgacgctgctcgaaaatacattccttctctgtttctggggattcgtcatcggttttccgctgcccgtcgcaatcgcgctgatgctcaattccatgcgcaataaacaggcttcgcgtatcattcagatcatctattatatcccgcactttatttcgctcgtcgtcatggtgggcatgctctatctctttttcgggcagttcggactggtcaacaacgtgctggacgtcttggggctgtcgcgctattccttttttctggaagaggacgcgttccgaccgctgtatattttttcgggcgtatggcaggatttcggctggaacgcgatcatttacctcgcggcgctctcgggcgtagacccccagcagcacgaggcggcgctcatcgacggcgcgtcccgcctgcgccgcgtgttcgccatcgactttcccgccattgcgggcacggtgtcgatcctgctcatcctctccatcggcaatctcatctcggtgggctatgaaaaagttttgctcatgcagacggacgcaaatgtgggaaaatctgaagtgatcatgactttcgtctataaaaagggactgacgggctacgtcatgcaggggtattcgacggcggtcggactgttcaattcgatcatcaacgtcattcttttggtcacagcgaacgccgtcgccaaactgttctccaagaacacgctgttttgaggtcggggtatggaacgaatgaataaactgagcaaagccgtctcaaaggcagacaggatctactatatcgtcatcgacacatttctcattctcatgctgctcgccattttgtacccgctttactttatcgtcatcgcctcgatctccgatacggacgccatctttaacggcgaagtgtttctctatcccatcggctttaatttgaaagggtacgccgcgctgttcgaaaaccgcatgatctggacgggctatctcaatacgatctggtacacgcttttgggaacggcgatcaacattgccgtgaccattcccgcgggctgggcgatttcgcgaaaagaactcccgtggcggaagtttatcaccacgtattttattataaccatgtttttcgggggcgggttgatccctttttatctgctcgtatccgatctggggcttttggacaatccgctttcggtcattctgccgtacggcgtttcggtgtggaatatgtttatggtcaacgctttttattcgagcagcgtgccggacgagatcctggaagccgccgaagtggacggttcggggacgatccgcacctttttcagcatcgtcattccgctttccaaacccatcatcgcggtcatggtgctcttctacgcggttgcgcactggaacaactatttcagcgccttgatctttttgtccgagcagaagtatttccctttgcaactcgttctcagagagatcctcatcatgacggaatcggcgggcggctcggctggcgacgcggggactattctcgaacaggcgaaactcgcaaactccatcaaatattcgtctattatcgtatccacgctgcccattctggtgctgtatccgttcgtcagtaaatttttcgaaaagggtgtcatgatcggcgctctcaaataaatcgtttcggtaaggaggtaaaacattgaaacaaaaaacctttgcaaagatcgcagggctcgtgctctcggcggcgcttcttttttctgcggtcggctgcggcgggaagggaaagacgcaggacaaggactgggaaacgctcggctatcaatgggcggatacgcaaaaaccgatcgtaaaggaaaaagggctcgtcgaatacgagatccttgcgcagaaaaattcgctcacgcccgactataatacgctgaaagtatttcaggatctgtacgacaagacaaacgtggatattcattggaaaaatattacggaatcggcgtacgccgagcgaaagacgctcattttaagcgataaggacaattggcccgacgccatctatcacgccggttttactaacgccgaggtggcgcgctattcccgtcgcggcacgatcctgcccatttccgattatctggaatatatgcccaatttcagcgctatattggagcgccgccccgatatccgcgccgccatcacctcgttcgacggcaagatctactctctgccgcgcatcgacgaaatggggctgaccgccaacccgaaccttttatttataaacaaaaattggttgaacgcgctcatcgacagcggcgacatctcctttctgacgcacgcggacgttgcggacggactgcaactgaatttgcagcagatgagcgaaattctgacgctgttcaaagacaaggacatgaacggcaacggcaaagacgacgagattcccctaagtttcgtgttcaatcactggcaaggcaatcagaccgatctgtacggagcgttcggtgtgcccgataatcccgatcatctgaccattataaacgacaaggtcgtctgtacggcgacggacaaaaaatttcagtcggctaccaattttcttgcggattgggtcaaacgggagatcgttccaaaatcggtgttcgaaaacagtcaggacgcctttctcgccagcggcaaagggatcgaaaaactcggtgcgttctattggtgggaaagcgaaacggtcgtttccaatcccgcaaattatattctgctgaatcccttgaaaggcatgaacggcgaacaggtcctgggcgtttccaactatcccgaaatttccacgggcggtgtggtgctcatgagtacctgccccaaccccgaagtgctcctgacttatttcgaccgtcatttcgatcccgtcgaatcggcgcagctcaattacgggccaatcggagtcgtgtatgaagaggagcgcgatgccaatgggaaattggtgcaaaagcccacgcccgagggtatgactgcggacgagttccgtctgcaaaacgcgcccatgggcatcatgtgtcttaccgaatacgaatgggacaattacgtgaatatggaaccgcgcgcgcagcttcgtctggagcgtctggagaaatacgccaatccgtataatcccgacaacgtgcagcgtattcccacgctcagttattcgctggaggagatcaacgtattggcgcagtacgagaccaatgtgcgttcctatatcatgcagaatctgatgaaatggctgttaaacggcggcgtgaacgatgcggattttgccgcattcggcacaaaactgaacgaaatcggtttgcagaaagttctcgaatgttatcagtcggcgttcgggcgctatcttgaaaatcaatcataaaaaagggggattattcctatgaaaaaatttgcggcgatcttatcgctggtactgtgcctcgctttttttgcggcatgcggcgaaatcgaagaaaataccaaacccgtcatcagcggatttgcggatacgtacacggtgaaagcgggagaagagttcgacgctttacagggcgtgagcgcgttcgacaaggaggacggcgacctgaccgacaagatcgtggtttcgtctatgcccgaagtcgagtttcgcggcggcaaggcggtattcgcgcaggagggcagttacgatattatatacagcgtgacggacagcggaaaactgaagacggaagagtttgccgcgcttacggtgacggcagcggacgcggtggaaacgctttaccacacatttgatttttccaagagttcggcggaaatcggccgcggcggctgggacgtcacgcttgcgggagcgggtgcggcgaccgtaaatctgcgggaagggctgttatacgccgacgtgactgcgggcggcgcgggtgcgggcgaggtcattttgcaaaagaccgatttcgcagtggaggcaggcgcgtcgtacgacgttagactgtatctcggcgcgacggcaaacctcaatgtcctgaccgcggtgcagaatgcggacggcgtcaacgtggataccacgttccgcagcgtcgaattgacggattccgtgcagatcgtgaccatgacctttaaagccgatacgacggcggacaatatgaagatcgtcgtctatatgggcggcggcgcgggcgcgtacggcgtgtatctggagaaggcggagatctattcttccacgggcgtggaaaatctgaccgaagtgtataagcaggacttttccgacgcggcggtgatgaacggcgttgccaacaccgctttcgacgaagtgagcgtgctttccctttccgaagggaagttaaaggtggagatcccgaattatcccgaaaaccgcgaggaagtatggctcagaagtttttccgtcgcgaccgatctcgatctgaaagagggctcctcgtaccgcgtgacggcgagtgtcacggcgacggcggcgcagacctattatatcaactatgaaaacgcggaattagccttcgaaagccgcgcgggacagaacggcggcacttgggctgtgggcggcaacgctctttccgtggattttaccgcgagcaaagacctcgaaaatatgtcgttccattttcaactcggaaaggcgcccgcggaaacggcttccaacgtcattaccatcgataatttgaaagtggaggagatcacttccgttccagacacggtcaaagaaacgacgcgctttatgccctacggcgaaaataccggttacgacgtattcaacggttcggacgatacgagcggcaaattcgacggtacggggcgcatctatacggacggcggcgcgctgcactatatcgtcagcaatgtgggcagcgtggattattacaacaaggtgatcttccgcctcgaactcgaagaaatggcgacctataaattcgtgttcaaagccaaggccgacaaggaagtcaagggcgcgtttctcgtcaatctgaccaacggcgcgtacgatcccatcgcgctcgcgttccccgtgctcacgacagaagcgcaggagtttaccgtgcttgcgacaagggacgtgcttttggataattcttacgatatcatttaccagtgcggcggcgcggacaacgcgggcaaaggcgcgctgcatatcgaaatcagcgatttcagagtgtataagatcgcatagcggagataccgatgatcagaaaaattcttgcgctcgcgctctgcgcggcggtggggctgggctgctgctccctcgccgcctgcgcgaaaccgcacaaagaggattacgagcaggggaatataaatttatttcccaaacccgccgaagggtacgcgggcgaccccattcccttttatgacggcgaaaatctcaacgtgtactatatccacgacgcgcgcggctggaacgagggctattttcatccctggaatctgttccgcacgaaaaattataccgagtgggaagataaggggcgcgtcatcgagggcaacttcaacgacaaagccaatcaggattacggcatcggcacgggcaccgttctcgaaggccgcgacgggcggtatcacgccttttacacgggctggaacggctaccccgaagcggacgtggagtatagcgaaaaggtgcagcacgccgtatccgacgaccttttgaactggacgaaaatccccgaggacggattttacggcggcgtggacgatttccgcgatccgcacgtggtgtgggtggaggaagagaaccgctactggatgctcgtttccacctggcgcggacagggcgactggacggctgtgctgaaactctatacgtcttccgatctgaaaacgtgggaatacggcggcgtgtactacgacgacgcggtcaacggcgactttatggagtgtcccacccttcttcggtacaacggttattggtatctctcctattttcagaaagcggtggacggcacgaacgcgcgcgtcacgcgctacgtctataaaaagaacctttccgacgaatggatccgtcccgaaacggactgtttcgacggcgcggggctgtccgcggcaaggctggtgcagtgcggcgaccgtctgatcacggtgggctggatcggtacgaaaatctccgattacgacgcgggacagtttacctgggcgggaaatctcgctctgcacgaattgaaacagcgcgccgacggcacgttatacgtcgtgcccgtgcgggagcgggcagaagcgctcgcgcacgaaacggcgtacgagactgcctacaagggcgacgccgtcgaatatcaaatcggcagcgcgcggtttgcaaagtcgccgcgctatcaatatcttctgttcgaacccgtcaaaaagggcgcgttgaaactggattttacgctggaagccgaagataaggcggggctgacctttgcgcgcggcgtatcgggctacggcgaagtatgcgttgaattcgacgtgaaggcggggcttttgtccttttacaacaccaaaccgacgctgacgcagacggcgccctcgcaggcgttcgtaaaactgccgaatgcggacaaattcgaatgcgaactctatatgcagggggaatgtctcactctgtacgtgaacggggagatcgctctttcaacgaggatctacaatttgacaggttacggtttcggcttctacgccgcgggcgaaggggcgaaattttccgatatccgattttatgactgaggtaaaaaccatgactatgcgtgaaaagatcagggcgtctatcgcccacagaaacgttgatttcgtgccgataaacgtggaaacgaccgcgggtttcgagaaaaatctcgccgccgtcgtaggcgaaaaaaacgtggacgcggcgctcggcaatcatatgctgcgcaaaaagtacaagcgcaacaaaaaactcgaaaacggcgacgaactcgacttgttcggcgtaacctggcaaacctccaaggacggcggcgacgtgggtatcgtcaagacgtatccattggaacattgtgaattggaagattatgcgtttcctgcggtctgcgaagatctggcggaacagacgctcgccgcgctggaagcggaaaaggagcgctataccatgttttccatcacgatgggctttttcgagcgcgcatggagcctctgcggtatggaaaatctgctgtgcgacatgattttggaacccgaaaaggcggaacgcgtattcgacggcatctacgagcatcacgacaaactgctggatataattctgaagcgcgatttcgacgccgtctatttcggggacgactgggggcagcagaacggtttgatcatggggcccgagatgtggcgcaagtttatcaagccgaaggtcggtaaactgttttccaagatcaaggcggcgggcaaacagatcgtattgcattcgtgcggcgatcttcgggagatcctcggcgaggtcatcgatatgggcgtggacgtttataacaccgtacagcccgagatctattctttaaaagatctgaaaaaagaatacggcaaagatctcaccttttacggcgggatcagcacccagcagtttctgccctttgcagacgtcaaagaagtgcgggaaaagacgaaagaggtgctcgacgtcatgatgcggggcggcggctacattttatcgcccacgcacgcggtaacgcccgatattcccgtggaaaacgtgctcgcgctcgtggaaacgggcagagaatattttaagtagaggatcgctatgaaaaaaatcagggcgctttcggtgggcgcggtgctttgggacgttatcaacgagaaggaatacatcggcggcgcgcccttcaacgtggcggtcaacttaaaaaggttgggcgcggaaagcgcgttcgtcacctgcgtggggcgcgacgcgcgcggcgacagggcgctggaaaaaatccgtgagtacggcgtacattcgttcgcgcagcgggacgaaagatttgcgacgggcgtcgcggaggcggtcttggacgagacgggcagcgcgacttaccgcatcccccgcgcagcgttcgacgaaatccagatcggcaaagaagatctggcggcgctgaacgcgtatgcgcccgatctggtgtgtttcggctcgttcgagcagcggtttccgcgttcccgcgcctccgttcagagcattttacaaaacgtgaaagcggactgcgtatttttcgacgtcaatatccgcatggatttcgcggaaaaggaagtgatcggattttcgctgcaagcgtgcgacgtactgaaactgaacgaggacgaatgcgcgcttttggggaaattactttacgggaaagatctttgcgtccgatcgttctgccgccgcgttgcaaaggatcacgatatccaaacggttctcgtgacgctgggcgcgaaggggtgtttcgtctatacccgcggcggggagaggcatatcgaatccgctccttcgtcgggcggagataccatcggcgcgggcgacgcgttttcggcggcgtttctgtacgcctacctttcggggaaggacgccttcacggcggcgcactgcggaaatgttttgggcgcgttcgtggcggcgaatacgggcgctctgcccgcgttttcccgcactgtcacgcacactttacatagcataatcgacggagaggagacatcatggcggaaagaattttcagcatcggaaaaaaatatctgatttttcccatcggcggcaacgcggtcgcggtcaacgtactgttatcgtgcaacggagaatctctgtacgatctcgatctgcggctttgcgataggcccgattttatcgcatggctggacgcggagcggtttatcggaaaaaatctgtgtttttcccttgcgggaaacgccgtacttttggatctgatagaagagagcgattcgctgcccgagggcgtgtatcgggaagaactacgaccgcaactgcattatacgcctatgcgcggctgggtgaacgatcctaacgggctggtctatgctggcggcaaatatcatcttttttaccagcataatccgtacgacgtgcgctggggcaatatgcactgggggcacgcgtgctcggaagatctgatccattgggaagaggcgggtgaggcgctttatcccgacaaagacggcaccatgttttcgggctgcggcgtaaacgatacgcaaaacgtcagcggtctcggcaccgaaaaagagccgccgctcttgctttactatactgccgcaggcggcacgaaccgcctttccgcgggcaaagcgtttacgatctgtctcgcgtattccctcgacggcggaaagacattcgaaaaatacgctcaaaatcccgtattgcccaacgttacatacggcaaccgcgatcccaaagtgatctatcacgcgcccacgaaaaagtggatcatggcgctgttcatggacggataccgtttcgattttttttcgtcggacgatcttttaaactggaaattcgagtcggaggagatttttccgccgctcaacgagtgccccgacctgttcgaactggaaggtacgggaaagtgggtcatgctggcgggcgccgattactggggcgatcacagtgtgggaaaatactatatcggcgcctttgacgggcatcggttttgtaaggaagacggcccgtatccgatcgatttcggcaaggatttctattcgttgcagaccttcgagggggatccgtgcggccgccgtatcctcatgggctggcgcacgcaaaatttttatttgcccgaacgcaacggcatgccgttcaacggcgagttttccctgcccacccgaatctcgccttgcgagatcgacggcaaactgcgccttgcgcgctatcctgttgaggaatttttcaaaatacccgcctcgcgggaatgggagtgcgttttgggcgcggtgagcgcggaaaagcgcgacgaacgcattttaaagcctttcgacgcgcgatgtctgtcgattttgcttgaagccgaattcgactgccacgccattctggaactggatttcggcggcgaactcgtgcgatatcacagcgaaacacagattttgcaggcgttcggcgtcaataccaaagtgcctctcgaatcgggtaaactcagccttttagcaatacgcgacagtatgagcctggaactgtacgcgcaagggggcaaataccccgtctgcggctacattttccctcgaaacgacgaaaattccgcgaccttgtaccgcggcgcgctgcgcgcctgcgaaatgcaagtcaggatattgcggagcgtctggataaaataatcgccgcgatctgtcatcggagcgcacaaaaagtcaagaacttttcgaggaaacgtgttataatcatcgtatacggaaggagatttaccgaatggattggatcacggggatacagcgggcactcgattacgcggaagagcacatggcggaagagatcgtctatgaaacggcggcgaaacaggcctattcgtcatcgtttcattttcagagaatattcgccatgctgtgcggctattctttcggagattatatccgcatgcgccgattgacgctcgcggcggaagatctgcagcgttcgaaagaaaagatcgcagatatcgctttcagatacggttatgattcccccgaaagttttacccgcgcgtttacgcgtttccacggggtcgctccgtcggctgcgcgccgcggcggaagcgtcaaatccttttccagactttccgtaaaacttattttgtcgggaggcaatacgatggattacaggatcgaaaaaaagcaggcgtttcaactcgtctgcaagaaaaagtatgtgaacaagccgcagggcgacaccgccacggcggatatctccgcattctggaacgaatgcacgaacgacggtacgatgcaaaagttgtgcaaatacgcccgtttcgacaacctgaacggcgtgctcggcgtctgtttttcgaaagatatggcggattcgggttttccctacgccatcggcgcggagtataacggcgcgccgctcgacggcgagccgctggaaatcgtcgggatccccgcgcaaacgtacgcggttttcgagtgcaggggcaagatgcccgacgcgtttaaaaagacgtatctgcaaatttgctcggaatttttcccgcagagcaattacgaatacggcagcggcgtcgaactcgaagtgtacccttcggacaacgtggacgatcccgaatattattgcgagatctggatcgccgtgaacgaaaaaaagtaacacaataaaagaccgccgcacggtaccgtgcggcggttttgttt

SEQ ID NO: 3093 - DNA, 22230 bp, Unknown
  16S sequences of unknown bacteria
cgctcggggcattgcaggctattcaatggcaggcctatttgctctgtatagcatatatcatacggaccttttttcttctgccgcttccgtttccggctccttatggtttgacggctgggtcgaatatgcgctgtcccattccttttcggtgtcttctccgtacctatacctttctcttgggcaaaaagagcaccgtgcacgcaacgccagaatggcccgggtaaaaagatgtacgcaggcattagcagatgcttggcagacgccgcttatcctccatccaggtggacattttcaagaccccgaactgcgcctagcacagggaatcgacgctctaacactgtatttatcatcacaataaaaaaggagcacagccgctcctttttaagcacgaaattggatggtattgtttccgtcgttccaaagacgctccaaattgtaaaaatcgcgttcctcctgatgaaaaatgtgaaccagtacatcgccgtaatccaagacaacccaacggccttcgttgtacccgtcgctgcgcagcggcgacagcgccagctgctcttgggcagcctcctccgcagcttgggatagcgcccgcacctgaatgggattgcttccggaggctaccacaaagcattccgctacaattgtcatctctgccacatctatgatctgtatatcagacgccttttttgcatccaatgccttggccacacattcagcaatctttttcgcttgttccgtcatcattttgctccttttcttgtaattgtttgaaccatgtcaacacctcttgggttgccggatgctgagggatgtttctctgtgccaagtaaatcatcgtgtgccgggcgcattgatacagcgcctccggcaggcgatttaaactcagcctgcgcagttcatcggcctctggaaatttcctatgcggctcaatggagtctgccaaatagatgatctgggccagcgttcccatgccgactttgcccgtcgtatggtatgtaatcgcttccaaaatatccggatcgtgtatggcaaattcctcctccgccatttttgcagcaacagggccatgcagcagatccggatgtgctcgttcaaaatcgccgatttccaagccatatgcctgtgcctttgccaaaagccgatcggagggcagctgcttcgcataatcatgcaaaagagccgccgtacatgctttttcctcgtctacgccatacaaccgggccagctgtatagccgtcatttccacccctagcgtatgctgcattcgatgatgagacagcctctgcgatacaattttccggatcgtagcgttattgggcatggtacacctcattttccagcaaatatcgctctaccgacttagggacatattgcgaaatcggctggccgcataacagacgccggcggatctctgtagaggatacatgtggaatcttacaagtgctgatatgaatcttggccccataggtttgttccatgtaccgtttcgcttccattgttttctccatattcatgccatcccggaaaaaggcgataaattcacacagcgtacacacctttgcaatctccctccaattcggcagatcgcacaatgtatccgcgccaatgataaaggaatagagtgctggctttctggcatgcagttggtatagagtatccacggtataagttgttccccttcgtttgatttccatcggggatacgcaaagccccggctccgtttccaccgcataccgaagcattgccaagcggtgctcagcgcttgcaatttgctctccctccttatgcggcggctggcctgtgggaatcaacacgacacgctccaaatcatactctgccagagccatgcgcgccatcatgatatgcgcattgtggacaggattgaacgtgccgcccaaaataccaatatgtgctttttcaaggcagatccgcactgaagaagcaaaggtgaattgcgtttccgtgatactctcctcctattggctttattataaacgacaatcaacagcaaatgcaaaacaatcgcataaaaatgtctaacttttccatttatggcaatactatccgtaacaagggaggtatatggatatggaaaatagacagctacgccagtattatcggcaaacactctacggaaaccgcagcattttggctaggtcgattgattttatcgctttacgccttgttatctttgccgtgctttatgtgtttactctgatgcagacggcgcatgtattgctatccgccattttggccgccgtaggcatgttgatggccacatgcgccattgcactatggaaaagcattcggctggataaatacattgagcaaaagcgcatggagctttcgcgggaatacctctttgagaagatcgtgctgctgccaagaaggcggtttttgctgcttatcaaacagctggtgcgccatatggggtatcgggtggtctgtgaacatcctctggggctattgtgcgaggccaatgaaaactcggcctttattcttgccttacagaatcatcctgaaaacaaggtcagcgttcagcagcttttagatagttaccgggagatccaacagctgggggtagatgaatgtctgatcatcgcgactgccccattgacagattctgcgcatgcctttctgcatgagctacaagggctgcaatgccaagtactcaatcgacaaaagatcctggatctggcacagcgccaggggctgctgccagacgccaaagaggtagagcaggcacttttggaaaagctggaagaaaagcgcgtaagcctgaaaaaattaaaacgcgaagcgctgcatgcttcgcgtgtcaaggcctatgtttcctgcggcgccattctgtttgccgcctccttcatcacaggacagcggctatactatccgttgatgggctctttgtgcttcttcctggcctttgtggcatactatacggaccacaaatccattgcggccaagccgccaaaaaaggcgcacgcaagataaattttaagcctttggaagctgtattttcggttctttgtggttgggacggtataaggcaaatttccgtccgatggcctgtaccggctctgcacgcacaacctcgcaaagctgcctaagcgcttccttggcagacagcgggcagttttcctgcacactgccctttatcaattcacgcgccaccagcgcatccgaaacctgctctatcaggttatccgtaataccggccttacccacatatacgatgggctcggtttggttggccatggagcgcaaatacgctctttgcttacttgtaatcatgattctacccctattctacaaactcaaattcatagcccgccatcaaaacggtatctccatcgcgggcgcctttttcccgcagggctgcaataatgccctgcttttccaattgttctccaaaataccggatggaatcgcggtcgttaggatacatacgacggatgatctcctccgccaaatctccctgcacctcataataatcctccgaaagcttttccaccgtgaaggttttttgcttccaaagcatgctttcatcaaaggtttcgggttccagtacaataggcggcaaggcatccaccagatccgccacgcagcgcagcatttcctttaatcccttgtgcgcggcggcagacactgcaaataccttaatgcccttaggctccagcgccgtcttaagccgctggatattctcttctgccatcggcaagtccgccttgttggccgctacgaccatggggcgcttggccagctcttcattgtattcggataattcctgcataatggtatggtaatcttccagtacgtcgcgtccttccaacgccgaggcatcaatgacatgaatcagcacccttgtacgctcgatatgtcgcaaaaattcatgtcccaagccctggccgctgctggctccctcgatcaggcccggtatatccgccatggtgtaggagcggccatccacttgcagaacgcctaagtttggagaaagtgtcgtaaaatgataatctgcaattttgggattggcgcgggtaacggccgccagcatcgtgcttttcccgacgttcggaaagcctaccagccctatgtctgccactgacttcaattccagccgcacccaacgaccctgtgtacgctctcccggctgagcaaaccttggcgcttttcgcgttgccgtagcaaacctggcattgccgcggccaccgcggccgcctctgagcacccgctttggctggtcagcctcagatagatttgccatgaccagctccgtatcctcatcgtataccacagtgcccagcggcaccttgatggtcaaagcttctgcatttttcccggtgcagttgttgccctttcccggcgtaccgttttgcgctttgaaatgccgcttataggtaaaatccagcagcgttctcatacccgggtccgctacaaaaaacacatcgccgccgcgaccgccatcgccgccgtccgggccgccgtccggcacatatttttcccggtgaaacgctacgcatccatcgccgccatcgccggcctttatgaaaattcttgctttatcgataaacacaatacatcctctctttcctgatgattatatcagcagccgatgttcttttgcaatcatccattgcttattgtctcctcaatcaaagaaaaacccgccgaatcggcgggtttttggcaagaatcttatgctatgaatcacacgatgccctgtgccagcatcgcatccgcaactttgataaagccggcaatgttggcgccaaccacaagattgtcctcaaaaccaaattctttggctgcgttggaagcattctgatagatgtttttcatgatgttcttcagttcctcatccacgcgttcaaacgtccatgccaaacgagaagcgttttgtgccatttccaaaccagataccgctacgccgcctgcgttggacgctttgcccggcgcaaacaggatcttgttttcaatgaatacattggtcgcttccaatgtgctgggcatgttggccccttctgccacggcaaagcagccgtttttcaccaaggtctttgcggcttcctcatccagctcattctgcgtagcgcacggcagcgcaatgtcgcaaggaatgttccagatattcttacagccttcatggaactgcgccgttttcacgcgatccgcgtaaacatgaatgcgctgacgttctttttccttaagctgacgcatcagctcaacatcgataccgtttgcatcgtatacataaccggtggaatcactcatcgccaacaccgtagcgccaaggctgacggccttctgcgcagcatacaacgccacattgccactgccggaaaccaatactttagcgccatcaaagctcttgcccttggcgcggatcatattatccgcaaaatataccaggccatagcccgtagcttcggtacgagccaggctaccgccataaggaatgcctttgcccgttagcacggaggtaaactcattggtaatgcgtttgtactgcccgtacatatacccgatctcacgtccgcctacgccaatatcgcccgccggcacgtcggtatctgcgccgatatggcggtatagttctgtcataaaggattggcagaaacgcatgatctcggcatcggattttcctttgggatcaaaatcgctgccgcccttgccgccgcccatggccaagccagtcaggctgtttttaaagatttgttcaaagcccaaaaacttgatgacggaaaggtttacgctgggatggaacctcaggccgcctttgtagggcccaatggcgctgttgtattctaccctaaagccacggtttacctgcggcttgccttcatcatccatccagggcacgcggaacataatttgccgttccggctccaccaaacgctccaagatctttgcctctaccaggtccttacgtttttcaaagacaggctccaacgaagtaaacacttctttgaccgcctgcaaaaactccggttcgttgccatttctctgttttacgacttcgtatacgtcttgtacgtaggacattgttctaccccttccgagttcagttttttgtgtcagttaaaaaactttctttttttttatactacaatcatgataaaagcgcaagattatatgcccttatattttgtttgtttttgttttgtatccgctttttttatctgtttatgtgcaaattcgcaaaatatttcgcacggacaaccttggcatttagggtttctggcactgcatacccggcgtccatgccagatcagccaatgatgcgcaatactccactgctcctgcgggatatgctccatcagctgctcctcggttttttttacgtcctttgcgtgcaccagccccagtcggtttgccacgcgaaatacatgcgtatccacggcaatggcatcctggccgaaggcattggagactaccacgtttgccgtttttctaccaacaccgggcaaagtctgcagctcgtcccgatcctccggtactttcccatcgtatttgtccgccaagatgcggcaggttgcaatgatatttttggattttgttgcataaaatccgcagcttttgatatagggcgccagttcttcaggcgtgagcttagccatggattttgcatccggataatcatgaaacagcgcaggcgtaaccttgttcacctgcttgtccgtacattgtgcggaaagaatggtggcgatcagcaattcaaacggattggtaaaatccaagcccggctttgcgtctggatacgccaccttcaacgcttgcagtatgtttgtatatcgctcctgctctttggcagacactctttttttcgccattttttcagcctcctgtttttcattatacaggggcttttcgccatttttcaacgatttcgctaactatttttcaaggatctgaccaaggtttccatttgggctcgctgttccggcgataacattgggccaacgctttgcataaagctttccagcccggccggatcaaactgccctgcctgcttttgcgccctgacccgctcaaacagttctttttgcaaatcgtccttatcacggccctgattttgttctacggcacgtcggatgaaatcctcctgcctaggatcgatctccggctttttggcaaagggttttgtgccccccatgccgctttttctgcttcttaaatctttggccatagatggttcctccttttcttactgctatgctatgcagacatacgcactatgtttcccccggcacacttttcctttcttctgcatatcgtatgacaaggaggtgtttgtatgtctacattgcgtgcccggcatcttcctcagcagattccggaagcgtccccgcagccgaaatccccagagccgcaagacgagccggatcgccagcaggaaagaatcgcttctgacaatatccaaagtcagccgcaggatccgatgtcctccatgctgccacagcttttgcaggccatgcccaatggggaggcaatgtctaaaacactgcagcaggtaagccaaatgcagtcgctgatttctcaaatgcagacgggtaacggtggcggaatggccggcctattgtcgatgctgatgagccaggcaggcagcgctatgggagaaggaggcccacaaatgatgcaaatgctccccttgatgatgcagcttatgcaacagcggccgacgggctctgcggaggaaacggaaacgtcacccccttcctcgctgaaccagctgacctctctattatcattgctacaggcaaaataacagcttatgtaaaaagcggagctaaagctccgcttttatgattgtgtcagtacttctatggccttttgcagctgtgtatcggtttcatctgttagcagactgggatcattttgtatctcttccggcaaggagacttctatatccggcatcacccctacttcgtggatggcattgccgtcgggagaataatatgatgcagtggtcagctttagatatccgccccagctcaaattgaagtgcgattgtatgataccctttccatatgttttctctcctataatggcagcgcgctggttctccttgagcgccaccgtcaatatttccgaagcggatgcggagttttgattgacaagcacagccattggaaagtccatcgacttgctgtcgcttgtatattgtttttcgttgccatttttatcgcgtacggaaataatggttgcttgaggcagcagttcatcggctatttccactgcataatccacaaatccaccgggattgtcccgaagatccaggatcatggcctgcatgccctgttcctgaagctgcgctaccgcctgctgatattcctccagagcggacccgctaaattcgtcgatcttgatataaccgatgttgttggccagcatacggctggtgacataggtaatatgaacctcctcacgctgtaccgtaaagctcatctcctggccgtttctctcgatggtgatttcaacagaggtgcccgcttctccacgaattttccccgttacctcttgaaggtcttttgtggacgttgtattgatcttttgtccatccaccgccacaaatatatcacccttttgcagccccgctttctgcgccggagaattattatacacctgcgcgatgaccgcctgccaatcgctgttaaaggtggtcagcaccccaatgccaacataagcgccttccaggctttcattatagctctgtttttcttctacattcatataggcgctatacggatcccccagcgcaagcacggcgccgtgcaaaacgccctcttcgatctgctcttgagaaacatcctgataataattgttttggatcaggcttgtgatctccgccagctttttatcctgtccgctgccgctgcgcccaatccaaaatcctgcgccacaagccagcagcgcagacaggcaccaggccactaccagcagcgcgccatggttttttcttgattccatattgtgtgcaccttcttttcctcaatgcatgtatcatatcatgtttcccgatttgcatacaagcgtaacaaaaaaaaggcggggctctgcccgccttttgtcaaaatcagtttccttcccggtaagctgccaacaccatcgcttggtggatggggcactgcttattgccgcaatgggtcttgctcttgtagaaatggatacaatgatgtccgttaaagccgttgctcgtgatgctctggccgccatgcggcatgccattgatggaagcggcaaacacccggtttccatacacgacccatacagctctgcgatcccagctccaagagccgccatacacggatttcatcgtatcggtatccgcctgcgtcagcggctcggagtcaatgtggttgtggccatacagcctgcgctctttccaggacttccctgtcttcacgtcgatcacggtatattctgcgccgcgcggaatgatcttgttgacttcgctccactccgtcatctccacccggcccttgacctggctcttttcggaaatggtcaggatgatatcgttatccccatacagggaagccagcgtttggccgcccgctacgccgtccgcactggtatccgccgccttttggaaggtcttcactgcctctaccgttgcatcatcataggtaccagaagccgttccgatcaagaatccacgcttgataagctcctcctgcgcctttacgacagcctggccgctcattccttttttcaagatccgcacatcggtttctccagaaaatgcattggtcacagaaatttcgtccttggctacatagccggatttcccagcataagttacagcataccagcccggctcaaaatccgtcacctgtaccccgttgccacagcttaaaaccgaaacctcggcagatgaggcatccggagatttacgcatcaccgtgccatcgtgcaggatggttccgtttcttccgtcatctccgataacaaacaggcagctttgatgtacaaacccgtccatgataccaaatttggtacggtaccattctccctccagcgccacaacctctaccgtggtgccttccgccagctgcgtaagctcctccgcctctttgcttggctctgcgcgcagccttgcatcctcaacgaaaacacgtgctttgcccgtttccgtcgaggccagatcctctttatccttcagcaatccaatatcgatatccgtgtcgccgttgtctacgacgccctcttcttcaccagagccacctacgaaaaacaagggattgccggaatccagcgcattgatggcttcctcttccgaggcgtgcgcttggcgctccttttccgacgcgtcggtcgcctgtgtgccttgcgtatcctccgctgcgcccgtggttaccaaacaggccattgtagcggcacaaagcagccatgcaaccaacctttgttttttcattcgatctccttccttcctatgttgccgcccaaacataagctttgggggtaacatcacaattttcttgcgcctaaagtttgccattgttcttggcatattatacggggcaagggatatctggtcaaatgagataacaggaggattttagagcatacaaccgataatttcaatatttgacggtttttcctattattacagaattgttacatttctttcatatttccaataatttttgcttaatcgacaaaaaatcctcaaacgaatccggcttcttctttgcatctcgcagcagggctgccgggtggaacgtagccatgacctgtcgaccctgcttttcaaaccactggccccgcactttggtaatcctcatatccttggaaaaccaatggttcagcgccgttgcccccaacaaaacgatgattttgggatctacgatttcgatttggcgttccaaatagcccatgcaagcggcaacttcatccggtttgggcacacgattggccggtggtctgcattttacgatgttggcgatgtatacatcttcgcgccgtaagccgatggtatccagcatctgatccagcagctgccctgcagcccctacaaaaggaatccctctcttatcttcttctgcgcccggaccttccccaatgaacatgatttttgcctgtaaattcccatctcctggcaccacgtttgtacgcgcctggcacaatgggcatgcctggcaagtctctatctcttgcagcaacgcttggtaattttccaatttccttctcctttatcgtatggtacgttcggccaccttgataacatgctctagcaacagccagcttgttacagcgcccagcccgccgggcacgggggttaccagcgcggctctttccaaagccgattcggtatccacatctccgcataaggttccctgttcatccacattgatgcctacatctaccaccacagcgcccggttttatatagcttttgtcgatcatcctcgctcgtccgatagctgctaccagcaagtcggcctgtgcgcatacctccggcaggttctccgtagcgctatggcatacggtcacggtagcattcttcgcaagcatcagcatcgccaatggcttgcccaccaccaggctgcgtcccaaaaccactgcgtgctttcccttccaagggtattgctcataggaaaggagccgcaccacagcttctgccgtacagggggcaaacccatcgctttcccccatgaacacctttgccaggctccccggcgtcataccatctatatccttctcaacggccattgcccggatcacggcatcctcgtcgatatgttttggcatcggtcgaaacaataaaataccatgcactgcgggatcttgattcaacgccgcaagcgcctgtaaacactgttctgttgtactctcttgcggaagcactgtttttttcacggctatgccgacctgttccgcctttttaatggcagagcgctcataggcaatatcatcttcccgttccccgatgcgcaaaataccaaggcccggctgtattttctgcgcacgcaataactcaaccgaagcctcaatcccactgcggattgcttttgcgcatgccgcgcctttcatcaatgctgccataatgtttcctccactttctgcaccatcgcatcacaggattgtacagtctttatcagcaatgcattgctttgatcatagagctgctgtgccttttctttttcctgcatcagctgtgcattgatccatacattcatcacagcgcagtgggcacaggccctggccattgccgcagcacagccaagatcactttgcaccagcttactgatgttttcctttaacgcctctagcgtctctaccaccgcagcgccaagctccaagatcctcatagggggctgcgcagcctgccacaggcagcgctccagcacctcttgttttctctgtttttcttccgatgtttccgcaggcataccataggctttagacaacggctcaaacgcctctgcatcctcctgcatacaacgtaaaagtgcatctcgatactctatgagcatctgtaacttttcccttaacattggctctaccggaatgaatttccttttgcctatcgtgagattcgttgccatgccgcccaggcaggcagccagagcgcctgccagcgcactgaccccgccgccgcctggtaccgggcttttactcatcagcgccgcagaaaaatctttgatggattgttcctctaacatgattgtctccttttcgccttttgtttattgtaccaaggcataaaggaaaactcaatcaccgctaaactacacacaaaaagggccggacaatcgtgcccggccctttggcattgctttgataaggtttaacggctataaatcttattcaacagctgatctacgtactcgttgacctctgcagaggtttgcagctccagcgcttcctccgccgctttttgcatttccgcatagttggatttgcgaatcaggtttttgatggtaggaatggaaccagcgctcatgctgaattcatccaggcccatgcccagcagcagagctgcccctttttcatcgccggccaactcgccacagacacccgtccacttaccttccttatgggaagcatcgatgaccatcttaatggcacggatgacagacggatgcaacggctgatacagatccgcaatcatttcattgccgcggtctacgcccaaaacatactgtgtcaggtcgttggtgccgatggagaagaagtccacaatcttggcaaatttctctgcgttgatagcagccgacggggtttccaccatgataccaatttccagcttttcatcaaatgccttgccttcctgcttcagttcggccttacattcatcgatgatctcgtacatcttggtaatctcttctacagaaatgaccatcgggaacatcacgcgcagcttaccaaaggcactagcacgcagcaccgcgcgcatctgcggtttgatgatgtccaagcggtcaaaatacatacggatggcacgccagcccaggaaggggttcatctcttccgggaacttgatgcagtctgccgctttgtcgccgccgatatccagcgtacggatgataacaggattgggagccattgcctccgccgccgccttgtatgcttcaaactgctcgtcctcagtcggcagcgtcgggcgagacatatacaggaattctgtacggaacaggcctacgccttccgcaccgttttccttggcgcccttgcagtcattgggagaagcgatgttccccacaacctctaccttatggccgtcggtggtaacagcttccagcatcttgaccgcatccagctggcgcttatgctccaagaacgcatccagtttcttcttgccctctgcgagctgcccgtcgtcaggatttaccgttacatcgcagtccacagcatccagcactacggtatcgccatgctttaccttggaaaggatatcgcccgtgccgacgatagccggcaggcccatgatacgggcaatgatggaggtatggctggtgcggccgcccaactgggtcacaaagccctttacatagttcatatccatcgtggcggtatcggacggggtcagatcgttggcaaataccacgacttcctcatccaaatcatccaaagagacgcgcacattgcccacaacattgtccaggatacggccgcctacgtccttaatgtctgccgcgcgttcgcgcagatactcgtcatccaaggaagccagcattgcggaaacctcttccgttgcttccgcaacagccttatctgcatgcatcatgccgttgttgattttatccatcacagcatcttccaacgtgggatcgttgagcatcatcaagtgagcgcggaaaacatcggcctctttagcgctcaggcgtttttccgttttctcaatgatctcattgagctgcgcttccgtttcggttacagctttacggaatttttcgatctccgcttcacactcagacggatttgccagcaacgcttcgttgatgacaacctctttttgttccaatacaaatgctttcccgattgcaatacccggggatgcaataattcctttcataaaagcacctcttcactcaaattcgtgttggctatatcgcaaacggcggccggagcaaaactccgaccgcacaagttctaagcgatacttattcttccaggttgtccaacagatcgatgagagcgttcagagcttcctgctcgtcttcgcccgtgcaggaaatggtgatttcgctgccgttgctggcacccaagctcagcacagagatgatggactttgcattgccttctttgccatcttttttgattttgatggtgctcttgaatttcgccgctttctgtacgaacaaagaagccggacgggcatgtaggccagtctcattcttcacaacaaagtttttttcgaccattttcaaattcctcctgtaaaattccccggcaattagccagccaggttaaattctgctttgatatctttgcacgtgtcggcaatcatgcccatgcaatgttctttgatctcctgcaacgacatagcaccgcgcatccccagcgcttcgatcagcatcggcaggtttacaccgctcaaacattcgatgttcggggtcttgccgtccacttcacgattgatattggcagccgtaacattgcacggggtgccgccgtagaggtcgacaaataccagcacaccgtcatcgcaaacgatctctgccagcttgttgcgaaccttttcgttgaaggactcgaagctgtcgtccgctgccaagccgatggaatacaggccttcctgcggtcccatgatcagatccacgctggaaacgataccagccgccatgttggcgtgggtgacaatcagtacttgcatcattgtaggtcactctcctaataataaatcttgtatcttgcgcaagggttcctacgttccttgcaacattccattacgacttagattatatattgtaatgaaatacattgtcaatgaaaaatggcaaacccaagagagaaaaacacaaattcgttccctaataaaccatcttttcccattcaaatattttgtgtaatttttttgtttcaccgctgctgtgcctccagggcctgcaccgctgtttgaagggggatatcctccagctctgtgcctgcccatcctggcaagccatcgcaggtcagtttgacgtccggcgccacccctttttcatggatcaccgtgccatctgccattcgatattcagccatggtatatttcagccccgatccgtcctttagggtcttcaatttttgtacaacgcccttcccatacgtggtatcccctacgatcagtgccctaccctggttttgtaaaacccccgcaaagatctcggccgcagaagcgctctgcccatctgtaagcacagccattggcattgtatagcgctgccccccgcttgtttgataccgctcttcctttcccttagcctctaaaaggcacaagacctccgttttatccggcaagcagccgttgagcatcgttaaaacagcatccattctgccgcccggattatgccgcacatcaatgataacgcctttggcttggctaaactgctccatagccttttcaaactcatcttctataccctcctgtacaaaggagcggatgcgaatatacccgtagccgttgggaagcggcttggcgatgatggcgggtagcggctcaattttttgtgggattacgacaatgtctcttgtcatcccttcgcgctgtacggtaaacagtgtggtaacgccttcctccggcacccagtctaccttgccgactgattcgccattgatttttatgatcagatctccctttgccagcccagcgttctgtgcagggctttgttccataatatctgtaacctgccaaccctcttgtacacttaaaagctctgcgcctatccctgcagcctcttcacctgtaatatccgccattaggtcctgcatctgtgcaggcgaaagccattgagtatactcatcttccaccgcctgcgccaacgcggcgcaagcagcttgatccatcgtcagtgtatccaaaggcgttaacgcttcatttttcaaggtggcttccacttggcgagccatcacaaagggacccctccccgcaacatatccaacgccgcctgccagcatcacacacagcaggcagacccaaattaccatgcccttctgtttacgcatcatgcacccccatattagtgcatgcagaccgcttggccaaatatgccgcaagatgcaaaagaaaaaggcaggaatactcctgcctttttgaatgagggttgattacactccctgcaaatccaccgttacacgataagcatccggcgtagcggccgcttcataggccttctggatgtcacgtagcgggatgtattttccttccagcgaatacgagcaatcgatcaggcgtttgctgatcaacgttgcggattcataccagtcattcaggttcgcaacaaaggaaccgatgatctcgagcttgcgatagtgcaactcgttgggatctacctgcagttccggtttcggataaccagccgggaaaataaccagcttgccgcggaaatgcttgagcatatcatagccctgtttgtaggccagcgtagagccaaccgccgcgatcacggtgtcggcgcctttgccatccgtcaaatccttaacggcctgcaccgggtcggtattcttggcatcgatgacatcaatgcccatttccttggccctggcaatcttcttgggagaaatatcggaaatcatcacgcgagcgccaaacgctttggctacctgcgcattgaccaggcccatcgtgcccgcgccgataacgacaacatcctgcatcggctgaatgttgcacttatgcgcacaggatacaaccgtagccgccggttccaagaaaccagcttctgccggggcaatgtcgttgttgatggcaattacatatttctgatccatcaccacatagtcagcaaaccgcttttgtccataatagccatccgggccaggaccctgttttttgttattgacgcagtcgctcgtcaagccctggcggcaagcatcacaaacgccacagaagccgctcatgccgccaacctgctgaccgattttgaacgaatcgtatacttcatcgcccttggcaatgatcgtgccagcccattcatggccgcccgccatcgggaatccctgatggtcacgtaggcccatccactgctgatagtcagtggtgcagatgttgtttgtcgccattttgatgacgatgtccgtcggccctacttcggggaacggtgcctcgtgcatctcagcaacgtgtcctttgacgataacgccaaaatgaattttgtcaggaagcatgggaaaaccctccttaaatgatatatattgaggcgccgggacaccccggccccacaatgatctttgtaaagcggtcaataataaaatatatactgcaaccctgcaatatgcccattcggataaaaagaggagcgaactaattgatatatacagatgtattgtataccaatcatttgataaatgcaaatcccctgcccgcatgttttacaaaatttttgcagatatagcaaagactttgttagaaaaaaagagacaggaattttcctgtctcttttttatttttggaggattacacgctctgcagatccaccgtgacacggtatgcatccggcgtggcagctgcttcgtatgcctgctggatgtcgcgcagcggaatgaatttgccttccagagagtaagagcagtcgatcaagcgcttgctgatcagcgtagctgcttcgtaccagtctttcaggtcgctgccgaaggtaccgatgatctcgagcttgcgatagtgcagctcattgggatctacctgcagttccggtttcggataaccggccgggaaaatcaacagcttgccgcgatactggctcagcatatcgtagccctgcttgtaagcaatggagctaccgacagccgcgatcacgatatccgcacccttgccgttggtcaaatctttgaccgcttcaaccgggtcgttgttcttcgcgtcaacaacatcgacgcccatttcctgagcgcgtttgatcttcttctgagaaatatcagaaacgataacgcgagcgccaaacgctttggctacctgtgcgttgaccaagcccatggtgccgccgccgataacgacaacatcctgcatcggctttacgccaaccttatggataccctgcacaacggtggaaaccggttccaagaagccagcttctgctgcggggatgtcattgttgatcggaacgatcaacttctgatccattacaacgtaatcagcaaagcgtttgaaaccaccgtagtagccatccgggccagggccgccgtgaggaatgttctggcagtcgccggtgtggccttgacggcaggaatcacacatgccgcagaacggatgcatggtcgctacctgcatgccaattttgaagttgtcatacacctcatcgcccatggcaacgatgttaccggcacattcgtggccggaagccatcgggaagccttggtggtcacgcagacccaaccactgctgatagtcggtggtacaaatgttgtttgctaccaatttgacaacgatatccgtcggccctacttcggggaacggcatctcgtgcatctcggcaacatgtcctttgacgataacgccaaaatgaattttgtcaggaagcatgggtataaccctccttaaagaattgaattttctattgtacagtcagtgttgataatcacacacgattgcactgattgaacaatttcatgtaatgaaccagcttggctttgtatccctcggccagcaattcatacatctgcatgccatgattcggttcttcttcgatgacagcagcagcgccggctttatacaggtcggtcgccaggtttaccttgctgataccttcgcgggtcgccttcgccaggttttcatcgcccgtgccggaaccgccatgcagtaccaacggcaccttaacagcatcaaagatctgatgcagacgatcgaaatccaggtacggggtgcctttgtattcgccatgggcagtaccgatcgcaacggccagcatatcgatgccggtcttgtcgcaataatcttttgcctgtgccggatccgtcaaagcagcgtcacggtccacagcatactgcaagccctggcctacatggcccaattccgcttcaacgctgacgccaaccgcatgagcaacctttaccaattcggccacttcggcgacgttttcttcgtacggcaacgtagagcggtctaccatgatagaggtaaagccagcttggatcgctgcgactgcatgttcatactttgcaccatgatccaggttgatcgcgattggcacatccgcttcctttgccagagcgcctaccatatggccaaagaaattgatgtcacagtttgaagagtagcccacgtccaaaatcatgggagctctgttttccacagcagcggagatagccgcacgggccgtatcttcgttgtggatgttcggagccgtaacaccgtaaccgccttcgcgggccgcgttgaggatttgcgccatagatactaacattcgtttttcctccttataaagaagatgtattaacaaaccgcttttgcggattgttttctaaaatgaatccttagatatattgtataacgagaagccgccctatgcaagcgccgaatttctgcgccccggccagccccatttgcccgtattcgagccagaaacaacataaaaaatggagtgtaaaagccaacaaccggctttgaaatatcacactgtgcttacgaaaatattttatagcaatccttctaacaatgcaaggggcatatttcttttccgtttgtaggaaagcaataaaaaaactcaaatagatcacgctatttgagtaaagagggaaagtgctcccgcaaggcatcctccaaagaaaacggcttttgttccggcaaggcctgaaaatatacatgtatacccttttcttgcagagaatgcagacactccgcatctgcctcggataaaaacaccgtaggatacacctgtattctcccttcccggcgccccaggcccgctacctgcaaatctttgacgggcacaccggtctgaattgcggtctgtgcatgggcaatgtccttaaagatcaaaagcacccttcccttttgcgcagataaaaaacccgctacctcttctgccgtcagcacttccagcgttgttccctttggcatcgccattttgaacaacccgatgagcatagcgtcttgcgccacctcatcatcgacaatacaaatcgaatttgcctgggtttgctttgtccattttaccagcacctggccatgcaccaaacggctgtccactctcgccaagaccaattcagccaaaaccacacccccttacaaattcatgatttatcataatccaaagcattggcactgtcaatcttcccgatacctatgctatactttatttatatactggagaggctatgccgctcattttctttgtttttttatttcatatcactttgcaggaggtaagctatgcagtctactcaaatcatggccatgtacgggaccgacggattcgatatggtacagcgtttgttagagcaaatggacgccgtttcccatctaccgcaggacaagcatgcatccattgccatcaaacccaacctagtcgtggcacacacagcggatacaggtgccaccacccatccagagatcattgaaggcatcatctgctatctgcaagcgcagggttatgataatctttccatcatagagtcctcttgggtaggagaccaaaccatgcgcgcctatgaggtatgcggatacaatgcgctatccaagaggcgcggcgtgcctctgtacgatatgaaaaaagagcccggcgtgcaggtgcaaacccatggcataccgttgtccgtatgtaagcgggccttggaagcggacgccatcatcaacgtacctgtcctcaaggcgcactgccaaacggcgctgacctgcgcgctgaaaaacctaaaagggcttgtgccggataaagaaaaaaggcggtatcatcaacttggcatccatcagcccgtagcactgctcaataccgtgctgcggccggcattcaccatcgtggatgggctttgcggggatttgaccttcgaagaaggcggcaaccccgttccaatgcagcgtctgcttgcaggattggattccgttttgatcgacagctatgctgcccagctgctcggctatgacccggatgaaattgaaatgctgcccatggcacgcgactatggtgttggcgcttattttgaagatgaatctcagttgatagagctgaacagcccggccgaccttcctcaaaaatataccccttcccgacgggccaacatgctggcacggcgtgtggatgcaaaaaatgcctgttccgcttgctatggtagcctaatcttcgctttgaatcgactggatgagctgggagaattgcctcgcgaaacgctgcatatcggccagggctaccagggcatagagggggatggcatcggcattggacgctgctgcgcagggttttcacgctgcttaaaaggctgtcctccgcaagccaaggatattgtcgattttttgcagaagtagtcccatgagccgtatcaaacaaaacctcgccctgttgtttgcgatctgctgcgtatcctttgcagggccgctgatcaaagtggccttgctgctagccatgccgcctgtggcctgtctcttatacacatctgacgctgccgacga

SEQ ID NO: 3094 - DNA, 2287 bp, Unknown
  16S sequences of unknown bacteria
ccaaaacactgtaaaatcaagtatttttaatcaaggttagtatgttgccgtggcagatgaaaagtactcgtatactcatataaactcctttcaaaaggcgcttttttgctgccatttgcagcattttgtgcggtgttaatttttctttatgtattggtcatttctgtacataaaatgcaaatcttagcaaaattttgcaagatgtgtacagcaatcgtagtagaaacggagtaaaaggttgggggtactacttctctcttactgcaaatataccattctttggggtaagtcaagatacgcacctatctgcttggctaatttttctagttccttataaattgacttttttatggtataataatcctctccaaatattttttctgttagaccaaacattgcatcgctaattatcaaattgctctcctttaacactattcccaacttgtagtgtgccatagaatttctaaatctatctgatttccatttcgaattaatttttaaagcgatgcctaatttttgatttatttgttcaatcacacttattaaagaataatataaaagatatccaaatctcagcttcgtaggtatctcattgtttatccatttttcaatcccatataacaagaaatttatctggcataagattgacattaaaacaaacttgtcactatatacattaccaactggtgattttataaatcctccgtaatcttgaaccccaaactgcaattcattatttacctgaaaatcagtcgttgcatggaacaaattaatatatctaccaccaatttcactcattacctttatatactcaccattattctcactgtatgaaaaaaacggtgaatagcaatggcacagaatagtattcccacaaatcactccatttatagtatccattccatatatatcatatagcttaagaactttggcaattggcttacagacacttccaaaataattatcatttttacgataagcgtttcctaacgaaatatatatttcgttataatcctgctgccacatcttaatgctatttctgatttgttcataaaaaatagtttgtgattcattaaataatggcatacagaatttacatttacttgaatttttaatagcctttagccaatcctctgctccatctataacaacacccaaatacggaagcatagaaggtatgtaattagatgctttcggatttatattttttataaccgtataaatatatcgaaggtcttgctgaatcaaagaaaatgctgccttctgtacaggatttaatttcaagctatccacaccaattcactccttaaaacatgttattcttcttatgtttcggtgatttgtgtttaatgatttttcaaatacatttgttcctcaatatatttctcatataattcgataatataggcacacgcctccgagatatgatctaatttacgttgtaaatcattaaccgaaacttcacgtcccacctcttttggagttttattcccatgtgcaatataattcctattatcaaccatttccttaatgtttcctccaatttccgccctaggaagaattgcattatgaataccaaaagattttgcgatactctctaattgtctatatcgtagatttttgccatcagtaggtactatttcatttggaatagaaacgataggattccgagttaatttatctgaaattagttgattgtcttgaaaaatgcttgatttacgggcatattcgcaggtttgcaaattgattttactactcatttactacttttaacggattgagccttgatatgcaaaaagcacctgcgggctgccggatagaccgctacaccaccttacgcggcacgtcgaaaagaaaaaataaaataacaccacctataaggcggcgtttctcactcctacactggagaacaggaacgctgcttttttatgccctcatgttacgcagtaagggcaaatgaagccttgatttatgcggctcttagagcgcggaaatgagaaatgcaagggttgataccttttccctcaaaaccgcgtttctactgcgtaacaaatccaaccaaaggagtgatgaagctatggcagttttccgcgtggaaaagaacaaaggttatacggttatgagcaaccaccatttacgcaacaaggaactttccctaaaggcaaagggcttgttgtcgcaaatgctctcacttcccgaagattgggactacacccttgcagggctgtcccttatcaaccgggaaagtatcgacgctatccgcaccgctgtatgggagcttgaaaaa

SEQ ID NO: 3095 - DNA, 10165 bp, Unknown
  16S sequences of unknown bacteria
ggaggaagaaccggcggcgcccccggccgctgccccgccgcctgacggctgttttccggccggggctgagccgccgtgccgcagagaaaggcggagctttttttcaaggcgcggaaaagagacggtggagccgcgtgtcagccgcgggcggcgggttcgaaggcggctgctcagtattgcgtgcgctttgctgacggtgtttgtgctcagcctgttcggcggctttgccgtgatccagggcgactccatggaaccggtgctgtcggaaaacgacgttttgctgtacgcgaagcgggcgccggatattcagcgaggtgacatcctgctgttccgtgcgccgggctacggcaaccagcttttggtcaagcgcgtgatcggcctgccgggcgacactattgaagtggatgccgaaggccatgtgctgctgaacggcgagcttctgcgggaggacagcgccatttacggtgcctccagcctgccgggggacgtgcagttccccattcaggtgagggaaggatgctattttgtgctgggcgacaaccgggctagctccatggacagccggatgtcggtaatcgggcaggtgacgcaggatgagatccgcggccgggtggcggcatggattcattttgaatgaagggcagcagcggtgcgcggcaaatggtatgggaggaatgaacattgttggaaacaacggaaaagccgtggaagtggctgtgcgctgggctgctggcatttgcctgcctggggctggaggcgctggttcttctgctggagggaatctggtatggaaatacggatttccggcagtgggacagccttcagatgtttgtgcactggctggcagtgagcatcctctggtgcgccgcggctggcctgctgtgcgcgtgggcaaaaaaacaaggctttgcagaacacaatggagcacaaggcccgaaagctcctgcggtactggcagcgtttttgctggtggccgtatgtgcaggcgcatcggcgctttcctggggcggcttcaagcccctgatggaataccgcagcctgtcagagcatttttatggtgcgggagttcccgcctttgtgtttcagtatctttactatctcgcggaaagcgcgttgatcctgctgcttatcgtatttgggcagcggtggggcgaagcagcgttccgtttcaaaaacacggcgcttgttccctggggcggcctgctgtgcggcctcacctgggggctggcccatatgtacacccaatccctgggcaccgggcttgccctatgggcagtcacggtgctttacggcgaagcctacctgcttttgcgcaaaaatatccgttgggcctatgcggccgtggcggcgatgtttctgctttaacaggcaggagagtgtagccgtacaggcctctctggaaaatatcagcggagaaaactcggtattcccgcaccttcgtttgtaatgctgggtttttcaaaaaagaaaaaggagcgatccgagatgaagaaaagaatcgttgcggcccttttggcgcttgtgttgacgttcggcgccatgccgggcgcagcatttgcacaagccccggaaagccccggtacctctatgccggatatgcagcaaacggctgcactgcccggcgaggagggccaggcggacagccccgtaagcgcccccacggaagaaagtgaggggcacagccgcctcttggaggcagctgtggaggaagcaacggcttcctccataacagggccgcaaacgcaggcttccacggtggaggaagtggaacccgcgccgcccgcagacaccgccctgccgcaggccggtaacggctcaggcctgtcccaggcccctctgtcggcaagtgaagtggaatataccacggatggcagtagctgggcaacggcttccttcgccgatgcagcagcggctgtcaatgcggcgcagccttctgaatccgcgcagattaagctgaagtcggatgtcactcttgacaccacttatactttcacaaaacccgtgactattttgagcgatgccaacgcgacgatttatcgaaaagacagctttaaaagcggtgcgctgttcaatgtcgcatccagcggagccttgacgctgaacaaggtcacggtggacggcaaggcatccgtcggcaacggcattgcgagcggcgtcaaggctgaagcgccgttggtggtggtcaatggcggccggttgacgctgaccggcggcacagtgctgcaaaacgcgtggaatggcagcagcgacggcggcgcagtgagggtggacagcggcggcatgaccatgcagggaggaagtgtgatccggaactgcagtgcgctcaacggcggcggcatctgcctgaatggcagcagcacactgaaaacagaaacctccggcaatacgaccggggttgttgccacacttcaagaaaaccaaacctccagcaaaggaaagggcggcggcctgtacgcagtgagcagtgcggaaagcaatatttccaatatgaagctgaccggcaaccgcgccacagagggcggcgccatttatttgtcgagcggcagccttatttcgagtggagccgccaacgaaatcagcaggaacacgtccagtggcggcggcggcgcggtatatgttgccggcggccagctttcttttggaaataccagcatcagggaaaacagttcatctggaaatggcggcggcctgtatttgaacggtggcagcgttttcctggatcttgcacagctgataagaaacgagacctcaaagaacggcggcggtgcgtacattcagacaggtacccttaccctgaaaaacggcgccggcagcggtgcgggggtacgaggcaataaggctaaggccggcggcggactatatttgaacggcacaggcgccgaagttgtcatcggcaattctggcagcagcggcacagtggagatctgtgagaataaggccaccggggtgaccgccgacggtttcaagacggcggctggcggcgtctatctgggtgacggggccagcctgcggatggacagcggggccaacatgacggtcacacaaaactccacgtcaatgggcagcaccagcattggtgcgtgggcggaagaaactgcctgcggcggcatctacctggcagagaacgcttcgctgcagctgcgcggcaccgtaaagattacggagaataccgtatcgcacagcggcaagcgtcaggtgaacctactggtagaaaatcaggcaggtggagccagaacgcaaatacccgttaacaaccaatggagcggcggtttgtcgagcggcagcaaaattggcatcagcctgacgcactggccgcaggcagggcagttcttccagttcctggggaactatgatgagaagaacaattcggccggcaatatcagcagtgcatttgaaacctattttatcagcgaccgaaccccatatggcacatcggcgggctttgatgtcgttgtcaatacagaaggcgcatatccccagggcgagctggaacaggcgcacgagaataaggtctaccttacataccagagccgtgtgccggccgcagcacaggtgagcatccaggacaaatattatgatggggacgccgatgccacggcggccgccgtgaactggacgggtgtggcggctgaagatgaagaagcgttttccggtctggaggaaggcgttgactacaccgtgacggcctcctttgccggtacagacgtcgcctatggcggcagcggcgtggcagaacagaatgtgacaggaacgatttcactgaccaacgaggcattgttggcaaaataccctgagtttgcaagctatcctttcacagcgcaggcctccatttggcccgtgccggtaaccgtatcttttgaagcggatgaccgtgcttacagcgccggagaaacaggcgccactgtaacgcagggaagcgcagccgtccggctggcagaccagccggaacccggcgcacccgctcttccatccgatctgcccgtatcccccgcctatggaacggattatacccttacgaatgtgcggtttgcagatggagagggcgaacctaccgaccaagttggcgagcatcaggtgctggccgaaatcgcgtccagtgcgagcaggaactacatctggaaagaagtggagccagcattggcgtccattctccgcgttgaactgacggccagtgccgcagtgccggacaaaatatatgacggaactccgagtatggccgggaccccgactgtgacgctggccagcgccacggaaacatccgcatcggacggatacaacacaacgcttgtgcaggggaaggattttaccattgaaagtgctgcgtttgacagcaaggaggcaaatcccgctgccggtgcagccgttcagatcaaactcactgaggacgcggccaaaatctataccatccggcagacggaaaacgtcacaacggacgagaatggcattacgaccattcgtacaacgggcgcgatcacccagaaggaagtaaatctgacgggcgcttgtgtatatgataaaaagcatgacgggacaaccgcggcaaccgcctatgacctgaagtttgagggccttgttcccggagaaagcttcacggaaggcgactatacctataccgctgatttcgcagatgccagcgtgggcacagataaggaagtaacggtaacggccgtcttgcaaaagacagaagtgaccaggaattatgtgctcggcgtggataccatcaccgcttatgccaacatcgcgccggtggccttgaacgccagcctgacggcggaaggcaaaacctacgacggcaccgcagacgtggcgaaatataacctttcctttgaggccgaaggcggcgcagtggcgctgacagaaggcgaggattaccatgtcgcggcaggccctgtattcgatgacaaaaatgccggcagccgcaccgtgagcatggagattgaactgctgggagattccgcccggaactatactctggccagcggcagtctgacggcacaggccgagatcgcaaaaaaagacgtgacgccggttgtggagaaagtgccggataaggtatatgacggtactgcgcaggtggtggacacggaaacggagaaactgaccgtttcccttgccggctgcatcccgggcgaaacgctgaagcaaggggtggattacagcgtatccgggcaatttgtcagtaaagctggcgaggcggcgaaggatgccgccaatggaaagcctgtggaggtcacagtggtactgacggacagcgctctggcgaagaactatcgcctgtctcctgccgtggcggcatcatcggcggatatcatcaagcgcccgctgacggtcgcctctgccagcgtagcggataaactgtacgacggcactgtaaacgcccaagtgacggcgctgcgctttgagggcgtgctgcctgaagaaccgctggagcggaatagggactggcgcatcgtttccgcgcggtttgacacaccggacacagggctggataagcctgtgcatgtggtcgcggcgttgatggacagcccgctgagcaaaaactatgtgctggcacaggacaacatcagaacgacggccgatgttacgaaccatctggacgtgaacggcgcctatacgggggaagtgagcagcggtagtctgacggtggatgagatcgacagctggattcgcgcgaactttacggatgtgctgcccggaaagccgcaggtcacattcaaggacaaggacggcagagaaatcggtggcatcgacaaggcgcaggcaggcgcatataccgtggatgccgtctattcggacggcgcagggaggacggccgcctatcacatccagtggacgctgacggcaaagcccgcgcctgaaccggcgcctccctcctctgcgccggagcctccagcggctgcccctatcggcgtacagacgggtgacagcttccccatcctactgctggctattgctttggcgttagcctgcacggccattgtagcattgcttatcgtggagcaccgcagaaagcacggcggaaaataacgcgatatggcgagagaaagaaaaatactgctggctgccctgagcctgatagctgtagtgtgtgccctgggcctcggttggtactttgtccatgggtggatggcccgccgtgagttcagctttttggcgcagactgtggcccaggcggagcagatagaaacaccggacgcgctggcgcaggcctatgagggcctgcgccagcagaatccggattttggcgcatggctcaccattgaaaatacgagggtggattatcctgtgatgcatacgcctgcggaaccggaaaaatatctgcgcaggagctttgacggaaaatactccatggcaggcacgccgttcttgtatgcaggctgcagatggacggaaagctccaatctggtaatctacgggcacaacatgcagtcgggcgatatgtttgcggacctggtgaattatctggatgccgcctatttcgagcagcatccgcttatccggctggatctgcccggcgaacggcgcacctaccgggtgatggccgtggtgccgtttgagattaccccggaaaatgaacctgtatattaccagtgtacggatgcggcggaggaaggcgtgttcctggcttacgtggattttttgaaacagcatgccgcttatgataccggcgtgacggctcaatacggcgaacagctgctgacgctgtccacctgctcggaatatgtcccaggcccagggcggcttctgatagtggcaaggctggaagaaaaacagccttattcttgagatgtggacaccaaggactcattgatttacagaggagggctcataatgaaaaaggaccggtttgggatttgtctgaccttttatgcaatactcgggttcgtgcttgcctttctggggcagacgcttttgggcggggcgctgctgggtttcgccattgtgatggtgcaggatgaatggctcacccggcagacgatgcaggcgtttttccttgcactgtgcgcaggcgtgatttctgctgtctccagtctcctttctccgctgtaccgcattccggtactggggatcgccttttccacggtgttcggacttgtgacaggtatcctctcactggctgtgctggtgctggcggttatcggagcagtccgtgcggcaaaggaaagagatgccgcattgccgctgcttggcacgctggccaacaaggctttcggccgccagaagcaggtggtctataccgcgcctgccggaacagaggagcagaatgaaaacggctcttaaacggctttgaaacagcatataaaaaagatatgggcacggccgacggccgtgccgcaatttgtaaataagggggatttctttcatgcaccgaaaagagctcaagaggcttgcaaagtcgaaagtagcggcccggcttggcgctgtgatgggaacctggttcgcgtggctgggcattgagcttgctgcgatccttatagctgcggccgtttccctttttgcttttgccgggccgacaatgctgtgggcggcaagaagcttttccgtgctgggcatcatgataatcggccctgccctgatcatgatggagtgggttttggcggttctgctcattcagatcccactagcgccgcttctggcgggctttatgcggttctgcagcaatctccagcgtggaaagcctgcttcggcagccgtgctgtttgaggactttcgcacgggccgccggtttggaagcgccgtgaaaatgggtctctgcatctggctgcgcagtttcctgtgggggcttatccctagtgcggtgagcctccttgcgaatctgctgcccgatagtctggagccgctggccgtactgttacagcttgcactgatggcgctgattatggccaaggtctcttcctatgtcggcggctatgtactgattcaggatgatgagaccatgggggcctggcgcgcggtatccgcttcggcggagttgtttcgcggaagatgcgcccagctcctgatattttgcctgagctttctgccatgggtgctgcttgcggtccccgtacttctggcgggcgtgcttgtgggcctgctccttagcctgattgggctgccggtattcctgatgccgctgcttgcctggggtgtgacgctggtgctgtttggatttgtatatacttaccagatggtttccatgtttgaatggcttgactttctgcgaggcggcgtttctttgggaaacggtcagacattccctgtgcccggccctgcggtcgattgccccggcgacacaccgtatggtgcggccggtgcggccggggttcagcaggatttttcatctccggtaccgctggagcatgtgatagaggtaccgccgtctccggctgcgcagactctacagcctccggaagacatttagtgagaaatacacctgccactagcttgtgacgtgcactttgcgaggcgcaagagataaacggagaatcgctgcgctctatggctttgctggtgtattgggacacaaagagacgagaaaatcattcatgtgaaaagtggatttggcgcttcagaaagaagcgtcaaattttctagttccttaggcaggaggcaattaatgtggaaccgcatcaattgtatttacaggaatatggtctgcagaaagggaattgcaggattcgcagaataacttcgcacccgttttggcagtacaaagtttttgagttgtcgatatcccctctgtcgaagacacagaaggaggcatattggactgctgtcagccggcatgggggcgaatcaaaactcggaattcaggcgatatgggcatttcatgggaaaggccgtcttcgccgcgaatttcagagtttcccggtcagttcacaaggtaaaaccctttctggggatgagtttttgaatattattggagatcttgaaacgattcaggcggtactccatcttgttttctctgcacaatagaaaagcttattgaattatcgtcttcgcttctcttttgaaaaatttctcaaggagcgttcttgcacgctaatgctgacagaaaaagactatttgaaaatcgtgtcgatttacagtagaaagtattggcagtattattctgtcgcaaggaggattacaagcaataaaatgcttgcagatgatattgtgcagggagcgtttcaatatgttctggaacactatgaagaaaagcggaactggaaagcggcaagtttggaacgatatattatggcgattgtacgaaacaacgcgcagagggcgttaggcgaagacataaaagaaaagcgcaatattgtctatttccttttggatgattgtactttagtgactgatgaaccggttttccttcgcatagagcgtcaatgcgacagggatactataagaaaagcacttggaatgttgcatccacgaaatgcagaatacctgattctctattatgtaaagcgctactctgattggaaaatcgcggagttaatgcatatcaagcgcaaaagcgtccctgtccttcggtatcgggcaaagaaagagctgcggcatgttttgataaagatggaggaaggtatcgagcggagttaacagatatcggatgttccaaaagaaaaccgccctgccatcggcagggcggcggggcgcagcttattgtgcggggcgataccggttggtgatgatgatatcgtgtgccgtgacggcgcctttgatctcatcaatatcatcctgcatcttatccagccgcttttccatacgatccattttctcggcaagcatcaggtggccttcggcgattttcttgatatccgatttaatgctgctttcgatgacggtattcatgtgcgtggtcatacggtcctcggaagcagcgatacggctacacatgcgttcctcagaagcagcgatagcctgatccatgcggctgcacatacgttgctcagaagcgacaatagccttatccatacggtcgctcatgcgctcctcagaagcctggaacatctcactgagaacctgtaaatcttctttcgtcagcataatatgatttcctccagcttgaaatgattatgcccgtctattccatagtataacagagatcgccgctgcgaacaaggaggcgggctgggaaaagttttttcaccaaagcacaaaattgtaataattttccttttgattcaaaagtcca

SEQ ID NO: 3096 - DNA, 6440 bp, Unknown
  16S sequences of unknown bacteria
gacatgagccggttagggcgaaactacttgcaggtagggttttacacggaaatgctgttccctcaaaagggtgtgcgttttatcgctgtcaacgataatgtggacagtgccagcgagggcatggacaacgattttaccccgctgcgaaatctgttcaatgaatggctggtgagagatacgagcaagaaaatcaaggcagtgaaaaagtcaaaaggcatgagcggcaagcctgttaccagcaagccggtttacggctatgtgatggacgaggacgagaattttattatagacgaggaagccgccccggtggtgcagcagatttaccagctttgccttgccgggaacggcccgaccaagattgcccgtatgctgacggagcagcaaatccccacgccggggacgctggaatatcagcggacaggcagcacccgccgttatcacccaggctatgagtgcaaatgggcgaccaacaccgtcgttcatatcctcgaaaaccgagagtacaccggatgtctggtgaacttcaaaacggaaaagccttcttataaggtcaagcacagcatagagaaccccgtcgagaagcaggccattttcgagaaccaccatgagccgatcatcgacaaggaaacatgggaacgggtgcaggagttacgcaaacagcgcaaacgcccgaaccgctacgatgaagtggggctgttctccgggattttgttctgcgccgactgcggccatgtgctgtatcagcagcggtatcagaacaaagaccgcaagcaggactgttacatctgcggcagctacaagaagcgcacccgcgactgtacggcgcactttatccgcaccgacctgttgaccgccggtgtcctctccaatctccggcaagtgacggaatatgccgccaagcatgagagccgctttgtgaagctgcttatccagcagaacgagatcggcggcaagagaaagaccgccgcagccaccaagcagcttgaacaggcgcaggagcgcatttccgaagtgagccgcattatcaagcggctgtatgaggacaatgtgaacggcaaaatcagcgacgagcgtttcatggaactgtcggcagactatgagcaggaacagcgggaactgaaagaccgcgccgccgctttgcaggaggaactttccaagtcgcaggccgccaccgtcaatgcggaaaagtttatgggtatcgtccgaaagcaccttgcctttgaggaattgacccccaccctcttgcgggaaatgattgagaaaatcgtcgtgcatgagtgcagctatgacgagaacggcacccgcaggcaggacattgagatttattacagctttgtcggcaagattgacttgcccgaataaccgcccgacctatccgacacaatggccaagtgtcggataggaacggcaaaattttttgcacttctattgcttctttatcacacataagcaaagtcaggaggagaatgaatcatgacgcgcaatgaattcatgaccgcgctgcgcaagcgcctgagccacctgccggccgaggagcaggacgcggcgctgaagtactacgaggaatactttgacgaggcggagtccgaggaggaggccgcgcgccagcttggctcgccggacgcgattgccgaccgaatccttgcggactacggcgcgggcaacgccgcccgcaagggacagaaggaagggcgctccccctggttctacgtgtcgatcgtcctgctgtgcatcctgttcagcccggtgctgctcggggttggggccgcggccctggccgcggcgctcacgatcgcggcggcgtttctcgtcgtggtggtgggcatcctcggcggctttctcgccgcgagccttgtgctgctggcgctgtttctcgtgttcctgtgcgccagctttccggcctttgccggctttgcgccggcgggggcgattctgctgggcctggcgctcgtctgcgggggcctgggcgtgctctgcggcatcttcaccggatacctgtgctattggaccggcctgctgatgaagaagatcttcaccgccggccggcgcaagaagggagcggaagcgaaatgaagaaatggattcgcgtcacgctgatcgtggcggcctgtgtgctggcggtcggcctgctgacgggcggcatgggtctgtacatgttctgggccacggcggaccgctacacgccggaaaaccccgtggaccgcgactacgccgtggatgcgtccgctctgacctcgctgcgcgtggacgtctcgctgggcagcgtgcggattgttcccgtgcccgcgggcgaatcggcccgcgtggagacgcgcggctacggcgcggacgacctccgggtcacccaggaggacggcgcgctgaccatcgagagcgcggacggcctgcgcgacggcacgctgatcgacctgggcctgttccgcatcgacctgcgcggccgcctgtacatgggctccatcgcgccgcgctcggtgacgctctacctgccggaggcggagctgcgcttcatcgacgtctccaccaacgccggggatttctccaacgccatgccgctgcgcgcggacgcgatctcgatcacctcctccgtggggagcctcacgctccagaacctggacgcgcagatcctcaccctcaccaacagcgtgggcgagatcgacttggacggcttctcctgcgagacgctgaccgcctccgtggacacgggcgacctgaccctgcgcaacggcagtgcaagcgtcagcgcggacatccgcgcgaacatcggggacgcgacgctgcaggacgtggcgctcacgggcctgaccttcaactcggacctgggcgatgccctgctggacggcacgctgcgcggagcctgctcgctggagacgaacctgggcgacctgacgctgcgctttgcagacagcgcggagaactacttcgtgacgctggagacgagcatgggcgacctgtccgtgcacaacgcggacctcgtgcgcactgagggagagccggatcgcatcaacccccgctcggagtcggagaaccgcatcttcgtctcgacgagcatgggcgacatggacctctccttcgcggagtaaaaaaaagcgcttgcggcctcctcctttcccatggtatgctcaagccaaacgggaaatggggaggccttttttatggaaatccgcacggcaaccgcgcgcgatgcaggcgagctttccgccctggacaagcacatttccgcggacgcgctccgcgagagcctcgccggcgcgcgcgtcctcgtcctctgcgacggggaggagatcgccggttggctgcgctggtccctgttctgggacgagattccctttctgaacatgctctaccttctggagccgcaccgcgggcacgggcacggccgcgcgctgatggaggcctgggaggagcggatgcgccgggccgggcacgccgcggtgctgacctccacgcaggcgaacgagtttgcccagcatttctaccgccgcctgggctatgcggacatcggggcctttgccctgcccggcgatccgctggagctgatcctgcgcaaggcgctgtgagccggccccgagccccaaaaatacaggagccgcgcttccttgctcaagggaagcgcggcgctgttgccgaatatgaggaaagcaggctaggaatggagaggaggagtcttttgtgtgtcaaatcatctggtttggggatgtttggttgcttgcctgccggggtggttgaaagaatttcggtggatgaggggttttcctcaaccgatagataaagtatagcagggaactgtgtttgaatcgtgacttgtttgtaaacaatgatgaacaaatccttcctttttggattgcaatcgggggggccttttgctatactgtccctgctgccctttttttcgggcaaacttgagcaaagcggaggtttcccgccatgaatcgcattcggctcttccccaaggacttcctcaaggcggccttttccatcggcctgcccatcgccctgcagtccttcatcaccacatccgtcaacatggtggacgtggtgatgctgggccacctgggcgatgtggacatcgccgccgtgggcgtcgccaaccagatctactttctcctttcgctggtgctcttcggcgtgagctccggggcatcggtcttcatggcgcagttccatgggaagggcgatctccccggcgtgcaccgcacgatgggcatcatgtacctgctggcgctggcggcctcgctgctgttctcggcgggcgcgctgctcattccggagcggctgatctcgatctactcgcgcgatgcggccgtcatcgcggagggcgcctcctacctgcgcatcgtcggcctctcctacgtggtgacggccttttcctacacgatgggctttgcctgccgcgcgacaggcaacgtgcgcctgccgatgctgacgagccttctttccgtggcgacgaacacgctgctgaactcgatcctgatcttcggcctgctgggctttccggagcttgggctgcgcggcgcggcgatcgccacggccatcgcgcgcgtggtggagctcacggtgctggccgcggtcgtctaccgcaagcgcacgcccgtcgcggcgaatttccgccagctcttcctgcgctttgaccgcgacttcctgaagcgctatttccgcacgtcgctgccggtgctgctcaacgagacgctctggtccacgggcgtttcgctctacaccgtggcctacggcctcctgggcacgggcgccctggcctcggtccagatcgcgagcacggtcttccagctcttcctcgtgctcatccgcggactctcggacgcctgcgccatcctcatcggccacaagatcggctcgggcgacgaggccggcgcgtcccgggacgggcagcgcttcatggcgctcgtgcccatgatcggcgtggtgatgtgcatcctgctgatccttctgcggccggtgatcctgaccttcttcaccgtcacgcccgaaaccctgcagatgaccatggagatgctggcgctgcaggccttcatgctcatccccaaggcgttcacgatggtcatcatcgtgggcctctgccgcagcggcggggacacgctctttgcctgcatcctggacacggcgacggtctgggtggtcgcggttccgctggccttcctgggcgcaaacctgggcctgccgctctggggcgtctacctgtgcgtctgctcggaggacgtggtcaaggcgatcctgggcgtgccgcgcatcctctccaagaagtggctgcacaacgtcgtcgcggacatcgcctaaacgcgcaaccccctccgccacctgcgggttcgcaggcggcggtttttttgcccccatttcccttgactgcgcccctggggaatggtgtatccttctccctaaggagggatgcacatgcggatacgcgaggtatgcaaggcgtgcggccttacgaagaaggccatagaatactatgcggcgcaggggctggtgcgcccagcggtctcggaaaacgggtaccgcgacttttccgcagaggacgtcgggcggctggagaggatcgccctgctccgccggctggacctgcccgtcgcgcgcatccgggaggtgctggacgggggcggcacagcagcgctgtgcgcggccgcggcggagcgccgccgggaaatcgccgcggaaggggagcgcctggcgctgctgcaggcgctttcccagggcggggactgggcctccatcgccgcgcaggccgacgcgctcgagagaaagcagacgatccagcgtcgtctgctgcgcgcctttccgggcgggtacgggcagtacctctgcctgcacttcggccggtttctggacgagcccgtcgttgggcccgagcagcaagcggcgtttgcggccgtcgtcgattttctggatcgcgcggacttctcgctcccgcccgatctgcaagccctgctggacgaggcggcagggtgctgggatgcggccttcgaacagcgcgcgtttgcaaacctgaacgagatggttgccgatgcggacgcctacctggagcgccatgcggagtcgattgcggcgtatttgcagctgcgccaaagcgaggcgttccgcgcctctccggcctggcgccttcaggaggcgcttgcgcgcctgcagcgcgagaccgggtatgacaccgttttcctcccggcgctcgagcggctcagcccgtcctaccgccggtaccgcgaggggcttgcgcgggccgacgcggccttccgggcgcggttcggcgagccggagcgcgaaaaaacggacaggaagtgaaacttcctgtccgttttgctttcaatcgaaggatgcgcccttcagaggcgttccttactcgatgaccttgatgacgacgccggagccaacggtgcggccgccctcgcggatagcgaagcggaggccttcctcgatggcgatggggttgatcaggg

SEQ ID NO: 3097 - DNA, 5626 bp, Unknown
  16S sequences of unknown bacteria
cacacttcctgacgaaccgggatctcggctgtgaaaacaggcggcgcccgcaaggttctcccttgcgggcgccgctctttttggcgcaaaggatgagaaacgccccctaacaggactgcacttcccacgcgcacctctccatgcgcctgcacgtctgccactgggcggtactaaggatacctgccgcacagctctcgcctcaacagtcaagacaaaggcccgccgccctgtgtgaagcagggcggcgggcctttgcgcgggcttctattcaacgctcttcaggctctcgaccatgtcgatcttgcggagcttgaagaacatgaagaggttgaccagcacggagaagagcacggtcagcaggatgctgtagaggtaggaatccaggcggatggactggccgaacatgatcatgtccacctcgcaggtgcggatgatgaacttgtgcagcacgaacccgatccccacgcccagcaccatgccgatgagcgtgagccagatgttttcccggtagatgtaggcggcgacttcgccgtcgtagaagccgaggaccttgagcgtcgcgagctcccggcggcgctcgatgatggagatgttgttgaggttgtagagcacgatgaacgccaggagcccggccgagacgaccagcaccacgaccaccatgtccaggctgcgcatcatgtccgagacctgcgtttgcagatcgctgacaaaggacacgcccgtgatgccgtcaatggccaggagctcttccgccatggcgtcctcgccctcctgctccacgtccgtgcggaggaagaccgtgctgtattccggcgcctcgtggaagagctgttcgtaggtcgcgggcgtcatgtacacgtagtggtagaggtagttctccgcgatggccgagaccgtcgccgtgacctcctccgtttcctcgcgcaggagcgtgatctcgtccccaacctccagggacagcaggcgcgcgagcttttccgtcaccacgacgctgccgtcctccagcgcgatcgcctcgccggtctgccggttttgcaggtggacgatctccgaaaggtcttccaggtgctccggaatgaaggcgtaggcggacttggtcacgccgtttgcgcgcgcgtccaggctggtctgctgcacaggcaggatcgtgcgcacgtcctgcgcggtttgcagaccctcctccacgcctgcgagcgcttccggatcgtcgttgtcgaaggagacgctcgtgtcataggtccaaacggtttcgtactgcttgtccacgatctccgcgatggagttgcgcagcccaaaggccacgagcagcaggcccatgcaagcgccgattccgaagatcgtcatgaagaagcgcttcttgtagcggaacaggttgcggaaggtggccttctgcgagaagctcaggtgcttccagagcgcgggaatgcgctccaggaacacgcgccggccctgcggcggcgaagccgggcgcatgagcgaggcgggcgtggagcggaactccgcgtagcaggccgcataggtcgccgcaacggtgcacagcacggcgatgagcagggcgaaagccgaaaggtcccactgaatgggcaggagcatcaccgtcatgttggtgtacagcatgccgtaggccgacaggatgacgtagggcagcagatagctgccgacgaagatgcccagcacgctgccgatgagcgaggcggagagcgcatagccgatgaacttgccggcgatcgcgctctgggaatagcccagggccttcatcgtgccgatctgcaggcgctgctcctcgaccatgcgggtcatggtcgtcagcgacacgagcgccgcaaccaggaagaagatcgcggggaagacctgaccgatcgcgccgatgcgctcggtgtccatcccgtactcgacgtaggactgaatgctctcgcggtccaggacgaaccactccgggacctccaggtcgtccagctcctgctgcgcgtcggcgatctgctggcgcgcgtcggcgatgtccgcctcggcctcggcgctcttttcatcgaactcggcctgcgcgtcctggtattcctgaagagcgtccgcgtactcggcctttccgtcctcgagctcctggcgcgcgtcctcgagttctcgctccgcgtcggcgatctcgtcccacgcgtcgtcgatttccgcctggccgtccaggagcgtctgctcgttctccgcgatctcctgcaggccctcctggtactcctgctcggcgctggccagctcctcccggccgcgctcgaccttcttgctcgcggcgttgagctggtcgtagccgctctggatggcgtcgcgcgtgggctgcagggcgccgtccacggcggcggagaggacttcttccgttgcggttccccctgcggcggagacagcgctatctagcccgggcaaaatctgatcgtaaaactgcaaggcctcttcgccgccttcgggaagttgaccggcagcctgcgccgcctgcagcgcctggtaattatcctgcgcgtttgcgtacgcgtcggggtccttcagcgtctccgcctggtcggcgaacgcgttgaactgctcgctctgctggttgagctggctgcggttgttgctgatggcggaacccgcgcccacgacctcgacgcgcgcgtcgtggagctcctgctccgcatcggcgagctcggccttggcgtcgttgagctcggcccagccgtccagcagctcctgctccttctcgcgcagctcggccttggcatccgcgatctccttttcgccgtcggcgatttccttctcgccatccgcgatctcctgggcggcgtcctcgagctggatgcgcgcatcctccagctcctggcgcgcgtcctccagctcctgctccgcgtcgtcgatttcctgctcggcgtcggcaatctcgtccgcgccctcctgctggaccgcgtcgtagcggatctggcagcgctcgccggcgatggcctcgacgcggtccgtcacctcggcgatgtagtccttgtagccgtcgtcaaagctgatgtagccgtcggccgcgtcgcaggtgaggtacgccaccgtatagacgtccagcgaaaacgcgctctgggggacgaggaggaagaaccccacgtcgccgttgccgatgttcgccgtgccgcggtcaaagttcaggtaccaggcgtagcgcgccgcgcccacgaccgtgaaggtatcccccgcgagcgtgtcgaggatgtcgtcctcgccgtcggcgtagacggtgatcgtgtcgccgatggcgaggccgctctcggccatgtagtccgcgtccaggaggcattcgtccgcgcgctcgggcatccgcccctgcgtgagctccgggaggttgattccgtcgccgagggactggatgctcaccaccgtgtgctggccgttcacgtccgtcagcgcgtccacggtgtacccgccctgcgcgctggtgacgccctcgatctgcgagagcgcggcgatgtcgtcctccgtgaggcccagctcgctcagcacgcgcaggtccatcatgttctgcgcgtcgtagagcgcgtcggcggagagcttcatgtccggctctgcggagcgcacgcccgcgtaaaacgccacgcccagcgccacgatgagcaggatggacaggtagcggttgaagctgccgcggatctcccggaagaaatccttgactaacacattcctcttcattgttgactcaccactcgatggtctcgaccgagacgggattttcgtttcttctcacccgctggcacttgccgttcttgatctcgatgacgcggtccgccatgggcgcgatggcggaattgtgcgtgatgacgacgaccgtcatgcccttttcgcggcaggtgtcctgcaggagcttgaggatcgccttgcccgtctggtagtccagcgcgccggtcggctcgtcgcagagcagcagcttggggttcttggccagcgcccgcgcgatggagacgcgctgctgctcgccgccggagaggcgcgcggggaagttgcccgcgcgctcggccaggccgacctcgcgcagcacggtcgcggcgtcgagcgggtccttgcagatctgcagtgccagttcgacattctccagcgccgtcaggttctgcaccaggttgtagaattggaacacaaatccgatgtcctcccggcggtactgcgtcagctggcgcgaggagaactgcgccacatcccggccgtccacccaaacgtgtccgctgctggcgcggtccatgccgccgaggatgttgagcaccgtggtctttcccgcgccgcttggcccgacgatcacggcgaactcgcccttttcaatttcaaagctcacgccgtctgccgcatggatggtcgcctcacccacgccataggttttctttacgtcctgcaggctcacgtacgccattattctcacctcacaaacaatttgccatctaatcaacgaggcgtcaagcccctttgctccgcggcgcagagattttacagaccgttcatgtttcataaataaaaaacggcgaaccctacgattcgccgcccatgtagtagaatgccgtgagcccgacctgcccgctggggaagaacccgaggctctcgtagaacccgtgcatctccggggtttcgtccgtgagcagtacgcgctggcgcacgttgggataggcctccaggagcatcttgaccatggtcctgccgatcccgtgccggcggtactgctgcaggacgaggatgtcctgaatatagaggatggtctgcccatcgccgacggcgcgcaaaaggccgcagagcgtctccccgtcatacgcgcagacgaggtagagcgacgcgcgcagcgcgctctcgagcgcgtccatgtcgcaggtataggcaatccagcccgcgtcgtcgtaaagccggcgcaccgcctcgcgctcggggagctttccttcgatgtagtccatattcgttcctttctgaccgttccgccttcagcgatcgcgtttctcgagcgcggccgcgtttttttcgtcctcgagggcctttttgcgcgcctcgagctgctgctgtacggtttcgacctcgggcaggcccaggtgtgcgagcacagcgcgcgccttttccgcttcctcgggctggacggcgatttcgacgacctccatggcgcggccgcggcgcttggcgtaatagctatagaggaaggaaagcctctcgccgtcaaagctcgcgccgtcgatctgcgcgccgaaggtggagaagtcgtacagcatgccgccgatctgcaggcccttctcgtacacggcgctgccgtcggcgaactccgccacgacgtgcgcgcgcattctgcgggcgttgcggatgcgcagggccatggccagggcgatgagcgcgcctgccaccaggatcacccacccgagccaggaaaccgccgcaagccatggctgcacgattagcaccacgccgaatcccagaaagatcaggcccttaatcagctccaccacgagcggcgagcgccggttcttcgccatccgaaacccctccgtttctttccttatagtataacacagttttgcgcggtttcaaagcgccaaaaagagcggcgcccgcaagggagaaccttgcgggcgccgcctgttttcacagccgagatcccggttcgtcaggaagtgtg

SEQ ID NO: 3098 - DNA, 5193 bp, Unknown
  16S sequences of unknown bacteria
ctctccacggggcgcctgaccaaggaaaaatgtcagaaacttctgatcgaagccgtgaaaaagtcgcgtcacgcggacgagatacaactgttcatcgcgggacagggcccgttgctcaaaaaactcgtaaaggcgggcgaggatctgaaaaatccgcccgtcatcggttttcatcccaaggaagagttggtaaagatgatcaactactgcgatctgtactgccacccgtcgtatgcggagatcgagtcgatcgcctgtgtcgaggcgatcacctgcgggctggtgcccgttatttccgacagcaaaaagtcggcggcgcgctacttcgcgctgcgccccgaatgcctgttcagcgcgggcaacagcgcgaacctcgcgcaaaagatcgactacatgatcgaacatcccgaattccgcgaaacgttgcgcacggaatatgcggaatacgcaaaacagttcgccctggaaaaatgtatcgacgaaatggaaaaaatgtttaccgacgcagtcgagggaaaacacagataaaaagagccgcggaaatatttccgcggctctttcacgttatccgaatattttttgcgtcagttctttgaaatcccgcgcgaaacagtcggcgcccgccgcgacgagttcatcgcgcgtgcggtagccccaaagtacgctcacgcagcgcattcccgcgtttttcgcggtttcgacgtccgtatccccgtcgcctacgaagaccgcctccgcgggtgaaacgcccaactgtttcaggatcgcctgcgtgcccgcgggatcgggtttgacgggatagcgggcggaattgcccagaacggcgtcgaacgcgtgttcccgcaaaagcgttctgcacagcacttccgtcgtattctgcgccttattggtgacgatcgcggtcttgacgccccgcgcccgtatatcctgcaaaaacgcagattcgccttcaaacattttcgtgcgcccgttgtcccaatgcacgtgcagatcgccgtaataggcatagcactcgtccagcctgtgccgttcattttcgggcagcgacatcgccgtaaactcgcggccgccgtgccccacgaataggcgcgtgtcctgcatggaaacggggggaaacccgaaatgcgcgagcatggcgttcatacaggcgttgagatcgggcagagtgtccaaaagcgtgccgtccagatcgaaaagtatcgcttttaccatggtatcgctccgatcacattttttcgggaacgccgatccccagaagagccagcgcgtttttcagcgtttgcagcgtcgcactcgtgagcgcaagacggaaatttttgtccttttcttccgcgcccaagatcttgcagtcgaaataaaatttgttgtagatctgcgccagatccaccgcgtagcgcgcgatcaggctaggctcgtatttttccagcgcgtcggaaagaagttcgggaaattccgatatctttttgacgagttcgaattcctgcggacagatatctttcgcctcgtacgcgcttacttccccgccctttgaaagaacgctgttcgcgcgggcgcaggtgtactgcacgtagaccgacgtttctccctcgaaattgagcactttatcgtaggaaaaggtgatatccttgatcttattgttgtaaagcgcgccgaaaatgaccgcgcccacgcccaccgtgcgggcaatctcctctttgtcggaaagggaggggttcttttcggaaatgatctcgtacgccttttgaatacacttgtcgatgacgtcttcgagatacacgacgttgcccttgcgggtagacatggcgccctcttccaaagataccatgccgtacgccacgtgcaccagatctttcgaccattccttgcccatcagttccagcaccttgaaaagttgcttgaagtgcagattctgctgataggcgaccacgtacaggcatttataaaaatcgtacgtttgcttacggtacagcgccgcggcgatgtcgcgcgtggcgtacaggctcgcgccgtccgaacgcagaatgatacacggcggcatgccgtacgcttccagatcgacgatctttgcgccctcgctctcctttaaaagccccttttcttccaactcttcgatgacgggacccattttgtcgttgtaaaaactttcacccgcccaactgtcgaaatgcacgtccaaaagtttataaattttggagacgtctttcaaggtgagttccttgaaccactcgaagagcgccacgctctccttgtcaccctcttcgatctttttgaaataggaacgcgcctcgtcgttcagcgcctcgttcgattccgcttcccgatgaaagcggacgtacaattcgttgagcgcgcgcaggccgcccttttccacgtcctcgcggctgccccagcgcttgaacgcggatatgagtttgccgaactgcgtgccgtaatcacccagatggttgatgcccacgggcgtatatcccaaaaatttatgcagtttatagagcgaacttccgagaacggtcgtcgaaaggtgcccgatatgaaagggcttggcgatgttgacggaggaatagtcgatgcagacggtcttgcccgttccctcgtcggaagagccgtagcgctccttttcggaaaggacgcgcgaaagcgtttccttcgcccagaagtcgcggtcgatcttgaaattgacgtagccgttcacagccgaaacttcgctcacgaattcgtccgcgggaacagattttgcgatctcctcggcgatgagcgcgggggattttctgaaaattttcgcaaatttaaagcaaggcagggcaaagtcgcccatctccgtattgggcggcagggcgagcatggaaacgagttcgtcttccccgatcccctctatgttcaattttttcgcgatgtgccgtttaaaatccatatcgacctcgaaatttctgtaatatatcaattttaccatattttcgcggaatttacaactttttgcgcttttccccccgaaactttttgattattttcgcgatttatattataatggcatctgacagacaaaccgaggtgtattcatatgaaattaggcgtagtgggacttcccaacgtgggcaaatccactcttttcaacgcgatcacgcacgcgggcgcagaggccgcgaattatcctttctgcaccatcgagcccaacgtgggcgtggtggcggtacccgacgagcggctcgataaactcgccgccctgtacgacagcaaaaaaataacccccgcggtcatcgaattcgtggacattgcgggactggtcaagggcgcgtccaggggcgaagggctgggcaataaatttttgtcgcatatccgcgaagtggacgcgatcgtgcacgtggtgcgctgttttgcggacgagaacgtgacgcacgtggaaaactccatcgatcccatccgcgacatcggcaccatcaatctcgaactgatcttatccgacatcgaatccgtgcaaagaaggctggataaagccaaaacttccgccaaaggcggcgataaaaaatatctcgcggaagcggaatttctctcccgcattctcagccatctcgaagaggaaaagcccgcgcgcaccctcgaaatgaccgaggaagagacggaaatcatgaaaaacctgttccttctgacttccaaacccgtcatttacgcggcgaacatcgcggaaaaggatatgggcacggacgaaaacgaactgcccatggtcgcaaaggtaaaagaattcgcaaagaacgagggctcggaagttctggtcatctgcgcgaaaacggaagaagaactttcccaactgccccccgacgacgcgcagatgtttttggaagatctcggactcaaagagagcgggctcaaccgcctcatcaaaaagtcgtacgaccttttgggactcatcagttatcttacggcgggcgaaaaggaaacgcgcgcctggacgatcgaaaaaggcaccaaggcgccccaggcggcgggaaagatccataccgatttcgaaaaaggttttatccgcgccgaagtcgtggactggcagatcctgctggaatgcggcagttatacggctgccaaggaaaagggaaaggttcgttcggagggaaaggattacgtcatccgcgacggcgacaccgtcctcttccgtttcaacgtataaaaaagagcggagtacgtcgtactccgctctttttgttttcccgtaaaatttacgaaaatttatacctgctcgtaatagcagccggactgctgtgtaggcgggaaagtttcaccttcgttcatatagagtttgcccatgtcttcgccgttcggtcctacgactttgtaggtaccgctcttgggacaattgtcgcctgaatgcatctgcataaatgaattcctccttgaattttatagtaacagtttgcgcaggagatttaaatttatgcgtcagaaaggaaaaataatcaaaaggatcgatagtacgatcaaataaatgcaaaacgccccgtattttccttttttgatggctttgagcatgatgccgatggcaaacagtccgcacaaaaaagacagcagcgtgcccaccgccagtgcgggaaaaccgatccccgccagcgacacgccccctttcgcgcacttgacgatctccacgaggagcgcgcccgcgatgatcggaacgctcatcagaaaggagaaatccgccgcttcgtcgcggctcgcgccgcaaaggaccgcggcggaaagcgtcgttccgctcctcgatagcccgggtatgaccgcgaccgcctgcgcaagccccacaacgagcgcgcggcgcttgtcgacggggcggtacagcgccgtacggcgcgtcttacgttcggcgagcgccaacaatactgcggtcagcgcgaacgccacccacaaaaactttccgccgaaaaatgctttatccaccagatcgcccaagagaaccccgacgagcgccgcgggcacggtggcgatcagaagccttaaaagatcggaaaagggcggacgaaacagcgcgagcagttttttgaaatagaccgcgatgacggcgacgagcgtccccgcgtgcagtacgatccccaaaaacatatccgcgccgcccgtactcacccctaaaagccgctcgaacagcagaatgtgtccgctggaagaaacgggcaagaattcggtgagtccctgcacgatgcccaataccgccgctttccagat

SEQ ID NO: 3099 - DNA, 20114 bp, Unknown
  16S sequences of unknown bacteria
tggccggaacaaagctgccgatctgcgccatgatgaccaacagcgcgttctgccgcatgtatgtggatttaccgcccatgttcggaccggtgatgatgctgatggtctgccgttcattcatatgcagattattggacacatagcgttttttcttcatcatgctgtcgaggatcggatgtcttccttcgacgatatcgatggcatggccgtcatgaaactgcgggcgcacatagccatgatccgcagccagcacggccagcgcataaagcacatcgattgtggccagtgcctgcgccagatcatgaagcttaggaagatagaccttgatctgattgagcaggtcggcaaacagctctgcttccagacggatcttctcttcctgggcatgcaggatcagttcttctttctccttcagctcatcggtgatgaagcgttctgcgttggccagtgtctgtttgcgcacatagccgaattccggcttgatcgcatccaagctgccttttctgatctcgatatagtaaccgaacacgcggttatagccgatcttcagcgaacggatgccggtccgctctttttccctggcttccagctccagtatccagctcttcccgtctctgctgatgccgcgcagttcatcgaggcgcgcattgtatccgtctacgaatacgccgccatctttgatggtcagcggcggttcatccacgatcgcgccatcgatccgatcatgcagctcctggcaagtatcgatgttccggtattcctgatagctggggcagtctttgaacagatcgaagatgaccggcgcatgttcaagcgtgctcaccaggcgcagcacatcgcgcggagacgcgctgccatatgctacccttgcgccgagtcgttccaggtcatagacataacgaaggtgttccttcagctcatcccggataaggaattcgctgctcagatattcgaccgcatccagccgcttctcgatctctttgcgctggatgagcggatactcgatccattttttcagcatccgtgagcccatggcgctgagacatttatccatgaaggaccaaagggtcatctgccggtttccatttcgctgggaactggtcagctccaggttctgcttggtcgaataatccatctgcaggaattcctgctcatagatcatctccagcggctgcagatgcgacatggagcgtttctgtgtctcatcgagataattcatcaacaagccgaaggtgtgcaggactttctgattctcgatgccctgcaccagcggctgatagatctcgcggatctcatctttctccatggaggagatcgtgatcgtctgcagctcttcgatcatcttgcgcagccgccggtcaaactgatgttccacgacgatctcgcgcacattgttctgcaaaagcaccttttgcaaagagatgacgcttttatccatgagctgtgccttcagctctcctgtcgtcatctcacagagcacgacgcacagcccgtactgataatcatatacggaagcgatatagctgctcgtccgctcatcgctctgttcatccatcagcgtcccgggcgtcacgatgcggatcacttcacgctgcacgagtcccttggccagcgccggatcctccacttgttctacgatcgcgaccttatatcccttctggatgagccgctggatgtagctatttgccgcatggtgcggaacgccgcacatcggcactttttcctccacgcccgcattacgcccggtcagtacaaggtcgagctccagcgacgcagtcttcgcgtcatcaaaaaacatctcataaaaatcaccgaggcgataaaagatgatcgcgtcgggattctcttttttcatctgcagataatgctgcatcatcggggtgtatttatttttttccgccatctgcatcactccatccatttagtcatgatctctgatctgattttatcattataccatattttgtcgattttcagtgaatctgatcgtgtctgggcacggtaaaaatcacgtttcccctgccttaatttcacacaaattatccgatgaatctcccttctgatctgatgaaatatgctataatggttaaagattcctatatggatctgctaacatcgttatcgggaggaatgtcatgaaacgttctctgaaatataccaagcagcccaaccggatcgattttggatttctggccattctgatcggcatgatgatcacgagcctgatcgccatattcacttcattcaacttgatgtcacagagcctctccggaacatccgtcatgatccagcagcttgtctggtatgcattcagcttcttcatcatgggtctgatcatgtttttcggaaacgatacggtcatgaaatatatcaagctgatctatttcattttgcttggctgcctagcttatctattattatccaaatatatggaagcttttctgggaaatggccgtcatctgccgctggctgatgacatcaacggcgcatatgcctggttccagtttccctttgccagctttcagcccagtgaattcatgaagatcgtactgatcctgatctgttcagacatcatcgatcaacacaacagcaaccgctccatggtcacgtataccagcgacatcgagctgttcaagaagatcttgatctgggccggtccgccgcttttgctcatcctgcttcagccggataccggcgtctgcctgatcatcggcatcacgctgctcgtcatgctgatgtgcagcggcatcaagaaacaatggtttctcatcggcggaggcatcgtgctggccgctgtgctgatcttcttctatttgtatttcttccagtatgagctgctgacccgctatatccagggatatcagctcagcaggatcaccgcgtggatctatccggaggaaaacatgctcggcatcggcaatcagctctacacttccctgctttcgctgggatcggccggcatatctggcttcggccttcagcctgatgtcgtcgccataccggaggcgcataccgatttcatcttcgctgccgtcggacagtcattcggtctgatcggcacgaccttcatcttgatcatgtgcctgctgcttgatctctacatcctgcggatcgcagtcaatacgtccatcatgtcagaaaaatacatgatcagcggcgtgctcggcatcctcgtctatcaacagatccagaatctgggcatgatctgcggcctgctgccgatcaccggcatcacgctgccgctcatctcttatggcggatcgtcgatcctttcttacttcatcgtattcggcatgatcatgaacatcagttcccatgccaagaagtattccgatttcacttacaattgaacaggcggacagaaagctctgtccgcctgttttgcgctcatttgttcatccacggcgtccctaccgcacgcatcactttggatcggcaatttccttcatagctggcgccgatcttctccagcagctgctggaacaccttcagtccatcatgcggtctgaggtattcatactcgacttcataatcatactgctcgcgatattcattatagtccaaacagatctccgcatcctccgtgatcatcttggcccgccaggtcgtcagcctgccgatctcctgcagcggttcagtgatctgatgctcctttaacagcgcctgcacctgcggattatacaatgcaaaaagcgaattctcactgaccggcagttcatattccatgaccgtatcgctgttttttctgatcttcagcgtaaagatatgtttgttgttgatcgtcctgatccgcatcgatccatactgcctgcggatcttccagtcctctgtgtcataataccggttttcctgtttgaccggtctgggattgccgagcagatcgcagagccgctgaaactgcttttcgctcagcatcaccttatattctttttcctcatgttctttcatttccattcctcctgcacaactgtcgtcattattataccacatggcaattctgttcaaactatggtaaactttactgcataaaggagtgatcgcatgcgttatatgatcgtctgccgtcaggatgaaaacacgctgtctgttggccgccaggtcagaaacaagctggatgaagccggatggcagcatacggaatcagatccgcagctggtcatctgcatcggcggggacggaactttgctttacggcgttcatcaatatatggattcgatcaatgaattgatgttcttgggcatccacaccggaacgctcggcttcttcacggactatacccaggatgagctttcgctttgcctggacgatctgctgagcaaggagccggagatcttcacctccagattgctgaagatcgaagtggacacgatgccggagccattttacgcgctgaatgaaatgcgtgttgaaaacgtcattcactctcaggcagcggacatctatgtcgatgatgaattcttcgaacgctgtcacggctcaggcatctgtctgagcacacaggccggatctacggcgctgaaccgctcgctgaagggcgcggtgatcgacagcggactgtcggtcatgcagctggccgagatcacgccgatccagcattccaagcaccgttcactgggcaatccatatatcatgatggaaagccggaaagtgcgtatcgtcagcgatgattttcagaccgcgctgctgggctatgatcataagaccgtcccgctgctgaatgcccgagaagtcaggatagagatgtccgataagcatgtccgctttgcccgctacccgccgttacagttatctgaagcgattaaagaatttatattaaacatattattataaaaaaattaaaggaggatatcatggctaagatctttgtttatggcacgctgctggaaggctgccgcaattacctgcgctacctggatggacatgttcatcagatcatgcctgcctatgtcaaaggcacgctctattcgctgaagggcagagattatccggtactgctgccaggcagcgacttcatccgcggtgaggtcatggaggccgatgatgaggtcatccctgccatcaatcagctggaaggatatgtgccgggcagtcctgacaatgaatatgaaaaagtcagcgcacagatttatgatgaagaaaaacagccgctctgcacgcttccggtatatatgtataatatcgatcgttcagatcaaagagaactgatcgaagcgcggatcatttccaatgattaccgcaaatggttgtcttcccgagcaaaaatggagtagatttctcctttaagagatctactccattttttttcttccttcgaatgctttctgcaaggtgagctcatccgcataatcaagatggccgcccatcggcagtccatgcgcgatccgcgtgacattgacgtgctggtcttccagcagcttggacagatacaatgcggtcgtctctccctccactgtcggattggtggccaggatgacctcttctgtctgttcatcgatgcgccgaagcagactatcgatattcagatcctgcggcatgattccctttgcggtattgatcacgccgttgagcacatggtagacgccattgtatgtattcatcttttccatcgcgatcacatctttcgggctctgcacgacacagatgatccgatgatctcgcgtgtggtctgaacagatctcacattcgctgccttcacacagatttccgcagacttcacagagatccaatccgtttcggactgcctgcaggctggcgatcatctcttccaaggtctcctgatcccagtccaatactgtaaaggcgtatcgctcggctgttttgatccctacgccaggaagatggcggaaagctgtgatcagatcttcaaatttcttcggatacatcaaaacgctcccggaaactgcatgccgccagtcatcgacttcatcttttcctctttttctgcctttgcccgctcgatcgcgttattcagacagctgaccagcatatcctgcagatcttcacgattgtccggatccatcatttcatcgctgatctcgatattgctcacgctcatgtttccgcgcacggtcacgctgaccgcaccgccgcccatgctttccgtataactgtgttcatccagttctttctgcgtatgagaaagatcctcctgaagcttcatggcttgactcagtaatctctgcatatccatatgttcattcctccatcatgacgatctcgccgccgaacagatcggtcagtttttcctctgttgtcggctcatgtttttccccggtgttgttctgtttcaattctacacgaacaggttccggcaatgtgccctgctgcatatgttctttgaatttttgaatgacttgtttgcgctgctgctcatcgatagcgaatacctttttctgtatgcccagcagttcatggatgaagcgttcgagctcttcatctcgttccagctcgttgatctcacgggcttccagcgggctgtcgacggcaagcactagataattgacgccgctgcccacgatcacggcatgcttcagcgcattggcatatttcacccattccagttcattcaaatatgcgggcagctggctgaatttctccagatcttgttgcttatgctgtttattggcgccggcgagcaatgcgatgatatattcatcttcatagcccaggaccggttcaggttctttcttcttttttgccggttttgcaggtttctctatttgtttttcttctggctgttcacgttttgtttcacgtgaaacactcatcacgaccgtcgggatcggttctggttctgagaacgatgctttctgctcaggttcagcctgtgaaaccgccctctgcacgctcgaaaccgctgagacagacgtttcattcatcatcttcaataccgcgatctcaaaatatgacgaaacatcagatgccattcggtatttttccatcgtttccatcaacacatcgatcatctgcaagcggcgcgcttcaggaacatcgaccaaactgtccttgatgacatttagataaacatccgcaaccaatgtctgatctccggtataggaatagaccaggctgtccttcaacagatcgatcagatccgcagtcagccggcggatatctatgccgcgttcagacaaggcctcgatctgttccatcaattcagtatattcccggtccagcacatgagaaagaagcgtccccttctctgccggcgtcgtaataccgtaaatagtattgacatcttctgtcgtgatgttatcctgcgcataggcgatgcactggtccaaaatagacagcgcatcacgcatgccgccctcagaaagcgtcgccaccagtctgaccgcatctggttccatatggatcttttcctgttcgaggacataatccaaccgctcgaccatatctgatacggagaccttattgaaatcgaaacgctggcatctcgagatgatggtcggcagcactttatgcggctccgtcgtcgcaaagataaagatcacatgttcaggcggttcctcgatggtcttcaacagtgcgttgaacgcacccgctgacatcatgtgtacctcatcgatgatatatactttatatttcccttcgatcggcgcatatttcactttctcgatcaaattccttacttcttctacgccattgttgctcgctgcgtcgatctcgatgatatccggatgagatccattctggaattccacgcagttatggcattctccacatggcgcatgctcttcagattcgcaattcagcattttggcaaagatcttcgcgatcgatgtctttcccgttccgcgcggaccgcaaaacagataagcatgtgcgatccgatgctgtctgactgcattctgaagcgtcttaacgatcggcttttgcccggcgacgccatcaaagctcaccggacgatattttcgatataatgcctgataagccatgtcacaccttctttctaaacgatgctgagttcattatatcacatggaatgcggctttttacatcaatcttttccccctcatcactgcatgatggcagaaaaaaaagagtgcgaacactctatgtctgttgatcatcgggacatctatccatcatccggctgttcttcttctgcagccgtttgatccgaaagaaatgccggagcatattgctgcattcctcctgcatcagtccggattccacttccggatagtgattgaatccgctcgtctcatacatacgcatgcagctttcgatgcttccgccttttggatcactggcgccgtagtaaacctttcgaatacgcgactgcaggatagcgccggcacacatcgggcatggttccagggtaacatacagatcacagccatcaagtcgccaactgttcagcttcttgcacgctttttgaatagcgaggatctctgcatgtgcaatagattgctgcgtgctttcccgccgattatacgctctggcaatgacttttccattttttacgatgacgcacccgatcggcacttcatcgatatcccaggctttttttgcttgcttgattgcttccatcataaaccggtctgacatggtacaccctcccgatgtttcacgtgaaacacataaaacaaaagctaccacacatgatagagcttccttaaggctgcttcgttcccgacctgacctgattcgtaagataccattgcagtagcagagatattatagcacagagtctccatccatggcaagagcgagttttttacccgaaaccacacgtttagataaacatcccatctggcagatggagatgaagatcaagcgatttctctatgcggaaagtctgatgacaacgcggcgaaacaggtaagacgagaacagaaagtcccatctccttgctctgatagccttcatggttatccgcatagatattccaacttgcatactgccagctgccctgaagaagataaaatgggcgcatatgctccgcacaagtgaacagaccaagatcgatctgtgatcgttcaactattcgtcttgtcagatgatcaaacaataacgatccgtatccacgatgccgatatgagggatgcacgcaaaaacaagatagcgcaccgaccaaaaaccgttgctcgtcgatcatcgtatcgatcaggatcacaccagcataagccgtcatcgtcccatgaacgaacaagccgaaagactgaaccggaaaatcattccgatgcacacttccctcttcctgctcaccccagcaaagatggacaaaccgatcaatcaatattcgctcagtttcattcaacgcatgataacgagatgtcttgatttctatattcttcatcacatagagtatatcatatgctttattcaaaagaatagaaaaatacacgccgatcggcaaaccacgaacgaacagagaaacaaatccgttttttcattcaaacttatgctttttttgatgaatcgaatcaaccgattatccatccatcaattactcgatgcatatcagaaggtgtcaaatataataaaaacatgagaaaaagcctttaattatcggcattttctcatgtttcacgcacaaaaattcaaaccgttcagaatcacctgatcatggtcgacttcccatcttctcgtctaatcaggcaaatcagtaatgaactcgtgtttattttttaggaaccagcttctcctgaccgcccatatacggtctgagcgcttccggaatattcactgaaccatcttcgttcaaattattttccaggaatgcaatcaacatacgcggcggagcaacgaccgtgttgttcagcgtatgcgcaaagtattttccatcgcttccctttacacggatcttcaatcttctggcctgagcatccgtcaggttagagcagcttcccacttcaaagtatttctgctggcgcggagaccatgcctcgacatccacagacttgcatttcagatctgccagatcacctgagcagcattccagcgtacgcaccggaatgtccaggctgcggaacagatccaccgtattcatatacagcttgacgaaccaatccgcgctttcttccggcttgcagacgacgatcatttcctgcttttcaaactgatggatgcggtaaacgccgcgctcctcgatgccatgcgcgcctttctcctttctgaaacatggagaatagctggtgtacgtataaggcaggtccttttcatcaaggatcgtatcgatgaactttccgatcatagaatgttcgctcgtaccgatcagatacagatcctcgccttcgatcttatacatcatgccttccatttccgcaaagctcatgacaccggtcacgacattgctgcggatcatgaacggcggcacgacatacgtaaatcctctgtcgatcatgaaatcacgggcataagaaatgactgcactgtgcagacgcgcgatatcgcccatcaaataatagaaaccgtttccggcaacttttctggcgctgtccagatcgatgccattgaatttctccatgatctctgtatgatacggaatctcaaaagcagggacgacaggctcgccaaacttctccagttctacattctcagaatcatccttgccgatcggcacgctgggattgatcatgttcgggatctgcatcatgatctcctgcacgcggtctctgaccactgcttctttttcctcgatctccttcagctcatctgccatggaagcgacctgctgtttgactgcttccgcttcgtctctctttccttccttcatcagaccgccgatctgcttgctcatcgcattgcgctgtgcgcgcagatcatccacacgctgcttcatcgtacgcagctcacggtctttgacgatcacttcatctaccagcggaagtttctggtcctgaaatttctttttgatgttctctttgacgagatcaggattctcgcgtaagaatttgatatcaagcatgctatatcctccctgttctgcaaaaaaagaggcttcgcaccataaagggacgaatgcctcgtgttgccacccttcttattccgtcaaacggaatcactcaaagcgataacggcgctgccgaaaacagatactttattccctgttttgctcagaggtgctttttcgctgctccgtttcacatgacttgcaccatccgtcatttctcttcggtgaatgaaacagttacttttcctcttcattgctttcgcacctattttataagaaagcgtataaaaagtcaataaatcagagggatgtgtccaacaattcaaaaaaatagagctatctctcaaattcaatgattcattgttcattttgatataaattgccattttccattttcaacactatatcacataaaattgaaatatcttctttattatgactggcaataataatcagacagcctttctcttttaagcgcagcatttcagcctatagaattaggtatgtttttatatgttgataacgtcaatttatctataattgttttatcattatcacatattgcaattttcataacatataccttcatttatcggcgtcaaataaaactgccatacaagggccggtgtcagcttttaagctgtcattggtcttgcttcttgttcgttcaagatggctctattatataataaaaccaatagtttttctatattgataaaaacctttcatacgtattgatattcttgtttttttgaacacactcttcttctcgatcttcaatccatccagcagcaatttcaaatattgatgagaatcatgggatcctgctcagcatgaaccggctggatagcagcgggatcgtcttgttccggtacagataaaaagccctgcggccattatagagtgttttgacaaacataggaattatcctttatttgtggatgagctgcatttgacgcttacccataaaccaagacatagatctattttcaatttacaatacaactgttttgcttgggcgaaatgatatgaaatttgattgtccttttgatgtcacacaaagaatgatgatcctaaacgatcatttatatccttgatgctaaatagaaaagaagtgtcactgttcgatgaaataaaatgatataatggtcgtaaagagaggcgatgacaatgacttttcaagaaaaatatcatgcttatgtcaatgaaaccctgtctgccgtatggaatgacaatcaaaaagaaatcgaacaggcagctcatatcctgtataatgcggagtgcggtggacattgcatttatacctttggcactggccactcccatatgcttggacaagatatctatgctcgtgccggaggctttgccaagatcaagccgatcgtggagatcgagctgacgctggctacccatccgaccaaaagcacgcagatcgaacgtctggccggctatgcggacgtccttgaacagctgtatcatgtcaaagaaggagatgtcatcatcgcggccagcaattctggaagaaacgcgctggtcatcgaatatttgctcaggatgaaacaaaagggcgcacgcatcgttgcgattacttctctgtgccacagccagaaagtgaaaagccggcatgaaagcgggaaaaagctctgtgacatcgccgatgtcgtattggacaacaaagcgccctatggcgatgccggcatagcgcttaacgaaacggtatccatgggtcccgtcagcacgctcagcggatgcttcctgtctcagtgtatcgtaggccggatggcagagctgctcatccaggatagcagagacgtcccagtcttccgctccagcaacgccgacggcgcagatgagtataaccaggagctgtttgaccgatacgtcctgtaatgataaaaaatcactctcccgaacaggaaagtgatttttttactttaaggtcacgctgaaatcgatgatctcaccgctaatcgcattgatctcatactgatatccggcatacggatcctggaaccggatgtaatacacgagccggttgtcatcgcagtccaatgtatacgtatatgcgctgatctcatcctgatcaacgccggcatgtccgaatacgacatctttggcctcatcgttggtcagatagccgctgtgattgacgacctcattggacgtgatcgatgtatattccagatccttatactggatcagcgtatccagatcagtaatggaaagtccgacaaagtcctcgaactgataagcaggatctgactgaacgagctcactgatcaaagcggcctttccttcagatatgccatatttttgcgcgatttccgtatattcattggtggtgtccatatcttgagacaggatagagatctgcaatgaattgcctttcatcatctcttcgatatcattcacgatcgattcccgcagcctgcttcgcatctgctcatcttcgctcttgaccgtgaccagaagcgtattcttgagctcatccagatagccatgacgcatcatgctgccgatcaatgcattgacggccacatcgatgtccacgccttccagttccatgtcgtcgagcactaattccccttcttcattgtgaacgagaacttccgtaacgttttcctctgcatccaaggataattctatgctggggttgacgtcgaacgataccacggcagatgccggatgaagcgaagggagaaaagcaaagaccagcatgaccgcacaagcggcgcatacagccgcgcataggcccggatacaggcctcttcgccttctctgtctgcccttctctgtttcaggcgcttcatccggttcgatgaagcggagctgatccatgatggcatccttctggtcaggcacaggggcttgttgaaagacctctttccattccggccgatggtgattttgtttcattccgtcacctccctgatcatctgtttcatcttcttgacagagcgatgatatttcgacagcacggtcgataagttaagatccatgaacgaagctatctcgcgaaaagacattcctccggatacatgcatggaaacgatctcccgctcttcttcattcagtgcgttcatcagcatctccagcgttacttttccgctgatatccggatcctcggccgcaatctcgatcgattcatccaacaagacatttcgctgccgggaacgaagatacatcaatgattcgtttctggcgatcccatagatccacgacatcggctgtcccctgttttcatatcggcggcagttctgatagatgctcagataaacattttgtgtcacatccttcgcacattctgcgttgccgaccatcccatggatgaagatatacaccgcacgattggtcatttcataaatttctgccatgatctgctgatcatcagctaaacgcatgatcagatcttccagtctttttctatcgttattcatacaataaacaatatatcagatacagatcatgagattatcatatgtatgtaaataatatgttaattctatgtcaatttctggctgtgtaacgaacagacacgcaagcagacaggatcatctgtctgcgcgtgagatattccgttcaatatagactaatcatcgtcatcgtcgtcatcatcatcgtctctgtcatcatcatcgtctctgtcatcatcatcgtctcggtcatcatcgtcgtcatcgtcccaatcgtcatcatcgtcatcccagtcgtcatcataacgatcgtcatcatcgtagcgatcatcccagtcatcatcgtaacggtcgtcatcctgatcgtcacgatcatcccagtcatcatcatagcgatcgtcatcatatcggttattgttgttcgatgatgatggctgtctgttggtggttccctgtgaagagctgctgccagaattagatgagctggatgaagactgcgtattcttgcggtcatcatcatcgtcgtcatcatcgcggtctacgcttctgacgacctttttcgtctgcgcgtcgatctcatactcatattcaaagccgtctgcgttaaattcgatctcataagtgagacgtccgtcttcataaccaaattctacttccagcccggatacttcgttcttcgccttcttcgcattgctcaacgcgatattcagcgcttcatcccgcgtgatatacttggatgtgctgaccgtaccggtcatcttgctgacatcccggtcatcatcgactgactcgtagatcaagatcagttcctgggcgctcagctttaccagatcttcgatctgataatcgctgcgttcttccaagatctcttcgatcaatgccgctttgccataagaaatatcatatttgttgacgatggtctccatatcgtcatcaatatccatgtcctgtgccaggatcgcgccggaaatatcatatgtgctcagcgtagaggagatgttttcgctcagctccttctctactctggaacgctcatctgcatcatcgttttctacggaaagcagcacggtattgttatctgtcgtcaaatacccctgcttgaccatcgagccgatcaccgcattgactgccacggtcatatcggtctgttcaagatccatatccttcaggatctcttctgcttccttattctctccaatgacagagacgactgcatcatctctgttcaaacgcatctggatgcttggattgacatccatcgtgatgactgtagatacctcttcgccgccggtagcgctgccgcatccgctgaccagacccatcatcagggccgcggataataagatcgaatactttttcatgttcattttcctccgttttttttacttctcaaaggccttttcacttaatcaatgcatacggaggatgttttattgcacgatattcaaaaaaatttgaaaaaaaggaaattttccttgtgatctgatcggaaaatttcctatggatatcattcttcgctttgttcttcttcgtttttagccacaactgcaactttggttaccgtctcatcatcagcgacattgatcagcttgacgccctgggtattgcgcccgtaaacgccgacgtgatccagcgcgatgcggatgatgatccccttatcggtgacgatcatagcatcttcatcgccattgaccgcacggacggtgaccagcgaaccggtcttggtcgtcacgttgatcgtcttgacgcctttgttgccgcggttggtcttacgatattcatcgatctcgcttcgtttgccatagccattctctgaaacagaaagcagatattttccttcgtggctgacggctacgccgaccacggtcccaccatcggtattaaagccgcgcacaccgctggccgtgcggcccatcggacggacctcatcttcttcaaagcggatgaccttgccattggaaccagcaatcaagatctcatcttcaccgctggtcagcttgacattgatgagctcatcatcctcacgcagctggatggcgagctttcctttccgcgggatatagtcgaaatcttctatttttacccgcttgaccaagcccttctgcgtcacgaagaacagatactgggccggtgagtccttcttcatcggaaccagtgccgtcacgctttcctctttttccaagctcagcagattgaccactggcaggcccttcgatgtcctggacgcattggggatgttgtagcccttcagccggtatacccggccaagattggtgaacatcaacagatgatcgtgcgtggacatcgtgatcagtgtctcgatgacatcatcttcgttgagcgacatgcccttgacgccgcgtccgccacgctgctgtgtcttatatgtatcgaccggagcgcgcttgatgtatccgctcgtggacatcgtgatgacgacatcctccaccgggatcagatcttcatcgtccatctccattccggaatcagagatctctgtacggcgctcatcgccatatttttctttgacctcgctcagttcctgccggatgatctcgtggatacgggattcattggcaaggatatcgcgcagatccgcgatcgttgcgagcagctcgttatactctgtctcgatcttgtctcgttccagtccggtcaacctgcgcagctgcatctgcaggatggccttggcctgtacttctgataaggcgaactgctccatcagcccctgcatcgcctcttcgtcattgcgggaggcgcggatcagcgcgatgatcgcatcgatatgatcgagcgcgatccgaaagccctccaggatatgggcacggtcctctgcctttttcagatcgaaccgggtgcgtctggtcgtcacttcgacctggtgatcgacataatgctgcagcgtctccttgatgcccatctgtttcggcgcgccgttgaccagggaaagcatgttgatgccaaaggaagtctgcagcggcgtcagccggtacagctgattcaggatcacatactcctgcacatccttgcgcagctcgatgacgatgcgcacaccgtctcggttcgattcgtcgttcagataagtgatgccgtcgatgaccttctccctgaccagcgaagcgatcttttcgatcatggtcgccttgttgacctgataagggatctcatagacaatgatgcgtttcttgccattgtccatctcttcgatctttacctttgaacggatgatgatgcttccccgtccggtctcataagcctggcggatgccagagcggccgaggatgatgccgccggtcggaaaatctggtcctgggatgtaattttccatcagatcgctcaccgtgatgtctggatcatccatgatggcgagcgtcgcatcgatggtctcgcccagattatgcggcgggatattggtggccataccgaccgcgatgccaaccgaaccattgacgagcaggttggggaaacgcgccggcaagacgaccggttccttttcttccccgtcatagttatcttcaaaatctacggtatccttctgaatgtccttcatcatctccatggagatcttggacatcctcgcttctgtatatcgcatggccgccgcgccgtctccgtccatcgaaccgaagttgccatgtccgtcgaccaacgggtagcggtaggaaaagtcctgcgccatgcgcaccatggcgtcatataccgccgtatcgccgtgcggatggtatttaccaatgacctctccgacgatacgcgcggatttcttgtgcgctacggaagcggtgatccccaaggtgttcatggaatgcaggatacgccggtgtaccggcttcatgccgtcacggacatcgggaagcgcacgctggacgatgacagacatcgagtagtccaggaaagatgtccgcatctccctggaaatgtctacttgttccagcttgtcataatttgtatccatgtacatctacctccttaaatgtccaggttggcataacgcgcattttcctgaatgaaggtgcggcgcggtccgacatcctcacccatcagcatctcaaatacggcgtcggcttccatcgcgtcattgatggtcacctgcttgagggtgcggttctctggatccatggtcgtctcccaaagctgttccgcgtccatctcgcccagtcctttgtaacgctggatcttgtagttatctttgaattctgctttcagcgcgcccatctgttcttccttgtaggcataggcgatcttctttcccttctggatcttatacagcggcggctgcgcgatgtatacataaccgccttcgatcaccggacgcaggaaacgatagaagaacgtcagcatcagcgtacagatatgcgcgccgtcgacgtcggcatcggtcatgatgatgatcttatgatagcgcagcttgctcagatcgatctcatcctggatgccgcagccgaacgcagtgatcatcgaacggatctcggcgttttcaaagatgcggtgcatccgcgccttctcgacattgaggatctttccgcgcagcggcaggatggcctgggtacgggagtttctgccctgtttggcgcttccgccggcagaatcaccctcgacgatgtagatctcgcattcctctgcgtttctcgagctgcagtcgctcagctttcctggcagcgaagagatgccgtccagcgcgctcttgcggcgcgtcagctctctcgccttcttagcggccagacgcgccttaccggccacgatggccttgtcgacgatcgtcttggcgatatccggatgttccatgaggaaacgctccagctgctcgccgaggatgttggagacgatcttgcgcacctcggagttgcccagcttcgtcttcgtctgtccctcatactgcggatccggatgcttgatggaaatgatggccgtcagtccttcccgcacatcatcgccggacagcgtctcgtccttcttgagcatgttgttgtttttcgcataattgttcaatacgcgcgtcagcgccagacggaatccgtcttcatgcgtaccgccctcctgcgtattgatgttgttgcagaaggaatagatattgggcatatagccgtcgttgtactgcatggcgatctcagccaagatcccctgctgcaagccttcgacatagacgacttcatcatgcagcacggtcttgttctgattcagataacggacgtattcgatgatcccgccttcatagcagtaagagcggctcaccggttcatctccgcgctcatcgcgcagattcaagcggatattgcggttgaggaaggcaagctgccggatcctcgtgttcaatgtctcaaaatcatattctgtcgtctcggtgaagatcagcggatcggccttgaagcgcacgaccgtgccgtgccgatcgctggcgccgatctccttgagcggcgcggaaggatgaccgccctgctcaaagcggatgaagtatcgttttccatcctgatgcacggtgacctccagccattcagaaagcgcgttgacgacgctggcgccgacgccgtgaaggccgccggatactttatatgcgccgccgccgaacttgccgccggcatgcagcacggtcatgatcgtctccacggcggagatgccggtcttttcatggataccgaccggcatgccgcgtccgttgtcactcacacagatgacattatctttctcgatgacgacatcgatctcatcggcatagccggcaagcgcttcgtcgatgccgttgtccacgatttcccagacgaggtggtgaaggccgcgcgcgccggtcgttccgatatacattc

SEQ ID NO: 3100 - DNA, 20587 bp, Unknown
  16S sequences of unknown bacteria
agggaagcacgaagcgcgcgcccagtgggcgaaacagcgcgaagtaagcccagtgaggcaaggagtatcccaagcgagctctgcgagcgaagggagacgactatgccgaactgagggaagcacgaagcgcgcgcccagtgggcgaaacagcgcgaagtaagcccagtggggacgaagcttcgccgccgccagtggcggaaacaggcgaagcggaagtccaatgagggcgaaagaggcggcgcagccagtggctgcaatagccgccgatgagcccagtgaagcaaggagtatctcaagtgagctttgcgaacgcagagaggcgaccatgctgaactgagaggcaggaggattgcaagcggtagcgtagcaagacgactattgcgaattgtgggcacataggagtatcccaagcgagctctgcgagcgaagggagacgactatgccgaactgagggaagcacgaagcgcgcgcccagtgggcgaaacagcgcgaagtaagcccagtggggacgaagcttcgccgccgccagtggcggaaacaggcgaagcggaagtccaatgagggcgaaagaggcggcgcagccagtggctgcaatagccgccgatgagcccagtgaagcaaggagtatctcaagtgagctttgcgaacgcagagaggcgaccatgctgaactgagaggcaggaggattgcaagcggtagcgtagcaagacgactattgcgaattgtgggcacataggagtatcccaagcgagctctgcgagcgaagggagacgactatgccgaactgagggaagcacgaagcgcgcgcagtgcgcggaacaggcaaagcggaagtccaatgaacaagaggaaccttttgggtgctgcccaagcgttttccccaggccctatttggaggagaactggcgacaccaatttggggctagcgactgggcttgccaacgtccagagggcattttcccgtcctagcctgtttattcgcgtttttgcgggccgagattgccttcgcgccagtgcttgcggcacagagcggtgtagctctcgttgccgccgagcacgatttgttcgccctctttgagtacgcgtccatccgaaatgcgggcgttccaggtggcctttttgccacaccagcacacggttttcacttcctcaatggtatccgcccaggcgagcagccattggctgccttcgaacaattcgccgcggaaatccgcgcgcaggccatagcacaccacggggatgccgtcgtcatccacgatttccaccaagcgctgcacttgagccttggtcaaaaattgcgcttcatccaccacgatgcagttgtattcgcggtaattgatgcgatcgagctcttccatcaggatgcagggcgcgctcaaaccgcagcgggaaccgacgattttttccccgtcgcgctggtcaatgccgggtttcaccagcagggctttctgcccgcgctcctgatagttgtattgcaccataatcgcgttcgcgctcttggaagatcccatcgccccataccggaaatacagctttgccacaaccataaacctccaatgcagtgataaaaaaccttacaggaattcgacgcatatgccggggattcctgcttgacagaaggcagatcccggatacaatgagaataagggggaatggatgggtgaaaatcgccggggtaatttgcgaatacaatccgtttcacaatgggcatcagcgccatttgcgccttacgcgcgagagaagcggttgcgactacatcgtgtgttgcatggcgggagcgtttacccagcggggggagcccgccattgtggacaaatttctgcgtgcggaaatggcgctgcgctgcggtgcggacgcggtggtggagttgcctgcgctgtttgctgtgcgcacggcggatgtgtttgccgccgcaggcgtgcgcattctttcggccctgggcgcggatgttttgagctttggcgcggaaacggcggatttggcaacgctttataccctggcgcggctgcgcgaggaggagccggaagcgctttctcaggtcgtgcgcgaagggttgcgcgcgggaaaatcgcacgctcgcgcgcatggcgaggcggtgagcgcgcttttgggcttggacacccgtcgccccaacgccattctcgcggcggaatatttgcgcgccatgcaaaaacagggttcttctatgcaaccgctggccatcgcccgcgaaggggaataccacgacgcggcgctttgcccgcttgcctcggccaccgcggtgcgcaaggcgatgcgtgagggaggatctgtgcgcgaagccgtgccggtggaagtgtgggacttgctggaaagcgcgccgctttcccgcccgcttaacgatttggggttgtatcttttgcgtacgacggatctttcacgcctcgtgggagcgggagaagggctggaaaatcgtttgaagcacgcggcccaatgcgcgccaacgttggcggcagtggtggaagcggtgaagtgcaagcgctatacccgcgcgcgcattgagcggctggtggcggcagccatgctgggcatggacggcgcgcttgccgcgcggcatccattgccggaatacgcgcgccttttgggctttcgcaagcaggcgcagccacttttggcaaagatggctcagggagccatcccgctcgtcactcgcgcggcgcagctcaagggcgatgaagcgttcgcgcttgagtgccgcgctacggatctctgggggctttccgcaaaagaccctgccttgcgggtggcaggccgcgattttacgcggcggctgatcattttgtagcgcggcgtgcgagtgcgaatggtttttgcaaaatgtaaaaggaaaagcgcttgaaagttgcataaaatagcggtataatacgaattcagggattttcatacccggaggcaccatgagcaaaaagaggattaccgggcggttctacgtatttgtgattgcaatcgccgtgatagcatttttgctgattcgcgctgtgctgcccatgggcgtggcagaagcggtcattatgcttgcgacggcgacggatcagcagtatttggacgccgtgatcgtgcgcgatgaaacggtcgcttcgtatgccggcgtaacgcgcattgcgtatgtggccgcggaaggttcgctggtgcaggagggggatgaaatcgcctacgtctactcggcgggctattccgaacgggaaatggagcggctggaaagcacgcgtcagcagattcaggaataccacaaggagcttttgagcaacatcgtggattcccagttggaaactttggacgaagaggtgctcacgcgcgcgctggatctcaaagcgctggtgagcggcgaatcgcgcggcaaccttttgaatctcacgcggcaactggaatcggctatgctcacgcggcaggagtatttgcggcagaacaagcgcgaagaccttcgacttaaccaactgtacgaagaagagtccagccatttgaacgcgatcacttcctggcgcacgacggaaaccgcctcgcgcacgggcgtggtgagcttttatatggacggatatgaggaactcctcaccgtggacaacgcgccgctgctcaccgcaagcgatgtgaaaaacatcctgagcacgcaggtgaaccaggcgcagctttcccaggcgatttaccgcattgtggatcagaaccattggtatctgattctgctcgccagcagcgatgtatggaaccccatcaatgggcaggaatacagctttcagtttgaaggctatgaagacttgatttacaatggcaccatcgtgggcattcagcaatccggcggcgaagtggctgccctgctggaggttaccgacccgatcgacgcgctgatttatcgccgctcgggcaaggtggtgattggcacgaacctgtcgggcctttcggtgcccaacgcggcgctggtcgtggaggcggggcagacgggtgtgcgtctgagcgatattccgggcggcacttttgtgccggtggaggtgctttcgcgcggcgaaagcaatactttgatcaaacctgtggtagagggggccctcgccgcggggcaaagggtgcttttaaaatgagtgaattgcaaggcctgaaggaacggtttgcctggtatcaggatcggctgaacgatgcgtcgggccgctttggcggcgtgaccatttgcgccgcgacgaagacgcagtccgccgaaacggtcaacgcggcatacgacgcgggcgtgcgggtcattggcgaaaatcgcgtgcaggaacttttgcagaaattccctgcgttaaatcgcgattttagcctccattttattggacaattgcagctaaataaggtaaaatatctgatggatacggttgcaatggtgcaatcggtggacaggatcgaactggcccgcgcgatcaatgcgcgcgcgctgcgcgatgggcggcgcatggacgtgctggttgaggtgagtatcgcgggcgaggcgaacaaaggcggcgttccgctggaatcgttggacgcgcttttgggcgaagcgtacgcgatggaagggttgcgcgtgcgcggcttgatggcggtgatgccggcgtgcgatcagccagaggacattcgcggcctgttccgcaaaatgcgcgccctgttcgagcgggaacgggacagggggcacgcgctcgattgcctgtcgatgggcatgtcgcacgattgcttggttgcggcccaggagggcgcgacgatggtcaggcttggaaccgcgctctttggcgcaagacagtgatggaggcagcagggtatggcgggcaaaaacagccgtttgaatagattcatgcagatgattggcattgtcgatgtgccgcaggacgaggcggacgaccgcggcgcgtatggaagggagtcggatatggacggataccgggagcgcagccgcaatgatggatacgggcgcgacaatcgatacgattcgccgtatggctatgcggaggataacttttccgcgcggcaacagccgtcgcgctattcttcgggcgcgtaccggcaggggactacttcccgcacgcagcagcgcacggtttcgttcgatggctatgcgcagcgcggcaatgttgcgtccatgccgccgcggggcgattaccgacaggaatcgtttgccagccgtcagagcggttttgagccacagcgggcttcgggcagcacgcgcagcgaaggccgccagcgtacggtgatttatgccattcgccgtctggaagactgccaggatgtgatcatcgacctgatcgagggcaaaacgatgctgatcaacctggaggaattgcatagcgaagaccagcagcgggtggtggatacgctttcgggcgcttcgtttgccctcaatgcggtgctgcgcaaggctgccgataagatctatctcatcgcgcccagcggcgtggaaatcaacgacattggatcgatagacaggaggtattaaatggcatacctcgttattgtgcaaattgccaatggcctgagctggttttttcgcatcgtgacgtttatcatggtgctatacgcgttccttagctggtttgtgcggccggataacgcgttttaccgtctgctcgctcgcttttgccagcctattttggctccgttccggcccattgccgcgcggattatgtatcggggatttccctttgatgtgagctatatcctggcgtttttcgccattcaggtgctgcaatatctagtgatgcaggtgctttcatggattctcatgctcatttagcggcgcgcctggccgaattggcggcacgaggtgggcgctcgcgctttttggagccaggagaatcagtggcgctggcgcaaaaagctgcgcgcgaagcgggcgtggatgtggccttttggggcggttatcccggcgcggagcgcaccgtggccgcgttttattgggcggaaccgccgcaggagttttccattgcgcgcctgcgggcgcagtggaatggcaaatacgcgtctcttgggcaccgagatttgcttggcgcactgctgggtttaggcattgagcgcgagatgttgggcgatatcctgctttgcgaggatggggcgcgcgtgtttgtgctggaagagattgcgccctatttgctggccaattgggatggcgcgggccgcgcgaagctgcgcgtttgccgcgaggaaggcgatttttccccgccgaagccggaaggcgaatatttgcgcgaaacggtgaattccttgcggctggacgcgattttggctgccggctacggcttgagtcgcgaacaggcgcagcgattggtgcgccagggcctggtgaagctcaaccacgtggaatgtgcgcggacagacgcacgcgtggaagcgggcgatttgatttccgcgcgcggatatgggcgtttgcgcgtggaagaagaactgggaaaaacgcgcaaggatcgccttgccgtgcgcctgttccgctatgggcgctgaccggtgggtttgcgtagcggaaaaagaggattttgcgcaatgagcgcgaattatgtttactgtaagagatgagccgaaaggagattgcacaatggccattaccgtgagagacattcgcagcaagcagtttacctcccagcgcaatgggtacaataaagacgaggtcgacgattttctcgacgagctcgctgaccagctggaagaaatcatcaaggagaatctttccctcgccaagcagctcaaggagcgtccggtggtggagagcgagccggtagtcatcgagaagccggtggaagtggtgcggcgcgaggagccgaagaacgaagttgcgccggttacccaggccgattcggcatacgacgaacccagctatttcaagaatttggaaaccacgctgcgggaaacgttgatcaatgcccagcgcattgccgatgaaaccgtggcggaagcgcgcaaaaaatccaagcagatggtcgcctccgcggaagaacaggccaacgcaatgctggcctccgccaaggtggataccgaggccgccaagaaagaggcggatgaaatccgcaaggctgcgagcgattaccgcgcgcgctttatgcaactggtggaagaccaggtgcatatccttaagtcggacgagttgctgttcgaataatttcctgcgccttccgggcatactgagcgcgggaggcgggatatggacggtaaggaaagggcaaatgcgctggagcggcaggtggatcgcctgcttgccgcgctggaacgcatgcatttgcaggaatacgtggaatatgtttccaatcgaaagcgcctgctgctctcggcgtttgtgcaggggatggcgcggggctttggctttgccgtgggattttcgattttgggcgcggtggtcgttgtactgctgcgctatcttgttgtggagaacatcccgttgattggcagctttttggcggaggtcatttatgcggttcaagagaggctttagcgcgctgctgctggcggttgcggttgtggcgctggacagggctaccaagcactgggccatgcgggcgcttgcgcagccagtggtggccatcgaaggcgtgttgcgctggcgctattgcgaaaatacgggtgcggcgtttagcgcgctgagtggttcgggaacggttgtgctggttttgagcgcgattttgctcgcggtgctggcagcgtatttgctctttcggccccggattccctggggcgcgcaactgtgcctgtgggcggtggtcgctggcggcgcttccaacctgttcgaccggttggcgtggggctttgtggtggattttatcgagccgctgttcgtttcgttcgcggtgttcaacatagcggattgctttattgtgctgggcgtattgggcgcggcgctgaccgtactattggatcgggagggcgcgaaatgaggctggacaattgcgtggcagagcgctatggcatcacgcgttcgcgcgcgctggcgctgatcaagcagggcttggtgcgcgtcaatggtgaagcgcggcaaaaggcagggtttgaagtggaagagggcgacgtggtcgaggcggaaatccctgcgcccgcgcccacttccgtggcagcgcaggaacttcccctgcgcgtgctctatcaggacgcggatctggcggtggtgtacaagccgtccggcatggtggtgcatccggccgcgggcaacccggacggcacgctggtgaacgcgctgctctgccacctggacgggctttccggcatcggtggggaattgcgccctggcatcgtgcaccgcatcgataaggatacctccggccttttgttggtggcgaagaatgacaagagccacgtgcgcctttcgcagcagatcggcgcgcacacggtggagcgcgcctacctggccattgtgcagggcgcgatgaaggccgaagagggcgatatcgaccggcccatcgcccgccatcccagcgaccgcaagcgcatggccatcgtgcccggtgggcgggaagcctttacgcattggcgggtgctggaaccgttgcgcggcgcgacatatatcgaggcgcggctgaaaactgggcgcacgcaccaaatccgggtacatatggcctccatcggtcatccggtgctgggcgaccccgtgtatggcccaaaaaagccgccctatcccgtggaaggcggccagcttttgcacgcttacaagattggttttgttcatccctccaccggcgaatggatgtgttttaccgccgaaccggaagaacgctttctcgcctggaaacgcaaactgcgcctcgccaattgagcagagcggctcgcccaaccgaaccatttgcttcgcttgccattgcggggatcgttgtacccctctgtgagaaagcgaagtcctgcgctccacaagaggggtttacgcgttttttgcttggtcggcggcgaaggagactctaagttttttgacttcaccgacagcaagcccggtgacgcgcgaaatcatgtcatccggaaggttctcacgcatcatgctttttgcggtgtcgatggccttgcgcttctcgccaatggagataccgcgcttctcgccaatggagatgccccgtgcttcgccccgcaattcagcatcctgctgatgaatctgataaatcataaaagcatgcctccattcgttgtccattttagccttgtcgacagcttcgtcaatcgagcggatcagcggcagctcggcttgttcgaccggataactcttcgggtcgttcatatagcgcagaatctcgcgcagcgaggcgctgatctccccatgcgtccccgctgtgttgaagaacagtttataagcttcatcgcccagctccgcgcccgtttcccggcaaacgttgcggaaggaatagagataccgcccctcatcgaacgggccaaaggtgcagatgaagatcacgaagctgggacgcagttttgtgtaaaactgtccgcgctgcagctggttgatgtccatgtgcgcctgatatagtcttgcgcgtttgggcaaagcggcatggcgcgtggtctgcatttccagattgtacacggatttgccatcgtccagatagacgtccagccgcacggtacgccggttaaaagcttcgttcagcgatttctgcgcgtccaactgaagcggttcgtattttttagacgaatcgccggaatgttctgttccaaactttgacttgccggtgccgccatcgcccagttcatagtattcaatgcggctgatcttgtggccgggcagcagatattgcaggagctctgtgcagatctcgcgattgcacatcacgtaggaaaacatgaaatcgtcccggatatccacgctgtcgatgctagcggcgatgtcatccaagtgaagatcacgcgtatcatcgctgctggtgtttcttttcatatcattttcatccaattcgtccatggcggttgcctccaactcaggtgagcctgttagctcgttcagcgcttctacttttattataccacagatacagatcgatagcaattgaggatggcagaattctttcccaagacgatgctggtggtttatcgcaagaacggtcagaaggtatgatgcgatgttcgggtatttccggctttacgacaggggaagactgttggcgggagcatagattcgttttgcggttttttaaattttcccattcatgcgcaagcggtcgctggatacactagcgttgacggacgtatgccgcaggacggagggatttgcgtgaaaaacctgaggctgctggtgggcatgccagtcatctgcgggggtcgcaagctgggccgggtggtgcaggcgcaagtgtcggaggaattgactcgcatgacgggcctgttcgtcgacgcgggcatcaaaggcacgcgtttcattcccgccagcgatgtgagcgttttgggcgatgtggcggtgctggtgcggtcggaaggacggcgcggcgcgcgcgcgcagtgcggctatccgcgccgcgcactcacgccggatggcaagcacctgggcgcgatttgcggcgctggcgtgaacgaggaaagcctgaacgtggaggcgctggaattgtccatcggctggttggaggacgtcctcacgggccggcgcagggtgcgcaggttcacggtaaaccaaccgggcggcgaagtcgtcgtgatcgaaatggatggggaggaattggaatgaagggcctgattacgggttgtgtcgtgggcgccgcagcggcgctggcgtatggcatgatgaaccggcaaacgaaaaagaaaattggcaatatggtcacccaggccagcaacgcggtagcggataaggcgaacgaaatgttcggccgctaggcatatgcaacgcgcttttcgcctggaacccaaaacttggaagctgatcgctctcgccgcgcttgtcgcggcggcggcgatcggcttttggccctatctcgcgccggcgttgcgcttgctgttgggcggtggcgcgatcgcttttttgttggatccgctatgccagcgcctgtgcgttcgcctcaagcgcccgctcgccgcaggcgtggcgatcttgggcgtggctgcggcgctcatcgggctagttttgctgctcgcgccctttatggtccggcaggtgggtgcgctggccgacgctataccgagttcggtcgctgccgtgcgtgcgctcgtggagcaggtggaaggctttttccgcaataaaggcattgcgctgggttccctggcggcaaatttggattggaacgcggtttctggcctgttgagcggcgcgctaggcagcgtagtgggattttttggcaatctcgccgcgggcatttccagctttggcatgatggtggtgctggcatattttttcttggccgatagggacaatctgctcctgcgcctggaaatgctggtgccgctggcgcaccgcgcgttggccattcgaatggctggcgcggtgaagcgggaactgctgctttatctgcgcgggcaggcgctcatttcgctgctggtgggcgcgctcgcctccgtggctttgctgcttgcgggcctgccttcggcgttggtgttgggctcgttgatcggcgttttgaatttggtgccctattttgggcccattttgggcggtattcccgcggtgatcctcgcgttgggcggcggttggcggcgcgtggcctttgtgctgctagcgctcgtggccgtgcagcagatcgatggcgcgctgatcagcccgcgcgtgatgggcggcctcacgggcgtaagtccagcctccgtgctgctcgccatcgccatcggcagcagtgtgggcggaatcgccggcatgctttttgctctgccagttttgttaatccttcgaatttctctgcgagtttgggcgcaaaggcgcgaaaccgattgaaattttgctttgcatggtgtataataccgccagaggcatatttggaaaggcggtgcggtatgaacggcggtgcaggggagacgaggcagtttcgcgtgaacgatggagcggactcggcggagcagatcatcgaattggtgtatcaggcgctcaaggcaaaggggcacgatccgatttatcagatcgtgggatacatcatttccggcgatccaacctacattaccagctacaataacgcccgctctttgattaagcgcttggagcgcgatgagctgctggaagaactcgtgcggttttacgtggagaatcacgattgctagcgatggaaatgcgttcgctgggcgcgtccggtatgcaggtttcgcgcctgtgctttggtacgctcaccatggggccgatgcagcgcggtttctccccggaaaggggtgctgcgctgcttacgtatgcctatgcgcgcgggttccgctttttggatacggcggatatttacgatacttatccgcacattcgcctcgcactccaaaaatgcgcgtatcgcgtgagcacaaaggcgtattgctgggataaggccactgccagcgccgcgctggagcgagcttttttcggcctagatcgcgaatatgtggatatctttatgctgcacgagcaggaatccatccacacgctgcgcgggcatcgcgaggcgctggactatctcaatgaacaaaaggccaaggggcgcatcgggctggtgggcgtgagcacgcactacgcgggctgcgtgcgcgcggcggcggtctttggcggggtggatgtgatccatccgctgatcaatgtggaaggcattggcatccaggatggtacgcgcgcggacatggaggccgccatcgcctatgcccacagtttgggtgtgggcattttcgccatgaagcctctgggcggcgggcatttgatcgcggacaacgcgcgggccttgcgctatttgctggacgcgccgtgggcggattccatcgccgtgggcatgcagagcgaaaaggagatcgacgtgaacgcagccatggctgggggagacgagagcccgatgcgggagctttcccatcgggagcgccatcttatcgtgcaggattattgcgaaggctgtgggaaatgcgtggaattttgccgcgcggacgcgctgtccatccgggacgggcatgccgtggtggacgaggacaagtgcgtgctgtgcggctattgcgcgcgggtgtgcccgcagttcgcggtgaaggtgatttagcgatgaagcggattctggcgctggacgtgggcgataagcgcacgggcgtggcggtgagcgacgaactgggcatcacggcgcagggcgtggaaacgatacagacccgtggcctggagcgcgacgcagcgcgcgtggcgcaattggcgggggaatatggtacggagcggattttgatcggcctgccccggaagttagactacagcgagggcgcgcaggcggagcattcccgcgcctttggcgataagctggcggaaatgggcttttccgtgcgttatgaggacgagcggctgaccaccgccatggcgcagcgggcgctgctggagggggacgccagccgcaagcggcgcaagcaggtggtggataaaatcgccgccgtgctgattttacaggggtttctcgatgcgggcgggtggcccgaagaagataaggaggatacggctatggatggcgaaatggaacgggacgatattgtggaattgtacgacgaggatgacaacctggtgcgctttgagcacgtaatgaccatcgaatacgaaggggaaaactatgtgctgctcgccccgctggatgaggacgaggagggcgacgaggtgatcatcctgcgcatcgaagagcaggacggcgaggaagtgtacgctacgttggaggacgatgatttgatcaacgcggtgttttcccgctatctggagatcgtggaagaagaggacgaagatgaaaattaacgcgcatttccttgtttgcgcagggaaaacgcggtagaatatttccatacgcatggcgggtatgcccgccgcgcgggaaaacggcatacgagcgatgaagaagagagtaacctgcgtttctttccacagagagccgcgccatggctgaaagcgcggcggcaggggcgcaaggcgaagttcgcttctgagcttccgcgcccgaagtggcagtaaggcgcggcggagtgattcccgatattggaatcaaagattgatcgataaaatggttcgattggatgcaaagcgggtggtaccgcgtggctaaggcctcgccctgttatggggcggggctgttttcatggaaccgaaggagcgagggaatatgctagaaaaacttcaaagcattcgcgagcgcgcgctggagcggctgaatcaggcggcggacaccggcgctctggaacagatccgcgtggcggtgttgggcaaaaagggcgaattgacggcgctattgcgctctatgggccaattggcgccggaggagcgccccgccatgggtcagaaggtgaacgaactgcgcgcgctgattgaggaaaagctcgccgagcgcgagcgcgcgctcaaggagcgcgagaaagaagcgcgcctgcaaaaggaagccattgatgtgacgttgccggtcgagccgcgcacgtccggggccatgcacccgtgcagcatcgtgctggatcaattgctcaccatcttcaccggcatgggatttgaagtggtggaaggcccggaagtggaatacgaccattacaatttcgaactgctgaacctgcccaagaaccaccccgcgcgcgacgcgcaggacaccttttatatcgacgacaacatcgtgttgcgcacgcacacttccccggtgcaggcgcgcatcatgaccacgcgtaagccgcccatccgcatcgtctgccctggccgcacataccgcgtggacgaggcggacgccacgcattcaccggtgttccagcagatcgagggcctggtgatcgacgagggcatttccatgagcgacctcaagggcacgctggacgcattcgccagccggctgtatggcgagggcatcaccacgcgtttccgcccctcgtatttcccgttcacggaaccgtccgccgaggtcgacctcacctgcgccaattgcaagggcgcgggctgccgcgtgtgcaagggcacgggctggatcgaggtgctcggcgcgggcatggtcaacccgaaggtgctggaaatgtgcggcatcgatcccggcaaatacacgggctttgccttcggcattggcattgagcgcattaccatgctcaaatatggcgtgccgaacatgaaatatctgtgggaaaacgacgtgcgcttcttgaagcagttccggtaagggggtagcaagcgatgaaagtacccatgaaatggctgagggagtatacccatatcgcgctggacgcgcaggactacgcgcaaaagatggtgatgagcggcaccggtgtggaaggcgtggaaaagacgggcgcggatttttccaatgtggtcgtgggccgtgtggtaaagatggagcgccatccgaattctgaccacctgtggatttgccaggtggacgcgggtgaaccgctgcaaatcgtcaccggcgcgcagaacgtgcacgagggagactatgtgcccgtggccaaggaaggcgcgcacttgcccggcggggtgaagatcaagcgcggcaagctgcgcggcgtggaatcgtgcggcatgctctgctccggcccggaactcaatgtgcccgagggcctgtatccgcactgcggcaacgagggaattttgatctttgccgagccgcacacgcccggcgaggatgtgaagcccattttcggcctgggcgacgacattgtggattttgaaattctggccaaccggccggattgcctcagcgtgtggggcctggcccgcgagagcgcgagcgtgctgggcgagcgcttcaacctgccggaaatctctgtgcgcgaggatggcgagggcacgtttgacgattacgcgaaggtagaagtgcttgatacggagaattgcccgcgctatgccgcgcgcgtgatcaccgatgtgaagatcgcgccttcgcccatgtggatgcgcgaatacctttatggcgcgggcgtgcggcccatcaacaacatcgtggacatcaccaacttcatcatgttggagaccggccatcccatgcatgcctttgacctagacaaggtgcgcgagcagaccatcgtggtgcgccgcgccaaggaagacgagcacctcaccacgctggacggcaaggaacacgttttgaatggcagcatgctcgtgatcgccgataaggaaaacgctacgggtctggcaggcatcatgggcggcgaggagagcgagatcacggaaggcacgcgccgcgtgctgttcgagtgcgccgcgttcgagcgtggcaacaaccgcgtgacgtcccgcacgctgggcatccgcacggaatcctccgcgcgctttgaaaagggcgtatgcccggaaaccgccatgcaggcgctggatcgcgcgtgcatgctggtgaacctgctggattgcggacgcgtggtgccgcaggcgttcgacaactatccgcatcccgcgcccgtgcgcacgattgttgccagcgccagtcgcatggctaagctcatttccgtgcccgtaccggcggaaaagatgcaggagattttgaacggcctgcacatcgccaccgagcgcgacggcgatacgctcacctgcgtcgtgcccccgtaccggcaggatatcgagcgggaagccgatctggcggaagaagtgctgcgcctgtatggctacgagcacattccttctacgctgatgcgtggggaaaccctggccggtcatcgttcgccgcgccagctcgtattggataaggtgaagcgcacgctggtggatatgggcatgtacgaggcctatacctattccttcatcagccccaagtggattgaaaatttgggtctcaaggcgggggacgagcgcctgaacgccgtaaagatccgcaatcccctgggcgaggataccagccagatgcgtacctcgctggtgccgtccatgttgtctacgctggcgatgaacctgcaccgcggcaacgcggaggcgcgcatgttcgagaccgcgcccatcttcctgcccaggcaggcgggcgagttgcccgaggaacggctttcgctgtgcatcggtatgtacggcgagacggtggatttctttgcgctcaaacaggtggtggaagagctgctgttcgtgttcggcgtttcgctgaagatcgaaaagggcgcggatggatattaccatcccggccgcagcgcgcactatggcacgattgcgcaattgggcgaaattcaccctgatgtggcggaaaaatttgaaatcccgcgccgcgtgtacgtggcggaagtcaatctcgccgaattgggcgcgcaggaaacgccgattggcgcagtgcacgaattgccgcgcttcccggcggtgacgcgcgatatcgcgctcgtggcggaagaagccgtgccggccggggatttgctggacgccatcgtgtccgcgggcggcaagcatctggaagaggtgcgtctgttcgacctgtaccgtggcgagcggctgggcctgggcaagaagagcctggctttcgcgctctctttccgcgccagcgaccgcacgctcacggatgaggaaatcgccgccagcatggagaagatccaggctgcctgcgccgggctgggcgcgcagttgcgcaaatagacaagtgcgagcgcacgccataatttgcaacaataggtggcgcttgataaaacagaaaataaaatatgcttgcgaaaagcgcgcgcatcggttacaatagaagtaaggatgcgcgcgcttttgcgtagggagggtggcatgtgaaacttaacaacaagcgcacatttttgatcggcctggcgtttttctccatctgcgccttctggcaggcgtatgactttgtgattcctctgattctcaagcatcgcttttccctgggggacgatatcgcaggctttgtgatggcgctggacaacatcctggcgctgttcttgctgccgctgttcggcacgctgtccgaccggtgccaatcgcgcctgggcaagcgtatgccgttcatcgtggcaggcacagtggcagccagcgcgctgatgatcgccctgccgtttgccgatttggcggggcgactcggggtattcatcgtgttgctggggcttttgctcatcgccatgggtacatatcgttcgccggcggtggcgctgatgccggatttaacgcccaagcccctgcgttcccgggcgaacgccatcatcaacctgatgggggcgatcggcgggatttacgcgctattgatgatcaacctgttggtgacgggcgaaccggcggaaaatcccagctatttgcccctatttgtctccgtcgccgcgctgatgctcctttccgtcgcgctattggtgattacggtgcgcgaacgcaaaattgccgcttcactgcccccggagccggaagaagccgctcccgcgggtacgggagagaagcttccacgcgccatgttgcgcagcctggtgttgattttgctgagcgtgtttttctggttcatgggttacaacgcggtcacttccgcgttttccaagtattacacgcaggtgtggggcgcggtgagcggcgcggccaactgcatgatgatcgccacgggcggcgcagtggtgatgtatgtgccggtgggcatcgtttcttccagatttggccgcaagaaggtcattctggcgggcgtggcgctcctggccatttgctttgccgtgggcgcgctggtgaaggagttccacagcgcagtgtacattctgttcgtgttggtgggcgcggcctgggcgatgatcaatgtgaattcgtttcccatggtggtggaaatcagcaaagcgggcgacgtgggaaagtatacgggctattactatacgttttccatggcggctcaggtgctcacgcccatcctttccggccagttgttggaaaaggtggggtattacacgttgtttccctacgcggcggcgatggttgcgctttcctttgtgacgatgctgttcgtgcgccatggggatagccgtccgcaggcgcccgcctcgcggctggaagcgtttgatgtggaggcgtgatttgtatgccgttgattgtggttgtggttgtgatcgtgctggtttacgcctttttggtgggatcgcgccgcggcgggcggatgggccgctttcaggattgcgattacgcgcaccgcggcatgtacgataacttgcgcgatatgccggaaaattcgctgctcgcgtttgagcgtgcctgcacccataaattgggcattgaactggacgtgcggctttccaaggatggcgtgctggtggtgtttcacgacgatacgctggaacgcgcttgcggcgatggccgcaatgtggaggatttgacgctgtgcgaattgcagtctctttcgctctttggcagcgacgcgcgcattcccacctttgccgaggcactggaacgcatcgatggccgcgttccgttgattgtggaaattaagcacgaagaacgctatcgggaatcggtgcaaaagaccgtggaggcgctccgatggtataaaggtttgtattgcatagaatccttcaatccctttgccttgcgggaattgcgccgcatcgcgccggagattccgcgcggtcagttggcggcgggcttggcggatagcgcgcgggatgtagggccgcttataggctttgcgctggccaacttgctcaccaactgcctgtccaggcctgatttcgtggcgtatgacgtgaaccatatgggcgcttggcaaatctgggtgcaacgccgcttcttccgcacgcccattgccctgtggacgattcgcacggaagagcaggccatggaaacgacggggaaaggatacatccgaatttgtgagtggtttgaaaacgatgaatgtgcataaagggcaccggagccgcctgcgcgagaaagtgaaagcgggcggcttggctacttttagccagcacgaggtgctggaactgcttttgacgttcgccatcccccggcgggatgtgaacccgctggcgcatgcgctgatccgcgagtttggttccctccacaacgtgctgcacgcgcccatcgaagcgttgctggcagtgccgggcgttggtaagaaaacggcggattttttggccgcattttgcaatgtcgcccgcgcgctggaggacgaatgcgtggcggagcgcgtccgcttgcaaaatccgctggaaagtaaggcgtttctgcgcggcttttttcagcatcatgtggcgaatgtcttttggcaattcaacttggatttgaatggccgtctcatttgtagcgaggccatttgtccggtggaagagccgattttgcaacacacgcgggaaatcagccagtccattttggaatgcggcgcaaaaacggtgatatttgcttgtcaggtggatcggttttcgcgcgttttacgcgagcaaatggccgtggcaatgccgtatctatatgaatatttgcaaaaaatcgacgtgcttttgggcgagagttatgcttttgtgggaaacgacgcgtatagcggtttagctttcggcagggagccggcgcggtggcagccgcgcggtgcgcagtatgcggcggtatttcacgaacacccccggcggggaaagcagccgtgaaatatagatgggagactaactattaaaaatcaagggggaaagagcgatgctcaagaagtttttc

SEQ ID NO: 3101 - DNA, 32759 bp, Unknown
  16S sequences of unknown bacteria
aacaagtcgatatccgcgcccgattttttcaaaagggaagggatcagtccgccttcctgatccgcgagcgcgtataaaaggtgctcgggcatgatctgcatattttggttttccagcgcgatattctgtgcggcagtcaccgcctccatcgcttttttcgtcaatttttgtgcgttcataaaaattcacctccttcagatgatctgaacgccgctgttcagatattgcaaatagcgcttttccaacgcctcgatcgagccgtattcgccgccgagaaatcctttgagcatttcgtcaaaggtggcgatatagtggccgatcgcgtttccgatctgctcttcggtgtaatccgaatcgttgggcacggcgaaactgcgcagaaactttccgttttccaggctgtattcgatcgcgtcctttgtaaaaaactgtttgatgtaaatcgtttcgagttgcatccacatcttaaaaaatctcgtcaactccaccaatagttcgggggattgcgtacggaaaatgatcttcaactgcccgatggtttccttgggcgtgcggtacatttccacttcgtagcgtatggtggggcggtagtgatatttcaaagaacttttgatcgacatcgtcagatcgttgggctgcgaatacagcagaaagttgccgcggtttcccatcatgttgccgatgatctcgaaaatgttctgtatatgtttttcgggggtggtgagggaaacgtattccgccagaatctgatttaccagattggaacggtttgtattgttctgttccgccagtttgtcgatttcgcgaatgacctcctcggcgagcatcaggctgtacatattttttttcatggtttcctcccttgcttgatttgcctccattatagcgcgttgcaagaatttgtcaagcattttatataaaataatttacaaatttattcggcgcgacgtacgattgaaatttgaaaaagaatatggtataatttcggaaagaggaaacgatatgaacgaaacgggaattgccgcgatcggcatcgctttgatatttttgatgactactgcgggttccgcgctggtattctttttcaaaaaagacatttcggccaaggtcaacgccgcatttttggggttcgcctcgggcgtgatggtcgcggcgtcggtgttcgggctgttggtgcccgccatggagcaggcggaaaatttcggaaaattcaactgggtgcctgcggccgtgggatttctggcgggcggcgcgtttctgatcgtattggataagatcgttccgcacgcgcacgagggcggcgaacacgagcacggcgtgcatgcggcgctcaaaaaacctacgaaaatgtttttggcggtcacgatccacaatatccccgaggggcttgccgtcggattcgctttcggcgcggcgcttgcgggcggggaaatgtcctccgtctatgcggcgctgggattggcgatcgggatcgggatccagaattttcccgagggcgctgcggtcagcctgcccatgaaaaacgccatgggcagccgctctaaagcgttttggtacggcacggcgagcggcgccgtggaaccgatattcgcgctcatcggcttgtttttggcggcgtttttaagttccgccatgccttggctcctgtcgtttgcggcgggcgcgatgatctttgtcgtggcggaagatctgatccccgacgcgaaactggaaaaaagcccgtatataggcggcataggcgtcatgctcggattcactttgatgatgatcttggacgtggcgctcggctgaaaggaggttttatggaagaagagaaagatatcaagcagttttttcccgaagcggaaacgattattttgctgcgcgagggcacggaaaaaatactcggtgaaacggcgcgcaaaaaagtgctgtccgcgttggagagcatgagcgagaacgccgtacagatgcccgcgttcggcgtcagtatcgacgaactcacccgcaaggatatgcaaaagggcgtatggctgcgattatcgtacgccgaaaatcagtcgtgtttcggcatggatttcagcgaactcgccttcgaggtcgttcccgaatacatgggattcaatctctgccgtctgtatgaaggcgcgtacacggggcggtgtttttacctcgatctgcgcggcggcgatatgcgcgcgctgtacgaagtattgacaagtttataaaataaaaacggcggacgtcgcgtccgccgtttttttatagttcgatgttcgaataggcgtctaatatggtttccagttttttgtcctcggcggcgttttctacgaatttcttgtagcagtcgcacacgtttccgtttttgtcgaatcccgtatccctgcattttttacagcggtattgcggcgtcagtttgtcttcggaaagccgcatggaaacgagcagggcagcgcgctgctttttcagttgcgtcagattctgcgcaagcgccgcgccgtcgccgccgagtgcttcggctttggcaagttggatctccgcggagcgcagttcttcctcgttcttgcaaaaatcaggattgtgccttgcaacggaaagatagtacgcggctttatcctgcgcgcgctcgcgcagattgaaatagtaggattgcacttttttcttgaattcggcgctcttgtccgcgttttccgccgtacggaaggcggtgcgggcgtccttttccagagcgtcgggcgagaaaatattctgcgatttccaggaagacagcaccgaagttatgtagggcacggggctggattttcccgcggcgagttgtgccgcttttaagatcatctcgtcggaaaaattccagtttcgccagtttttcaggcattcgcggtcccagttgttcacgcggcgggtgagcccgcaggcggcgagcacctccgaaagaaaatcctgttccgtcgcctcgccctgcatatacgtgacgatgctttccgcggagatcacgccgattgccgccaattttttgatgagttcgtccatcttttcgaaagattttttctcccttttgaaacagtatttcgcaaggcttatgagcgacgcgtcgtcataaccgaacgacagccagacgctgacgaaattgtcgacgtaagtatctatgatctggcagtacacgcccagttctttggcgatggaaagggtgagatttttgatctgcgccttgcgcgaaagatattctttgatctcggcgcggtcgaattttttgttcgcgtacagttcctttaagatctcgtccagtttgttcatgccgcattttttaaagagcgacgcgacgaattccaccgtatccgtttcgaagaggagttcgcctgtccagcgctttaaaagattgtaatcttccggttctggctttttcgtcgaacccatcgcgcgcaggatgcgtccgatatcgccgcttctcaaaacgtaatcggaaagtttcttttcgatcttttccacggtggtcacgccttcgtaggcgaaattgcgcgccacctgcaagatataattctgcgcgatggtttcgcctttcagatcgatacagtatttgacgatgaggatcatcgcctcgggcttgatggagtactgttccatgacggcgaaatacttttcgaattcgctcgtggagatcatcttttgcggcatgagcgactgcaccgccttgttgaaatcggaatatttttccgtcctgatctttttcggtttacccttgctgtaatcggaagggaagtatttcacgcagaacggctcgatcgaaacgatctgcaataaatcgaaatcttcccagaaacggaacagatccattatttgtttctcgctcatattcagatcccgcgccgcctcggtgagagtaaattcttcctgtacgttctggcacagatacagcccgtacaggtatacttttaccgcgtcgccgtcggcgagcgccatatatttggtgataaactgattttcgacgttggtgtaagaggatgccgaaaattctttggaatacgaacaaaaacccatgtataaaactccgatgtaacacttgatttatttttagaattgcgctatactattatataagcaattttccgtaaaatcaaggttatttacaacatttttttgagtttgtcattgaaagaggtactatgaaggttttgcacacgtccgactggcatatcggcaagcggcttttgggccgcgagcgcatcggcgaacagcgggaagttctgcgtgaaatcgcggctctttgcgagcgcgagagggtggaactcgtactggtcgcgggggacgtgttcgatacttatcttccttcttccgaggcggaagatctcttttatacctcggtcagggaacttgcgggcaaggaccgcgcggtggtcatcatcagcggcaatcacgacgatcatatccgcttagccgcggcgacttcgctttccgaagaattcggcatctacatttacggcaacgtttcgcacgtgcccgctctttccgccgtgcgcaagacgcatcccgtccgcgcgggcgcgcattttatggaaatggaaaacgaggcgggcgaacgcgtgtttctcaatttactgccgtatcccacggaagcgcgcctaaaagaggataaaaaccccgacgaaagtttttgcgacaagatgcgccgctggatcgaggcgggcgaggcggaaaatacggaaaaacttccctccgtctttgtgtcgcatctcttcgtggcgggcggaaaggtgagcgagggcgagcgggaaatagacctcggaggcgcgcgcgccgtgcctttggaacttttgcccgcgagcgattacgtcgcgctcgggcatcttcaccgcaaacagcacctcggcggccgcaatgtattttacagcggttccattctgcaatacgccttcgacgaggcgaacgtagatagaaaggtgatgctgttcgatctcggaaaagagggcgtctataacttaaaggaagtgaaactgacctcgggcaaaacgctcgtgcggctcgccgcgaacagcgtaggcgaggcggaagaacttttaaaacgctacgaaaattgctttatcgaactgacgctctttttaaaggagccgctcattccttcgcagatcaaagaattgaaggaagcgaacgaggggctcatctccatcatccccgagatcaaggcggactgcgcgctcggcgagtttgccagccgcaaaaatctttccgcatccgaactgtttacggaatactataagagcatgtactccgacgagccgcccaaagaccttttggaactgtttatggagatatcggaggcgcgggatgaaacctaaatatctgcaattttgcggcatcaacagtttttccgagcctgcggaaatcgacttcgaaaaacttttgcgcggcggcatattcggcatattcggcgatacgggcagcggcaagacgaccattctcgacagcatcgtgttcgcgctctacggcaagatagagcgggcgcgcggcggcgtcggttcggatatcatcaactacggttgcgaccgcgcttacgtgaatttcgagtttgaaacggaaagcgatgaagggcggaaagtttatcgcatcgagcgcgagatcaggcgcaaaaattcactgcaaaaagccgagttgatactcattgacggcgacagacgcacgagcatcggcgacggaaaggtttccgccgtgaacgcgctcgtgcaggagatcgtagggctttcctttgatgatttcaaaaagtgcatcgcattgccgcagggcgaattcgcgcagttcgtcaaagcggaaaagagcgagcggctcaaactgatcgcgcggctgttcggactggaagaatacggtgaaaaactcaacgcgcgcgtgcgtgagaaatacggattttacctcgggcagacgcagttctgccaaggaaaactttcgggcatggaggacgtttccaaggaagcggagaactctttaaagtcggcgctcaatgagagcctttctttgcagaaagcggcggaagaaaatttttcgcgcgcgcaggaacgctataatctgctgcgctccgcgtacgagaaaggcgtgcgtgcggcgcaagtggaaaagcgtcttgcggaattatccgcgagagcggaagaaatttccgaaaagcaacaagcgatcgcccgttacggcggcgcggcggcggcaaaaaaatacggggaagaaattcagtcgctccgcgataaaatactgcgcgaacgggaaaagagcaaaatgttcgaagagcgcgggaaaagcgccgcgcagaaacttgcagatcttgaaaaacgcgccgaaacggaaaatttcgacgctaagatcaacgaatgcggcgcaagtcttgcgcgcgcggaatatattaagcaggacagcgaactgttgaagagcaaacagaccgaacgggacgctctcaaagccgaatataaaaaattcgcaatgcaggcggagagcgcggaacgcgagttatccgaccttaccgaagaaaaacgatctcttgccgccgaacggcaaaaagcggcggcgctcggcgatcccgaaacgctgctgcaaaaaaatttcgggggcgcgcttttgcgcggggaatattcgaagtcgttcgaatatttcggcggcaggctggaaaaactgcgcgccgattatcccgccgacggcaaattgtattttgccgtggaaagggaactgacggaaaagcaagcgcattatcggtcgctattagagcagacggtggaagggcgctcgcccgacgaaatttttaaaagttttcagaacttacgcgaaacgcgggacgcattgacgaaacgggagcacaggctcgaactcgccgaacaggaagcgcggcggcgcaaagaggaagcgggatcgaaacttgcggaaatcaccgaaaagggcgcgcgcgcgaaagaggagatcgattcgctgcaaacgaaaataaacgaagttttgggcggacattccgattataacgctttcacggcgcatctccgcgcgtcggtcagttcgtacgaaaaggcgaaacaagagatcgccggggctttggaaaaagcccgcgccgcgcaaaacgaagccgcggcggcgcaaaaggagtgcgaggcgtccgtaaaattgtttacggaaaatctcgcggcggcggaaaaaaatcttgcggaagaactggaaaaaaacggatttcaagaccttacagaggcgcagggtctgcttgcgcgctatcccgatatccgcaaaacgcaggaagaaacggaaaacttccaacgcgaaaaactttctctggaagggcagcggtcggcgtatgccgacgcggcgtcggtgagcgaagaagaacttgcctcggctaaagaggaatttgaaaatttttccgcggcgaggcagaaacttttttccgacataggagttttcgaaagcaggctgaaagaggtgagcggcaaactcaccgaaaaactgctcatcgaaaaacaactgaaacattttcaggggcggctcgatcttttagaaaaacttcgctcgctcataaagggcaacaattttatggaattcatcgcctccgaatatctttccgatatctcggcgtcggcgagcgagacgctgttgaaactgacgggcgggcgctattttatccgctataagcaaggttttttcgtgggcgacaattataacggaggcgaactgcgcgcagtatttaccctttcgggcggcgaaacctttttggtttctctctcgctcgcgctctccctctcggcggcgatctacgcgaaatctctgcgtcccatcgaatttttctttttggacgaagggttcggaacgctggacgaaaaactcgtggacaccgtcatggacagtttggaaaaactgaaaaacacgcacttttccatcggactgatttcccacgtagaggagttgaaacaccgtatcgacaataaaattatcgttgtcggcgcggcggagggcggaagttcgaaaatacagatcaattattaaatcgggagtttgcatttggctaacaaaattttaacaccgtcaactttatggaacgatttcgacgatacgctcggactttgcgcggaagaagaggcgatctcttccgaaaacggcatgcgtttgaaccgcgtccgcttttcggggcgggaaacgggcaaggggagagtgcgtattttcgcgaatttcgcgcttcctgcggaagggacgaaattccccgcgctgctcattctgcccgacgcggataagaccgtgtgccccgcgctcatgcagcgctttaccgcgcgcgggtttgcggtgctcatgcccgattaccgcggtaaatttcccgattgcgaagaatacaccgaatatcccgagaacgtgccttacgcgaatttcgcggaggcgggcagacacatcgcctacgccgacgaaacggcaaaggaaacttcctggtacgaatgggtggctgtggcgcgttactgtatgcgctatctcaaatcgcgcgaagagatcgggcgcgtgggcgtgctcggcatcaagcgcggcggcgagatcgcctggcagttgatggcgacttcttccgatctttcctgcggcgtgagcgtatgcgcgggcggctggatgacttacaagggcaaatacaaattcggcgagagttcggaagtcaaactggacgacgagcgttaccgttttctggcggcggtcgattcgcaggcatatgcgccctatgtgcgctgtcccgttctcatgctcaattccaccaacgatcacaatttcgacgccgaccgcgccttcgatacctatgcgcggatcaatcccgaaatggaaaaaacttttcatttcgcttcccgctacgacgggcatatcggcaataccagccttgccaatctcgatctgttcaccgacaaatttctgaaagaccgcgccgtattcatgcccgcgcccgtggatatcgtcatcgaagaggacgcggacggcgaactcgtcgcgcggctcacgatggacaccaacggcgaatttaccgaatgcaaggtatttatggcggaggacaatctcgattccgcaacgcgcaactgggcttcgtgcgaaatgaaaagggaaaacgacgacgaagccgtgttccgcctgaatgcctacgaaaacgccaagatcgtgtttgcgttcgccaaggcgaaatacagttgcgggttttacgtttcttccaaaatcgcggtcaaacgcgtggaaaaaaagtacaaaaatctacagccttccggtcggattttatacagcagtttgaacgggacggacagtttcactttcgacaaagcggataaatattttctcgccgattgcattgcggacgacgagaaacccatcgtaaaactgtacgaaggcgcgcacgggatcaaaggcgtgtgttcgccgctcggtctgaaaacttttaagatcagcgattccatgtaccgccctgcggacaacgcttttttgaaattcgatctgtacgcgcccgaaccgtgcatcgtggagatcgccgtcaacgtcgtaaaggacggcgtttcggaagcatacgtatgcaacctgaaaacgggcggcggagaggcgtggtataatcatattctctacgccagggatttcaagaacagcgtcaataaatctttggcgcaactgaacgaggggatctcgctcacgtttaacagtgcggaaacgttcgccctcaataacttgctctgggtttagaaaatttcacacagttttcgtaattatggtgtaaaatatgatatactcgatcggagataaggtcataactaaaaagaaacacccctgcggttcggacgtctggacggtcatccgcgtgggcgccgacgtcaagatcaagtgcgacaagtgcggccgcgtggtcatgctgggcgtggaagaattcaaaaaggcgattaaacagccgaggcgggattgatggaagaaaacgaaaattacggcgagttgatacaaagaagaagagacccgaacggcgaaatgcgttcgaccgcgcggtttttgctcgtactgctcgcgatcatgttttgcgttacgattttattcacgcaaattttcaacggggtggtcgtcatcggggattccatgaaaaatactctgtacgacggcgattacctgtatatgaacgtaagttatacgcggctcgagcgcggagatatcatagtgatagacacgcacgaaaagacggctgcgggtatcgaaaaatatctgatcaagcgcttgatcgggcttcccggcgacagtctgtacgccgaggacggcaaattataccgtaaagaagcggggaaagaggactttacccttttaacagaaaattatcttcccgaggaatgggacaggaacaacgagatcgcctcgaaggcgcatccgttgatacttcaggaaaacgaaatcttttttatgggcgacaaccgcaacatcagcgaggacagccgcggaaaataccgcaacctgacgagcgaggacgtcgtaggcatcgtcgccccgtggtcaattgcctgcaaaggctttttgaccgcgcttttcaatatattttaagatttatggagagttacaaatggaaggaaaaatcatcatcacgtcggacagcacttgcgatttgagccctgcgctcttagaggaaaatcatatctcgctcgcgcggctcagcgtcattctgggcgatactacctatcgcgacggcgaaggtatcgagccgcagacgattttcgatttcgtggaaaaaacgggcgatctgccgaaaacggccgcgcccagcctggaagattatctgcactttttcagatcgttcacagataagggaaatacggttatacactttaatatttcctccaaagcgtcgggttcgcacgggttcgccgtggcggcgcaaaaggagatcggagaggacaaggtgtacgttgtcgattcgtacgcgctttccacggggcaggggcttctggtcatgaaggcttgcgaccttgttaaagagggaaagtccgcaaaggagatctatgacgccgtgatgagtcttcgcgacaaagtaaatacttcctttattcccgatacgcttttgtatcttttcaagggcggacgctgttcgcgcctctcctttttcggggcgaaagtgctcaatatccatccctatatcgacatgaaggacggagaactttaccctaaaaagaaatatatcggcaatatgtcgagatgtttgaaaaattacgtcaaagatttggtcgcggagtatccctcttacgacgatacccgatgttttattacgcacagcagcgcggagcccgaactcgtggaaagcgtgcgcaagatggtcgaagaaaatttccgtttcaaagagatcatcgaaacggtcgcggggagcatcattaccagccattgcggaaaaaacaccataggcgtgttgtttattacgaaataagaaaaacggagcgttttacatgacagttattttcaacgacagcgatctactttcggcatattcgcaaaagcgcaaaatcttttggttttatatgctcgtcctcgcggtatttgcggcgctttgcatcacctgcctcgtcgtattcatgaatatgccgtacaaagcccccgcgcaggcgatccctaaatggatcgtgtacgtcgcgtcggtgctgttcgtcattttctcgttcccttacctggggatcaaatatttgcgtatccgcaaatattacaaactgatcgcgtacttatccgtcgggctcaaacaggtcaacgagagcaaatttctgcgctacgaggattacgaaaccaaagacggcgtcgacctgtacatcctcattttctccgaatggaatgcgaaaaaatccgaatacatggaccgcaagatcatgttcgacaaggaaaaaccgcttcccgaatttcagggaggggatatcgtacgctatctttcgcagggaaatctgatggttgcctacgaggtgatcggccacgacgattcctttgtggacgagaagggaaaagaagacaaacgaaacaatttacaggagatataatatgcgtgcagtagttacggttacgggaaaagacaaaaaaggcattatcgcaaaagtgagcgcgtttctcgcggagcgcggcgtcaatatcgaagatatcagtcagacgctcctgcaggaatactttgcgatgatcatgctcgtggatatcagccagagcaaactggaactttccgcgctttccaaagattgcgagaaactgggcgacgagatcggtatgtctatccgtttgcagcatgaggcgatcttcaacgccatgcacaatatttaacgggaagcggagtaagatatgtttaacaagaacgacgtattggaaactatacacatgatcgagcgggagcatctggatatccgcacgatcactatggggatatcgcttctctcctgcatccgtgcgacggcgcaggaaaccgcggcagccgtttacgataccgtctgccaaaaggcgaaaaacatcgtaagggtcgcctccgatctttcgggggaatacggcatacccatcgtcaacaagcgcgtatcggtcacgcccgcaagtcttatctcggcgccctttcccgaacaggcatatttgataggcgaagcgctcgacagggcggcgaaggaactcggcatagactttttgggcggttattcggcgctcgtacataaaggtaccgccgattacgaaaagatctttctggaaagcattcccgaagttttaaaaaataccgaaaggctctgttcgtcggtcaatatcggttcttccaaatcgggtatcaatatggacgcggtcaaactgatgggcgagatcgtgaaaaggactgcggaactcaccgccgacaaggacggtctcgggtgcgcgaaactggtcgtgtttgccaacgcggtggaggataatccgttcatggcaggcgcgttccacggcgtgggagagagcgacaccgtcataaacgtcggcgtttcgggcccgggtgtcgtcaaacacgcgttggaaaacattcccgacgccaacctcaacgacgcggcggagatgatcaagcgtacggcgttcaagatcacccgcgcgggccagttggtcgctaaagaggcggcaaagcgtctcaacgcggagttcggtatcgtcgatctttcgctcgcgcctacgcccgtcatgggcgacagcgtcgcgcacattctcgaagaactggggctggaatgcgtgggaggacacggcacgacggcggcgctcgccatgctcaacgacgcggtgaaaaagggcggcgtgatggcaagttcgcacgtgggcgggttgtcgggcgcgttcattcccgtcagcgaagatatcggcatgatacacgcggcggagaaggggcttctgaacatcgacaaactcgaagcgatgaccgcggtgtgtagcgtggggctggacatgatcgccattcccggcaagacgcccgccacgaccatcagcgccatcatcgcggacgaagcggcgatcggcatgatcaacaataagacgaccgctgtgcgcgtcattcccgttccgggaaaggacgtaggcgacagcgtggaattcggagggcttttgggccgcgcgcccgtcatgcccgtcaatacgacggacagttctcgtttcattctgcgcggcggaaggattcccgcgcccattcacagcaataaaaattagtaaggagataatatggaaagaagttcggtcgaaaacaaatacaaatggaaaatagaagatattttcgcctctgacgaggaatgggaaaattacttcaaagagacggaaaaatatctcgattttaaacattatgagggaacgctgacaagcgcggaaaacgtggcgaaaatgttccgcgcgcaggaagaggcgtccatacggatcgagcgcctgcacctgtacgcccatatgcgccacgacgaagattcccgcgcgtcggaatacacgtccatgcagtcgcgctccatgtcgctgtacgtgcagttttcttcggcgatctcctttgtcgatcccgaacttacggcgcttcccgcagaaattttacaatcgtttgcgaccgataaacgcctttccgattacgactattatttccgtcaactcatccgcggcaaagagcatattctctccgcgaacgaagaaaagatccttgccatgggcggcgaagtgtattctcagtttcacgaaattttcggcatgatcgacaacgccgatatcaagttgggctgcgtgaccgatgccgacggcaatgaaattccgctcacgcacggcatgtacggcgtgattttgcacggcgaggacagggaactcaggaaaaaggcgtttgaagcatattacgacgcttatatctccctgaaaaataccattgccgcgacgtatttcggtaacgtcaaaaaggacgtattcttgagccgcgcgcgcaactattcgtcgtgcctcgaaagggcgctcgacggcgaggacgtgaacgtcgtcgtctataaaaaccttctcgattccgtggacgcgagcctgccttccatgcaccgctatatccgcgaccgcaagaagatcatgaaactcgacgaacagcacatgtacgacatttacgcacccctcgtttccgatgcggaaatgaaactttcgtatgaagaggcgtgcgatctggtcgtccgagggcttgcgcctctcggcaaagattaccaggcgctccttcaaaagggatttagcgaaggctgggtcgacgtgatggaaacaacgggcaagcgcagcggtgcgtacagcacgggtattttcggactgcacccttacgtgcttttaaattatcagccgaccacgcacgacgttttcaccatcgcgcacgagatggggcattcgctgcatacctatttctccaatcagaatcagccctacgcgaaagcggattaccgaattttcgtggcggaagtcgcaagcacggtcaacgaagttttgcttttgaaatacgtgctttccacgacggaagacgtgaatctcaaaaaatatttgctcgcctattatctggataccatccgcacgacgctgcaccgtcagacaatgtttgcggaattcgaatacgtcgcgcacgatatggtggaaaaaggcgaagcgctcacgagcgacaatctctccgccgcgtatctcaaactcaacgaaaaatattacggcgacgggatcgtgcacgactggcagatcgcccacgaatggtcgcgtatcccgcatttctatacttctttctacgtctataaatactcgacgggcatcatcagcgcgatttccatcgcctcgcgcattctcaaagaaggggaaagcgccgtgcgcgattacaaggcgtttctctcgtcgggcggcagcgacagtcccgtggaacttttaaagatcgcgggcgtcgatctaaccgagcgcaaggcgttcgacaccgccatgcgcgaattcgacgacacgctgaaagaattcgaaacattgaacggaatcgaaaactgatttagtttacgaagggtaaagatggtcaaggcacattatcaaaatgatctgaacgaatacaagcgtttcggtatttttcatacgctgcgcgcccgttggtggtatatcgccatgctgtcagggctgtttttggtgtgcggagcgggacttcttgcgctcggtattttgcgcggcgatgcgggcatcgtcagttgcgcggcgatctgtttcgtcgtggcgtgcggatttccctttttaaattgttatttgcaggtcagccgcatcaagcagagcgtggcgcgcaaccgcaatttcaatgaaaccgaacagcatttcaccttttcggaagagggactctctctgcagatccgcatcggaaaccgcgcgagcgattacgaggttccctatgcgcagattttgaaagcgtatgaaacaaatacgaatttttacttgtatatcggcagggcgcaggctctgatcatcaacaaaaaagacgtggacgaggggagcgtggacgagttgtgcgcgctgctccgcaaagggctgaaaaagcggttccgcgaaaagaagaaactgcggaaatcgtaagtttcttcggagaaatactatggcaaaagaaaacgaaaacaacgaaatcaataaaacgagcgtaatgccgaacaatctcgaagcggaacaggcgctgctgggctgtctgctcatcgatatcgacacgcagacggatattctcgataaactcaccgaagaggatttttatcaggaatcgcacaaactgatcatcggcgcgatgaaacgcgtgttcaacgaacgcaagcccgtcgatctcgtaacgctgtccgacgaactggaaaattcgcaatcgctggacaaggcgggcgggctcacctatatcacggatcttgcgaaactgaccccttcggctgcgaattacaaatattatctggacatcgtcaagcgcgacagcgtgaacagaaaactgatccgcgcgtcaaaagacatcatcgaacgcgcaatgagcggcgcggaagcggcggaaagcgtatcgtatgcggaaagcctcgtctttgacgtttccaaaaagatggatacttccacgctcgtggatatgcgcgaagacgacagttacgaccgcgtactgagcaaattcgagaccataactacggataagaatgcgcttcgcggcatatatacgggctttacaaagttagataaaatgacgaacgggctgcaaaaatccgactttatcgttctggcagcccgccccggcgtcggtaaaacgacgattggcatgaatatcgtcgagcacgccgcgctcgtggaaaataaggtctgcgccgttttttcgctggaaatgccgcgtatccaacttgcccagaggctcatgtgctcgtatgcgcgcgtcagcatgtccaaagcgctttcgggcgaactttcgcagggcgactggaaaaatctttggaaagcgagcgccgctttgaaaaaagcaaagatttacatagacgattcatcgaaaatttctcccgccgagatcctttccaaatgccgcagattgaagacgcgcaaggacgggctggatatgatcatgatcgactatattcagttgatggaaatgggcggcaggctcattgaaaacagacagcaggaaatcgcgaatattacgcgaaatctgaaaatcatggcaaaagaactggacgtgcccgttctggcgctctcgcagctcagacgtatttcttcaaaggaagaaccgcaactttccgaccttagagaatcgggcgcgatcgagcaggatgcggacatggtcatgtttattcaccgtcccgacgtggctgcgacggaagaggagatcaagagcggaaagatcatcaaagacgccgccgatctcatcattgccaaacatcgtaacggcgagttgggacgcgtcaaactgcgtttccgcggcgaccaggtccgttacgtcaacccgcctcccggatttctgcccgacgaaccgggtgaggtcggacgcgacgatgtgcccgaaacgaacgattccgaaggtttcgtcgatccggacgacgtgcctttcgattatatggcggaatacgccgtcgccgatgcaggttccgaaaacggaacggacgacgacatgccgccgtttgacgatttcccgcccgacgaggagtagacgatgcagacgctgctgaaaaaaatcacgccgcagtctctgaaagaggcgaaagagattttactttccggcggggccgtcgcttttcccaccgaaacggtgtacggtttgggcgcggatgcgcgctcggacgacgcagtggaacagattttccgaatcaagggcaggccgtcggacaatccgctcatcgtacacgtgcacagcgattacgatctgagcgtactcgtcaaaaacgtaaagccttatgtgcaggcgctgcgcgaagcctttttgccggggcctttgactctcgtgtacgaaagcagaggcacggtcagtcccaaagtttcctgcgggctggaaacgctcgctgtccgcgtgccttcgcacgcgggggcacaggaactgctgcgatacgtggatatgccgatcgcggcgccttccgccaatatttccaagcacgtaagtcccgtgactgcggagcatgtgtatgccgatctcgcgggcaaagtaccgctcattctggacggagggcagtgcagcggcggcatcgagagcaccgtttgcgacgtgacgggcgatatacccgtcgttctgcgcagcgggcttatctcccaagagatgatcgaaagcgtggtggggtgctgcgaaacgtacactctccgcgcgggcgaagccgcacgttcgcccggcatgaaatataaacattattccccgcgatgccgcacgaaattatttccgagcgaggcgctcgccgatgcggaaaattgttttcgggaaatcgtcgaaagcggcgaaacatgttatatcctctgcgaaaatgccgtctgcgaacggtttccgtccgatcgcgttttggatttaggcaaaaatgaatttgaaatggcagcaaatctctacgatcttctgcgccgcggcgagcgcgaggcggacgtgatcgttgcgatcgaacccgcaaagaaagacggcgtgatggcgggtgttttgaaccgcctgcgcaaagcgtgcgcggaataggcagcctatgaaaagaagaaaagtattatttatatgtacgggaaatacttgccgcagtcccatggcggaatcgatcctgcgcgcagagataaaaagacggaaaataaaattcgtggattccgcatctgcaggtatttttgcggagaacagtctggagatccatccgaacagcgccgcctgccttacctgtcacggcattgatttttccaaattccatccgcgccaactcaatcacaaaatgatcgaaaacgcgtatgccgtcatctgcatgacggacgcacaaaaagaacttttaaacggtttttccaacgtatattccattcgggacgtcgcgggattcgatattccggacccgttcgggcggggcgcggaggaataccaaaagacttacgaacttttactcgtagcggtcgataaaatcatcgaaaaatttttcacggaggcttgatatgaaaatagcgatagcgtgcgaccacggcggtctggacttaaagaggacggcagtcgattatctgcatacgcacggatatgaagtcgtcgatttcggtacgaacgaggcgtgttcctgcgattatcccgatttcgcgcttcccgcggcggaagccgttgcaaacggaacgtgcgatcgcggcgtagtgatctgcggtacgggcatcggcgtttcgattgcggcgaataaggtcaagggaatacgctgtgcgcactgccacgatacctattccgcaaaatatacgagactgcacaacgacgcgaatatgctcgcgttcggccagcgcgtgatcggcgaagggttgatgctggaaattctggaaacctttttgaccaccggtttcgaaggcggccgccatcagaaacgtatcgataagatcacggcgatcgaaaataaatatttcaaatagaaattcaaatttatacaaagggagaattgaaaatatgtccaaggtttacttaatggagcacccgctcgtgcggcataaagtcacgatgctgcgcgataaaaacacgagcacgaaagatttcagggaactggcggaggaaatttctcttttgatggcgtatgaggtcacgagggaccttccgttggaagacgtggaagtggaaacgccgatctgtaaaacgacggcaaaagtagtatcagggcgcagtctcggcatcattcccattctccgcgcggggttgggtatggtgaacggcatgctgaaactcgtgccgaacgcgaaagtcgggcatatcgggctgtaccgcgatccgcagactttaaaacccgtggaatattattgcaaactccccgcagatgcgaccgagcggacattgatcgtcgtcgatcctatgctcgcgacgggcggcagcgctgccgcagccatcggttttttgaaggacaggggctgtaaaaatattaaattctgctgtctgatcgcggcgccgcaggggctgaacgctttacaggcggcgcatcccgacgtggatatcttcgtggcggcgatggatgaaaaactcaacgatcacgcgtacattgtgcccgggttgggcgatgcgggcgaccgactgttcggaaccaaataatttttcgtaacatgatgccgctgattcgaagcagcggcatttttctatggagccatatgaagtacagattttttaatgcaaacgtcatgatctctcccgaacaaaacattttcaagggggaattatgtacggacggggccgatatcgtctatgtcggcaaaaagaaaaacgaaggttttattgccgatcgcgaaatagactgtaacggaaatcttttgatgagcggtttttgcaacgcgcattcgcacgcggcaatgagtttgtttcgcggcatagcggacgatctgcctttggaaaaatggctgttcgaccgcatatttcccatggaagaccatctgacggaagatgacgtttattggggaactttgctacagatcgcggaatttgtgagaaacggaatcacttgttttgccgatatgtatttctatcccgatacgatttatgaagcggcaaaaaaatccaatctggcagtcgctttatgcggcggcataaacggcgaatccaatgaaaaagatctgcggtttatacgggatcacgtggatttgtatagtactatgtctgacagagtccgctatattataggccttcacgccgaatatacctgcgaagaaaatttgatctcggacgtatcggatattgcggctgaatacggttcgaaaacgtatattcatctttccgaaacgctcaaagaagtgggcgactgtacggtgcgtcacaatcgtctgaccccgccgcaatatcttcataaattgggctttttcgaaaacggagggcttgccgcgcattgtacctattgcgataaggacgatctcgcgcttttaaagcaatgcggcgtcgtgcccgtcgtcaatgcggcaagcaatttaaaacttgcctcgggcgttgcgcccgtctattccatgctcagatcgggcatgaaagtggcgctcgggacggacggctccgcgagcaacaacgcgacttcgatgttccgtgaaatgtacttgttttcctgcctgcaaaaagaagcaatgaaggacgcttcggcagtcagcgcggaggaagcgctgaccgccgcgaccgtgaacggctatgaggcgctcggatttcgcggcggagttttaaaaacaggtaattttgccgatattatacttatcgatctagccgcgcccaatatgcggccactttccgacgtaaaaaagaatctcgtatacagtgcggattcttccaacgttctcatgaccgtcgcgggcgggaaaatcgtttacgaaaacggaaagtacgatatcggggaagaaatttcgaccatttaccgcgaagcggaacaccgccgagacaggttattgcatgaagcgggatttaaggagtaaacaatgaacgagatttgggaaacgatcaaaaatttctttatcaactttttccagaacggcgctttgacgatcgtgcgctgtattgcgtttttcattttagggctgatcattctgaagatcgtgcgcagcatcgtggtgcgtacgactatgaagagccgattggacaagtctgccgccactttcatcatttccatcgtgacggtcgtcttatatatcgcgctcgtgatcgtcgtcgtcagtgcgctcggcttttctaccgcgggcatcatcgctgcgttttccgcgatcgcgctcgccgtcgcactcgctttgcaggacagcctggcaagccttgcgaacggcattatcattatatttaccaaaccctttaaaaaaggcgattacgtagagatcaacggcaaagacggacttgtgcaggatatcaggttgttcaatacaaagatcgttacttataataatgaagaaattcttcttccgaataatcagatcctgggatcgacgctcatcaattatagcacgatgtcgctgcgccgcgtggtcatcgaagttcccattccgtacagcgcggaactttccgaggtcaaagaaattttgctttcgacgttgaactctcatcaggacgtcgtcaagacgcccgcgcccgcggtcgttctcgacgggtacggggacagcgccctcaagttcaaggcgcgagcctggacgcccaacgaaaaatattgggatacgcgcgcatctctgttcgaaatgatttttaataaccttcgagaaaagggaatcgagataccgttcaatcaactcgacgtacacctgcaaagagatgaggaaaaggaggcgaacgcgcaatgacgacgacggaattgatcatcacgtatattttttacggcgccatcatcgtaatcggcctgatcgtgctcggcatcatccgcaaaaagtccaagacgcccgcaaattcagagatcaagcaaaaactttccaatatcgtggaaaaattcgatgcgctcatcaagcagatcgatacgggtaacacagattactataaaatgttcagacaagttaccaatatcgtttaccgtattgatacggcggtcatttatgtatccgaggcggctgagcgcgaacgggatacaacgtacgataagatccgtatcaatctggaaaatgcgcgaggctatatcgcgtcttataaattcgagaaaaagtccaactatcacatagaggattttataaaagcgagggcgtcgctgcaagattgcatttcgacgatggaaggcattatggacagaggaaaagcactgaaaggaaactgatggataagacgatcatcgcaatcggtggcggcgaactaaaaacaaagaccaccttgaagatcgacggatatatcgccgatctcgccaaatcgcgcgcgaaagcggagcgcgcctacgggctgttcattcccacggcgagccacgattccatgccgtatttcaatagtttccgtaaaacctatacgtccgttttcgatatcaaggcggacgtggcgctgaccgtttacaatgaaatgagtttagataagattcgtgaaaaattcaaaaaagcggatttcatttacgttggcgggggtgatacggtgttcatgcttgaacactggaaaaagagcggaatgctggaactcatagaagaggcatacgaaagcggtacggtcgtgtgcggattgtccgccggggcgatctgttggttcgacaatatctacaccgactctgcaagtgtcgtcggcggacagccttatgcgatgcacaaagggttgggttggatcaaagaaaatatttctccgcattataacctcagagtgcttgactttgataaaattttgctatataataatatagctgcgatcgggttggaggacaacagcgcgatcgaaataaccaacggtaaaatccaaaaaagtatttccgcaggcggaaacgcatatcggattcgtgttgaaaacggcgccttggttaaaacaataatcgaataaatcttttgccttttgggcaaaagcatatgcgagtgtggtgaaattggcagacgcgctagattcaggttctagtggaggcgactccatgcaggttcaagtcctgtcactcgcaccagaaaaaacgggtattgtgaatacccgtttttttgtatgtgattttcatgagcatttgtagaacttatcctttttatgaaagatttgtcagatattttttcggcgaaacgccgtaataatttttgaaacagcggtaaaaggtttgccaggaacggaaaccgcaatcgaaggcagtaccgatgatgtcggcgtttttgtccgcctgcattctggcaataaagcgatggatgcgaaggcgggaaaggtattcgttgaggctgaatttgaaaaatttattaaacatacgcgagaaataatatttgctgtaaccgaacttttgcgcgagataatccaaatcgacgtcttcatgataattttcttcgaggaagttgaggatgtttttcatcaggctcacgtccgcgtcggcaaattcttccaaatcgcaggattcgagtatcaggcctaaaatcacgttcacgtaaccgcgctgtaatatgagcggcagttcctgcgactggaattcgcgcatgaacgaatagattttgcgataagtttccggatcggtgatatagggcgtagcgagatgtttttttcctttcattttaatataatcgtttaaaaactcgctcggaatgataataatcatgacggggcgttcgctcgaataaaaggagtgcacgtcgtaacagtcagccacgcagatttcgccaggctgcaagattttttccttgctgtttacgagggtatatacttcgtcgtcgagggcgcagagaatctccaccgcttgatgccagtgcggttcgcagcgcgtgggactgttctgaaattccacgtagccgatggattcgcggacggattcgtaataagaattcatgaaacaccgattgcgcaatttttgagagaaatatgactaataatatatagatattccataaattacgcgttataattgaaataatcttgaaactattataatacaaaaattcaggcgtttcaagtgtttgacgaattatgaaaaaattaaatttggcgatcgtcggttacggcggcatgggctcttatcacggcaacaactatctgcgcgaaaacgctaagtttgaaatcagcgggatcttcgatatcgacgcgtcgcgctacgcggcggcgcgtgaaaacggcatcgaaaattacgatcgttttcatagtaaagaagaaattgccgcggatgcgtctacggacgcagttttgattgcgactcccaacgattctcatctcgaatatgtgacattttttgcgcaggcaggaaagcatatcatctgcgaaaagcccgtggcgctttcgagcgccgaatatgcgcagatgctcgaagtatgcgataaaaataaagtcgttctgatggtgcatcagaaccgacgctgggatcccgactttctgacggtcaaaaaaatgtatgacaaaaacgcacttggaaagttttgccgcatcgaatcgcgcgtgcagggtgcgaacggcattcccggagactggcgcaaattcgaagaaaaagggggcggcatgatgctcgactggggcgtgcatctcatcgatcagatggtgtatatgctccccgaacttcccgaaagcgtctattgccgatacttttatggcgcgggctttgaagtggacgacggttttcgcctggaaatgaactataatggcgggctgagtgtggagatggcggtggacaccaattgttttattcccttgccgagatggacggtttacggcgcggacggcacggcggtcatcgaagattgggctttgaacggcggcatagtcaaacccgtctattccaaagatatcaagatcgcgggcattcaggccggcaacggttttacaaagacgatggcgtaccgtactgcggaatccgtcgtaaagagcgaactggataaagtgagccctgaacctaacgcattctataacgagttttacgacgtcgtcgtagatcataaagagccgttgatccgatcttcggaagtgatgaatgtcatgaaaatcatggaggcggctaagcgttctgcgaaagaaaatcaagtgataactatagcgaggcattaaatgaaaattacggtattttccgaatacggcgaaggatttcgcacaaacgaagaaattctgaaacagcatccgcgcggtctgcacgaaactttgcgtgaattattcgaaggcgaaggattcgaaacgaaagcggtgtatcaggacgatcacgaagacggcggcaggctcacggatgaaattctgcaggaaacggacgtgcttgtctggtgggggcattgtatgcatgaagccgtgagcgacgcgctcgtggataagatcgccgcgcgcgttctgggcggcatgggctgcatattcctgcattccgcgcatatggcgaaacccttccgtaaattgatgggaacgagttgtactttgcgctggcgtgagataaacgagcgtgagcggctttgggtgacggctccctatcatccgatcgcggcagggctgcccgatcggatcgaaatcgcgcacgaagaaatgtacggcgagtatttcgatattcccaagcccgacgaagtcgtctttacgggttggtttcagggcggagaagtattccgcagcggcgtaacgtatatgcgcggaaaaggaaaaatattttatttccagcccgggcacgagagcaacgaatcctaccataacgagtgggtacgcaaaattctcgtcaacgcagtacgctgggcggctccttcggaaccggtgggcgaacccaggtgctgtttctttgtcggagatcctccggaaaaaatcaaataaggggacgtattatgcaatttggagtacaactttattccctgcgggaattgatcggacaaaagggccttaaagaggctctgcgcctcgtttctgcggcgggtttttcgggcgtggaattcgcgggtttttacggatacggcgcggagcagttgcaagaacttttagagcgctaccatctgaaagcaatatccgcgcacgtgggagcacaggagatggaggcggcgatcccgattttgaaaaaactcggcgtcggctgcgcgatcattccgtttattcctttcaatataggaacgtcgttcgaggaaggattgcaggcatgcagaagttcagaagcgctgttgcgggaaaacggcatgatactcggatatcacaaccatgcgcacgagtttaacggcggaacggatattttaaaacgtctggcggaaaatatccccgccttgaaactggaactggacgtgttctggctggcggtcgcgggcatccgcgcgaccgattatataaaagaacagcgcgaacggctcatttatttacatatcaaggaattgggcgagaatgcggaaagcatcaatcccgttgtgggagaggggcgcgcggatatcgaaaacgttttgaaactcggcagggaaatgaacgtgggatggtcgatcctggaagtagaaaaagtcggcgttcccgtcgaagaatatcttgcacgcagttatgaatttatgaaaaaatatcaataatcgaggagaaaatcatggaaaaaatcaaaatcggaatcatcggttgcggcgggatcgccaacggcaaacatatgccttcgtataaaaatctggcggacgaagcggaaatggtcgctttctgcgatattatagaagagcgcgcacagaaagcaaacgtagaatatgccgcgggaaagggcaaggttttcacggattataaaaaactcttacaagaggatctggacgcggtgtgcgtgtgtacgcccaatgtttcgcacagcgagatcaccgttgcggcgctcaatgcaggtaaacacgtcatctgcgaaaaaccgatggcgatcaattacgaggaggcgaaagccatgctcgacgccaaggcgaagagcggtaaaatcctgaccatcggctatcagaaccgctatcgccccgaagtaaaatatctcaaagaagaagcggaaaagggtacgttcggcgagatatatttcgcgcgcgccaaggcggtccgccgccgcgccgttccgacctggggcgtatttctggacgaagaaaagcaagggggcgggccgctcatcgacatcggcacgcattctctcgatctgacgctgtatgtcatgaataactaccgccccaaatacgccgtgggtacggtgtatcataaactgaacgatcagacgcgcaccgcgaacgcctggggcgactgggatcccgaaaagttcaccgtggaggacagcgcgttcggttttgtcgtcatggagaacggcgcgaccatttccattgattcgagttgggcgctcaactatgcggatgcgggcgaggcgcagacgcttatctgcggcaccaaggcgggcgcggatatgcccaacgatcagaaattgcgcatcaacggcgtcaacaacggaaggcagtatattaccgtccccgattttgccgcgggcggcgtcgacttcttttccggctcgggcggcatcggcgatcccgctacgatcgaagcgaaaacctttctggatgcgatccgcggcaagggcgaactcgtggttttgcccgaacaggcgatcgtcgtcacgcgcatactcgatgcgatttatcaatctgccaagaccggcaaacccgtatattttgactgaggtaatacaatgaaacttgctgttttttctcccgtattcgggaaccgcagcctggaagaggctctccgatatctgtccgccaagggcgtggacggactggaactcggcgctggcggctatcccggcaaagcgcacgcggatattttggaactgaaaagcgatccccgcaaaatagcggaactgaaagcgcttttcgacaaatacaatttggagatctgcgcgctttccgtacacggaaacggcgtgcaccctcaaaaggcgatcgcgaagatcgccaccgaggaattggaagccgccattgaagtcgcacccaaactcggcgtgaaaaaaatcgtcactttttcgggctgcccgggcgacggaaaaggcgatatgcccaactgggtaacgtgcgcatggcccaacgaataccgcgacgttttggagtatcaatggaacgaagtgctcattccgtattggaagaagtacgcgcagcgcgccaaagataacggcgtgcagatatgctttgaaatgcacccggggttctgcgtgtacaatcccgaaacgcttttaaaactgcgcgcggctgcgggcgatgcgctcggcgctaatctcgatccttcgcatttgctgtggcagggtatcgatatcgtgtccgcgatccgttatctcggcaaagcgctcttctattttcacgcaaaagatacggcgctcgatcgggaaaacgtggcgcgcaacggcgttctcgattccaaaccttacgagaacgaagccgagcgctcgtggatcttccgcacggtgggctacggttcggatgaaaagttctggaaagacgtgatctccgcactccgtatcgcaggatacgacgattatctgtccatcgagcacgaggacagtttgatgacgcagacggaagggctggataaagccattgaatttatgcagagagtcatgatccgcgagccgcgcacgaacggcttatggtgggtataataaaggagcggcaatttttattgccgctcctttattttttacggaattcccgcgggctcatgccgcagtactttttaaaagttttggaaaaataattatagtcgggaatcccgcactgttccgcgatcttattgacgggcagttcggtttcccgaagcagcgcgcaggctcggttgagcctgcggttttttacgaaatcggctacggatgaattgaaatattccttgaaaatcgaatacatttccgatcgggatatccgaaagcgggaacaaagcgcctgtacggacagatcgtccgcaagatgctcgttgatatatgcgccgatcgtggcgtcgatcttgctttccgccgcgctgatcaggtttttgagatattcgtatcccgcgcaggcatcgaggatatggatggcggaattgatcttgtccatgcccgcggagggaagtcggttgaaattttctcgcagttcttctcgtctttgttcgggaaagcgcatggctatggtggaaaaatcggcgtgttcgctcgctttgatctgcccgatcacgatataaccgatgatattgtcgttgtacagaatgggcgaaaaacattccagcagtccggcgtggcacgtatagacgtggcgcctgtgcgtctttttgcacgccgcaaatgcaaggcggtcgcattctttgcatcgcgcgtccatgacctcgtccgcgcgcagacagcggcagaaatccgtgagtttttcgggataatagcaaagttcgttttccgcattgtcgtaaatacatattttgatttttgtcaggttataaaagtcgtgcaggagttcctgcattttttgcagatcgtacggttgcatattagtattccttaatacaaaattaccatatttataaacaaataatactataccgcatgaaaaaaatcaagtaaaataaggccgaggtgaaaatatgaattatttgagtctggacgtggggacgacttgctgcaaatgccaattgttttccgacaaaggggaaattctcgaatataaaattacggaatatccgctcaaacaagcggagggcgaattatacgtagatattgccgcgatccgcggacgggtattttccatgatctcggaagtcgcggcaaaacgcgaagtttcttccgtctgtatttccacgttcggggaatcgttcgtgctcctagataaaaacgatgaaattttattcgatcccatgctatataccgacgcgcgcggcgcggaacaggcggagatgatctcggaaaaatttacgaacgaatatttgtttcagaatctcggttcgctgccgcagagcctgttttccgtcagtaaacttttgtggctgaaacaaaaccgacccgaaattttcgcgcgggcagacaaagcgatgcttatctgcgattatctggggtatcttttgacgggcgagcgtgcgatcgactatgctctcgcctcccgcacgggtgcgttccatatcggaaaactgacctttgacgaagactttttaaacgaactcggcgtgcccgtttctctgttttccacacccatgccgacgggcagtatcgtcggcatgatcaaaaaaagcgtcgcgaaagatctggggctttcggaacactgtatgctcgtgctcggctcgcacgaccagatttgcgccgcattgggggcgggcgtcgtaaaagagggcgatgcggtagacggaatgggcacggtcgaatgtatcaccaccgtcttttcgaaaaaaccttcggactgtacgatgggcgagcaggggtatccctgcgtcccgtatgcggtaaagggattgtactgcacgtatatgttcaactattcgaacggttcgctcgtttcctggttcaaggacgagttgctgcacgggtatcgcgggaacgaagaaaactttttttcctatatcgaaaaggatatgaaacgcgcgcctacgggcattcttacgctcccgtatttcggcggcgcggcgacgccgtatcagaatatccatgcaaagggcgcgattctgaacctcacgttgcgggcgaccgaccgcgacgtatatcgctcggtcatggaaggcacagcgatggaaatgcgactgaatctcgaaaccgcgtctgcttacgggataaaagttacgggcgcgacggcaacgggcggcggcgccaattccggattgtggctgcaagcgaaagcggatatcgaaaacattcctttccgaacgctgcgttcgagcgaaggggggctgtgcggctgcgcgatgctgcaatcggtggcgatggggcagtttgcagatcttgaagaggcggcaaaactgttcgtgcagtatcgggaagaattttttcccgatgcggacttgcacgccgcgtacgaggaacaatattcgaaatataaaaaactatatcagacgttaaaggagttttattaaaatgaaatttgcattgtttttcggaaaccgcggatttatgcccgcggaactcattgcaggcgcgcgcgccgacatgatgcgcgccgttgccgatgcgggacacgaatcgctggtgatggatgcgggcgctacccgctacggcgcggtggaaacgcgagaagaaggccgactctatcacgactggctgaaaagccatgagggcgaatacgacggcgtcattctctgtatgccgatctttatcgacgagaacggcgcggtgaccgccttgcaggacgcgggcgttcccattctcatgcaggcgtatcccgacgagatcggcaaaatggatttcaaacagcgccgcgacgcgttttgcggtaaattttccgtgaccgacgttttctatcagtataaaataccgtttacggtcatgaaaccgcacgtagtgcatccgctctccgccgctttccgccgcaatctcgatgattttgccgcgatatgccgcgtggtcaagggcatgaaacgctttaatctcggctgtatcggcgcgcgtacgacggcgttcaagacagtgcgtttcgacgaggtcgccttgcagcgctacggcatcaacgtggaaagtttcgacctttccgaactcgtttttaaagtgcagaaaaagagcgacgacgattgcgccgttcttaaaaagatcgagcggttggaagcctacaccgatttttcgcgcgtgcccgaaaacaacaaaaagacgctcgcgaaaatttccgtcgtcatcgacgagtatatcgaagaatacaaactggacgctatatccctgcgctgctggaatgaaatggaaaccattctgcgcgtgtgtccctgcgttttgctttccgaactcaacgaccgcggcatagtcgcctcgtgtgagatcgacctgtgctcggcgatcaccatgcgcgccatggctttggcgtcggaaaggccgaccgcttgcctcgactggaacaacaactacggcgaagaggaaaacaaggtgatcctgttccattgcgggcccgtagcgcagtcgttgatggcgggcaaaggcgtcgtgaccgaacataaaatgtttgccaaaggcgacccgggcagcggctggggttccaacgaggggcgtatcgccgcgttcgacatgactttttccaactgctttaccgaaaacggcaaactgaaa

SEQ ID NO: 3102 - DNA, 9868 bp, Unknown
  16S sequences of unknown bacteria
ggaagcctttattcagaagatgaaagcacaggtttgttccattgaacggaagaaggagacccgttatgcgccactgctgtttaacctggcagagcttcagaatgaatgctccagacggtttaagatcagccctgatgagacgctgaagatcacgcaggagctatatgagaaaaagctggtcacctatccaagaacagatgcccgcgtgctgtctgcagctgtggcaaaggagatctataaaaatatccgaggacttggtaattttcagccggcggcagcatttgcagcagagattctggagaaagagtcctggaaagggatcggcaagagccgttataccaatgacaagcagatcaccgatcactatgcaatcattccgaccgggcagggatttggtgctcttcgcagtgtatcaatggttggacagcaagtatatgaggtaatcgttcgccggtttttgagcatcttttatccacctgcgatctatcagaaggcatcgttgatcacctctcttggaaaggaaaagttctttgcaaatttccgtatcctgatggaagaaggttatctgaaggtgacgcctcagccagagtcaaagaagaaaaaggatgacggcgaggaagaggaaaacagtggagatgctgccatgctggaagcactgatgaagcttagaaagggcatgaagcttccggtaaagggtatgaagatcaaagaaggagagacctctccgcctaagcgatacaattctggttctatgattcttgccatggaaaatgcgggacagttgatcgaagatgaggatctgcgttcacagatcaagggaagtggtatcggcaccagcgcgacgcgtgcggagattctgaaaaaactggtcaataataaatatatcgcgttaaataagaagacacagatcatcacaccgactcttcttggggaaaatatatttgatgttgtgaatgtgtcgatccggtcacttctgaatccagagctgacagcaagctgggagaagggtctgacgtatgtagctgaaggacagatcacaccggatgaatatatgcagaagctggaacattttgtgacgtccagaacggagcaggttctgcacagcaatcagcactatgccatgcggccatattttgaagcggcggcagtttattataaaacacctgaaaaacagacacagagacgtggaaaaggagacacaaaacaatgagtaagattatgatcaaagacctttacaacatgaatgaaacgattgcagcagaactgtttgacggcctgacctatccgtgggaggcacttccgaagatcggtgagtttatcaagaaactgggagagacccttgatccggaagaatatgataaagtgggcgaggatgtgtggatcgcaaaatccgccaacgtatttccgtccgcatatgtacacggaccggcgatcatcggaaaagacgcagaagttcgtcactgtgcatttatccgtggcaatgccattgtaggtgagggtgctgtagtcggtaattccacagaacttaaaaatgtggtgttatttaataaagtacaggttccacattacaattatgtaggagattctattcttggatacaaggcgcatatgggcgcaggttccattacttccaatgtgaaatctgataaaaagctggtgaaagtacatacaccagagggtgatattgagaccggcatcaagaaatttggtgccatgatcggagataatgtggaggttggctgtggaagcgtgctgaatccgggaacagtgatcggccgtgagagcaatatttatccgctgtcttctgtcagaggcgtggttccatcccgttctatctacaaaaaacagggtgaagtagcgacaaaacatgaagactaagagagggctgaatggatgtgtgctcaaatggatcgccattattcttatggcgatcgatcatttcggggcatccattctggagaactttctgttaaatgtatgggatgtgtccccgctgggagacctgctcagggactatcctgattactgggatctggtgctgatggcagatcgtgtgatccggaagatcggacggcctgcatttcctgtgttctgtttctttatcgtggaaggattttgccacaccagaaatgtgaaaaactatgcagtgcggctgggaatctttgcactgatcagcgaagtaccctttgatctggcaattttcggaacaccatttcactggggacatcagaatgtattttttacattgtttcttggattattgctgatctggtatttgcgggacgtaagcacaagtacagaatggagtctggctggcgcactggcagtctgctgtgcggcggaagtgctgcatgtggattatggagcgttcggcgtggcactgatcggtgtctattatattttacgggaactgcctgttctgcaggcaggggcaggagcaatattgagtgcgtgggagatgccagcaccccttggaagtctgctgctgttattctataacggggagcggggcagacagcccaaatggtttttttactggttttatccggttcatctgttcctttactatgtgattggaacatgggtgcttccggcatggatatgatgaggtgaacaaaagtggcaaaagcgattatgatacagggaaccatgtctaattcaggaaaaagcttcctgacagcaggactgtgccgggtatttaagcaggacggatacaaagtggcaccgtttaaatcacagaatatggcactgaattcctatattacaaaagatggtctggagatcggacgggcacaggctatgcaggcggaggcctgtggcatcgacccgacggtagagatgaatccgattcttctgaaaccgaccagcaatgtgggaagccaggtcattgtaaatggcgaggtccgcggcaatatgaaggcgatggattattaccgcaataaaaagcagctggtgccggatgtgatggctgcctatgaaagattaagcgaacagtatgatattattgtgatcgaaggagccggaagtcctgcagagatcaatcttcatgacaatgatattgtaaatatgggaatggcgcgcatggcgaaagcaccggtactccttgtgggagatattgaccgtggtggtgtatttgcagccctttatggaacggtaaagctactgcctgaagatgagcagcagatgatcaaaggtctgatcgtcaataaattccgtggggatgtgaagatccttgagccaggccttcggatgatcgaggagcgaacagggattcctatggtaggtgtggttcctatggagcatctggatattgatgatgaggacagtctctctgaccgtctgaatcagactcagaagggagctggcattgatgtggcagtgatccatctgccgcatatttccaattttacagatttttccgcatttgagcggatggacggggtatccctccgttatgtaagtcagccgggaatgctgggggatccagatctgatccttctgccgggcacaaaaaataccatggatgactgccagtggctcagagagtccggcatggaagcactgatcctccgccaggcagagaagaagacgccgatcatcggcatctgtggtggatttcagcttctgggtgaacagatggaagatccgcataatgtagaacatggaggaaccatgcgtggcatgggacttctgaatacaagaaccgttttctcagaagcaaagaccagaactcagatccgcggagtgatggaaaagggcgtgggtctttggagcaactggcagggaaaagaagtaacaggttatgagatccatatgggtgtgactgagaatctgggaggttgtcaggaactggttcgtctcgaggatggaagagtggatgccctggctaatgaagacggaagtgtgatgggaagttatctccatggtatctttgatacggatggatttgcggaggaaatgatccgcagattgatgaaagaaaaaggtatggagtttgaaaactggcattttgatctggaagctcacaaggagcaggaatatgacaaactggcagatctggtcagaagctcgtttgatatgaaaaaaatatatgaaatactggaggagggaatctgatgctggataaaattgagattgtaaaacctacggagatagagaaacgaagcatggaaattattacatcggagcttaatggcagaacctggccggagcctgagttttctattgtaaaacgatgtatccacacatccgcagattttgattatgcggataatctgtgtttttctgaaaatgcggctatgctgggtgtggaagcactccgccgtggtgcggtgattgtgacggatacccgtatggcatggtcagggatcaacaagaaaaaactggcagagtatggcggcgaggcattctgctttatgtcggatgcagatgtggcacaggaagcgaaagacagaggctgtacccgtgcagctatctgtatggaacgtggagcagcactgggaaaagaagtaatctttgcggttggcaatgcgccgacagcactgatccgtctctatgagctgataaaggcaggagaggtaaaaccggcgctgatcattggtgcacctgtaggatttgtcaatgtggtggaagcaaaagagctgatcatgacagcaggggttccttatattgttccgaaaggacgcaaaggcggaagcaatattgcagcgacaatttgcaatgccatgctgtattataagggatagagacatgatagcatttttaagaggaactgtagaagatatagcagagagcagtctggtgcttgatgttcatggcgtgggctatgaggtgctggtaccagggcagctcttatcatccatcagtgggaccgggcaggagctgaagctctacacttacatgcaggtgagggaggatgcggtggtcctgtttggatttctgacaaaggatgatcttgccatgtttaagatgctgatcggtgttaatggtgttggccctaaggcgggacttgcgattctgtcagcactgggagcagacgatcttcgttttgcggtattatcagatgatgcgaagaaaatcgccaaaacaccgggtatcggagccaagactgcgcagaagatcattctggagctgaaggacaagctggatctgcaggatgcatttgaaaagaagctggcagcaccgacggtgggagctgaggtggcagcagctgcagcaggtaacagtgtggtacaggatgcagtagaagcactggttgcgcttggctatggaagtaccgaatctctgaaggcagtgcgttccgtgaatccggacgaacatatggatgtggagacggttctgaaagctgcgcttaagcacttattttaagtgtatatgcggagatgattttacaaatatgactctgcatgatttatgaaactatgaaacaagaacaggagaacaatatgggcagccgcagaatcatagcgacagaagaggcggaagaggatatccggattgaaggaagtcttcgaccacagagcctggacgagtatatcggtcaggaaaaagcaaaaaataatctgaagatttatattgaggcggcaaaatccagaggagaagcactggatcacgtgctgttctatggacctcccggacttggtaagaccacgctggcaggcattattgccaatgagatggggacacatctgaaggtgaccagtggtcctgccattgagaagccgggtgagatggcggcgatcctcaataacttgcaggagggagatgtcctttttgtggatgagatccatcgactgaaccggcaggtggaggaagtgctgtatccggcaatggaagattatgccattgatattatgatcggaaaaggagcttctgcccgcagtatccgtctggatctgccgcaatttactttggtgggagcaactacaagagcaggtcttctgaccgcaccgctcagagatcgttttggcgtggtccatcatctggaatactataccattgaggaactgagcaccattatccgcagatctgcagaagttctgggcgtagagattgatgcaaaaggggccgtggaactggccagacgttccagaggaacacctcgtcttgcgaatcgactgctgaaacgtgtcagggatttcgcgcaggtaaaatatgatggaagaattaccgaggatgtggcagtatttgcactggatcttctggaagtggataaatatggactggatcagtcggacagacggatcctgcgaacgatcattgagaaatttgcaggaggtccggtgggactggatacgctggcagcggctcttggagaagatgccggaacgctggaagatgtgtatgaaccgtaccttttgaaaaatggatttctgaaccgtactgccagaggccgtatggcgacacagaccgcctatgagcatttggggattgcttttccagagtaaattaggtacactgtactatataggctaacaaagaagcaggtgagggataatggcaaagaaaaatacagctgatgtgctgattaacggaaaagtatatacgatcagtggctatgagagcactgcttacctgcagaaggttgcgacatatcttaacgagatggaagaaaaggtagcagtgacggaaggctatgcccgactgacagcggacgagaagcagcttctcaaaaacatgaacctggcagatgtctattttaaggcagatgcagccagagaatcgctggaaaaggaaaaagaacagaaggatcgggagctgtacagtctgaagcatgatctgatcgatgcaaagatggagaaggaaaagctgatggagcgtattcaggagctggaggcacagcttgaaaaagcgcagaagcagacttccagacaaggtgtagagaaccgtcagccaagaactgcacatccgacgggaagaaatgtgtcccatccggagcagaaactgtaatgacagaaatcaaacatgataagagggggaccagccatcagtgctggtccttgttatcataaggagaagaagatggaaaagaagaaactggagattctggcaccggccggatcctttgaaagtctcaaagcagccgttcatgcaggagcagatgcggtctatatgggaggcagccggttcggagcaagagcctatgcacagaatccggaaggagaccggcttctggaagctatcgattatgcgcacctctatggggtaaaactgtatctgacagtcaatactctgctgaaggacaaggaacttgaaggagaactttatgattatctgaaaccttgcgtggagcatggactggatgcagtgattgtacaggatacaggtgtgatgaaatgcattcagcgctggttcccggagcttgatattcatgccagcacacagatgactctctgcggagtgggcggtgtggaacttctgaaagaagaaggggcacatcgggcagtactggcaagagagctttcgcttgatgagatccatgagatctacgaaaagacaggcatggagctggagtgctttgtacatggagcattatgctattgctattcgggtcagtgcctgttcagcagtctcctgggaggccgaagcggcaatcggggccgttgtgcacagccatgtcgtctggcctatacggccgctgaccatggaaaaaatatttcaggcaaagagcaggatctcttaagtcccaaggatctctgtgcgttagatctgatcccgcagatcgccgaggcaggtgtctattccctgaagatagaaggccgcatgaagcgtcctgaatatacagcaggagtggtgcggatctatcggaaatatgtggatcagtatttaaagtatggaagaaaaggatacaaagtagcagaagcggatcggaaggagctgctgctgttatttaacagagatggattttccaccgggtattatgaaaaacacaatggaagagatctgatggctctttatcaggcaccagcttcagacagcgagaagaaagcctatgaaaagaaaattgcggaacttcatcagatgtatgtggagcaggagaagagaatcccggttcatggatatttttatggagtagcagaccagccattacagctgactctgacagaagatgagacaggggcatgtgtggtagttaccggcggatgtccgcaggcggcacagaatcgccccactgatcaggaacaggtggagaagcagttgaagaagctggggggaacatcctttgtctgggaaagtctggatgtgcagatagaagatggattattcataccggtacaggagttgaacaatctcaggagagaaggaataacagaacttcagaaggaactgcttcggattgctctggaagaaaaagcagatagacagggaactggtaaaggaactgacgtgactgcaaagcgtgggaaaaaatcccatggattccgggaactccatatttctgtagagacggagaagcaattagcagaagtgctccgctggtggggtgagacaggcactcagacagaggggataagaccgtctcttggagctgtttatctggatgcggagagtctggaggaggatctggaacgtctggttggacaggttcacagtgcagaactgaaagcttatgtggtgctgccggctattttcagaaaaataacaagagcacggtatgagaaaaagctgtcttactggcagaatctgagagcggatggttatgtgatccgcaatctggaggaatacgaatatgtaagagacaaggagtgggcaggagacctgatcctcgatcacaatgtctacactttcaatcaggagagccgggaatactggcggcaaaaaggtgtgatgaagcagaccagcccgctggaactgaatggaagggaacttgccaatctgtcggacgagaacagcattcagatcgtgtatggcagatatcctatgatgactacagcaggctgtgttcgaaagacgttgaatctttgcagacatgagccaggtgtgacagaattaagagatcggaaaaacgtaagctttcctgtaaaaaattattgtcgggattgttataatgtgatctacaacagtcagccattgtatctgtttgacagattttcagaagtagaggcattgggagcaggagtctgcaggatcatgtttactacagaaaccgtgcaggagacaagactggtgcttaaccagtggctgaccggagaaaagagacagtcagaatttacgagaggacattttgcaagaggcgtagagtaatatggtaacgatcattacagaattgtcaaaatatgccatgattctgtcactggcaatctatacagttcttgggtttcgtctggtacgaagggacgaggcagggaaaaaggcggcactgtggcagcagaatgtgctcatgttcggtatgcagtttctgggaaatctgacgctgtatctgagtacagaaaatgagaagatccttctgttttatatagctcagctgggaacatttattctgttccttgttttacagagagtcatctatccgaatgcagatcagctgctgaatcacaatatgctgctgctcttaagtgtggggattcttatgcttgcaagactatcctttgataaggcagagcggcaggcagaactggcagccctggcggcagtactgacctttgttattccagtgatcatccgaaagagtggacgtctccggaatctgtactggctatatggagcggcgggatttgggctgctggcagtggtctttattgccggaagtatcactcatggagccaaattatccattaccgtttatggaattacgcttcagccatcggagctggtaaaggttttatttgtgttttttgtggcgggtatgcttcatgaagcggtggatttc

SEQ ID NO: 3103 - DNA, 4214 bp, Unknown
  16S sequences of unknown bacteria
aaagcgcgaaagggctttgcccctctctttggttttttgacagtctgaggcggcggaagaaaccgctgccgcgcgccagtagccgcggccggtataattcatcgaccgataatcgccgccaagctgccattgcaccggcagcttggcggcccatccctgcggagttgtgcctcaactctcgtgcgccacgttcattacgcgcttttcgcagtccatcgtcaccgccagcacttcatcggtgatgtccctggaaaaacccaaatccagcaacaggcccggccgttcttcctccgcgttccaaaaaacgccaaagcgcaggaatgtcaacgcgtccaccatttcccgcgccgaaagcgcgccgggatcctccgttccaaagcatacctgggcttcttccatttccagttcttccagatggaagcgcataaagaacgacacggtttcgtgccgctcgttttcttcgttctccagcgcggctcgcaggcaatctctggccgctgaagcaaaagcctctgcctcgtccagtatcccggccacgccggccatcgcgtcatccttttccgtcagttcgctgtcgatgtccaggggaaaagggcaaacccgcatcggccgagaacaagtacacatcttcgccccgttcatacgcgacatccggatacattttgctacccagcttcatgccatcgcctcctgtttcgcatcgtttgtagccttatgataccacgcctttgcgcctttggcaatgccgttcctgccaaatgagacagtgaaaaaagaaactgctccgtttgcggggagcataccactttccggcaggaaattgccatccgaacggcgaatgaaacattatgtagcaaagatgcaatttggccatgccaaaatggcggctgtggcaaaacgatattctactcggttaaggagtgagcgataatgttgttctatttgggaacctacacccagcgcggcggggcgggcgtgctgggctgcgaactgggcgcggaaaacgccatgcgcgtgatcggcagcgtattcctcaaagacccgacctatgtcatcgccaacgcgcggcgcgaccggctattttgcgtgtgcgaagcgccggcggaaggcgaagaaggcggcagcgcggcttctttttcgctgggggaagacggcgcgcccgtgctgctttcccggcaaaacgcggtgggccgggggccctgtcacttgtgcctctcgccggatgagcggtttttgtacctagccaactatgtttccggcagcgtcagcgttttccccgtggaggaaggcgggcggctgggcgcgcttttgcaactggtgcagcacgagggccacggccccaacgcgggtcggcagcaggggccgcacgcgcatcaggtggtgtttttgccgcaggaaaacgcgctgtgctgcgtggatctaggcgcggacgcgctgtttacctacgcgcaggatcgggacaccggacggctttccctgaacgaccgcttctccctgccggcgggctatgggccgcgccacctggcgaagggcgaaggcaacctattctacttggcgcacgaactggaaagcgccgtgagcgtattgcggcgcgaaaacggccagtggaccttgctggaaacgcattccaccctgcccgcgccgcaagcgagcaacacggtcgccgcggtgcgcgtgttcgaaggccgcgtgatggtttccaaccgcgggcacgattccatcgccgtgttcgccatcgagggcgaacgcctgcggccgctgggcatcttccccacgcccgggccggtgccgcgcgatttctatcccttaaaggatggccgcgtcctcatcgcgcaccaggagggcgatgtaacgctcgcgcgcctggcggaggacggatttatccccctttcgcacctcgacgtgcgcggcgcggtgtgcgtgctgccctttgaggaggaaatggcatgagaatcctggtgtgcgtaaagcaggtgccggccaccgcgcacgtcactgtggacgaaaaaaccggcgttttgcagcgcgaaggcgtggagagcaagctgaatccctacgatcttttcgcgctggaaaccgcgctgcgcctgcgggaagaagcgggcggcacggtcacggccatcaccatgggcccgccgcaggcgcaggctgccatccgcgaaaccttctggatgggcgcggacgagggctatgtgctcgccgaccggcggctggccggagccgatgtgctcgccaccagttacgcgctttcccagggcatcgccgccatcggcgcgttcgacgtgatcctgtgcggcaagcagaccaccgatggggacaccgcgcaggtcggccccgcgctggccgagcacctgggactgccgcacgcggcctgggtttcgcgcctggagcgggcggaaggcgggctgatcgcgtatcaggaattgcaaagcgccatccacgcggtgtttttgccgttttcctgcctcgtcaccgtggagcaggacatttatacgccccgcctgcccagcctgaagcgcaagcgcgaaaccgccgggcgcgaagtgaccgtcatggggctggacgcctttgccgaccaggatgaggcgcattatggcctgaacggttcgcccacgcaggtggagcgcatcttcccgccgccctccgccccgccggcggaacggtacgaaggcgaaaccgccgcggaagcgctggtggagcggctccgcgcgctgaaatttttgtgaggtgcgccatggctcaaatcatcctgaacaaaaacgcctgcgcgggctgcggcgcgtgcgcgcgcgcctgccccttcgccgccattgaaatgcgcgggcaatacccgcagatcctagacgcgtgccgcgtgtgcggcctgtgtgtgcgcgcctgcccctttggcgcgctcaaaaaggaagaaattgcccgcgaagcggcggacctttcgcaatataaggggattttcgtgttcgcggaaatcgcaaacggccggccgcatcccgtggcgctggaactgttgggcaaggcgcgcgcgctgctgggcgcgaggaaagagcccgtgcgcgcggtggtcgccggcgaaaacgccctggattgcgcgcgggagatgtgccactggggcgcggatgaagtgctgctctacgatagcccggaattttccgtgttccgcgcggacgcgtatgccgacgcgctggaagacgcgattttggcctataagcccgcggctgtgctggtgggggccacggcgctgggccgctcgctcgcgccgcgcgtagccgcccggctgaaaaccggcctcaccgcggactgcacgggccttgaactgcgcgaagacggcggcctggtgcagacccggcccgcctttggcggcgacatcatggcgcaaatcgtcacgccgcgcacgcggccgcagttcgccacggtgcgctatcgcgtgatggaggccctgccgcgcacggatgaacccacgggccaggtggttctccgtgcgattccgcccattcgctcgcaagcgcgcatgctggaaagccagcccatcccgcccgcccggagcatttccgaggcggacattctggtggccgcgggccgcggcgtgcgcaaagaaacggatttgcaaatgctgcgcgaactggccacgctgctgggcggggaactggccgtcagccgcccgctggtggagcgcggctgggagaccaacgcgcgccagatcggcctttcgggccgggcggtgcggccgcggttgctcatcacctgcggcatttccggcgcggtgcagttcaccgccgccatgagcggcgcgcagcgcgtggtggccatcaacaccgatcccgaagcgcccattttccgccgcgcggacatcgccgtggtggccgatctctacgaagtcgtgccccggctgatcgccgcggcaaaggagggaaagcacgatcgttgacaaacctgcggtttgccaacgagatttcccgattgcttgtctacgcaccgcttcgcgggcttcgacggccagcaatcggggcgggaatgtatttttccgtttcgcaccgaccctcaattcagcatggtcgttccactgcgctcgcaagctcgcttgtggctctccctgcttcattgggcttactacggcctgtttccgccactggcggcggccttcgtgcgcccctgcgcttcgcttgcgcggtgttccgtgcctgcgcacttcgtgtgctcggcacttcagcccttcgggc

SEQ ID NO: 3104 - DNA, 9564 bp, Unknown
  16S sequences of unknown bacteria
aaaagaccctgagcgaaatttcaaagcttatcggcgacggcgaggaaaaggtaaaaatttcggtggaaaagcgccacattatctttgaaatcggcggctgcatagtcatttcccgtctgcttgagggcgagtttatggattgggagtcggccgttcccaaggcctgtacctccaccgttcttgccgacactcatgagctgcgctcctgcatcgaccgcgtttcccttgtggtcaacgaccgcgacagggtttttgtcagatgcttttttgaggaaaaggaattcaaggccatgtgcgaatccaccgttggcaacgccgttgacaaggtgggaatttctcttgagggagacagggtggaaatcggctttaacagccgttatctcatcgacgcacttcgcgccgtggaggacgaccgcataaaaatcgagctaaacggcgcctttttgcccattaaaataatgccgacggagggggataatttcctgtttatcgttctgccggtgagaattacaaagggataagacatgaagattaaattatccgaggcggtaaaaaaaatcaaaatcgagaccgaatttatcaagctcgactcctttttaaagctggcaaacgcagcggtgtcgggcgggcaggcaaaggagcttgttcttgacggcaaggtgctcgtcaacggggaaatctgcacggcgagaggaaaaaagctttatgccggcgacagggtttcggttttgggaaaagcttatgaggttgagggaaaatgtatctgaccgccctgcggcttgacggctttcgcaacattaaaaatcaggagatttttccctgcggcggggtcaacgtcattttcggaaacaacgctcagggcaaaaccaatcttatcgaggcgattttcttttgctcggggctcggttcctttcgaggagcaaaggaagcggagcttatccccttcggacaggattttttaagcctttcggccgactttttttcaaagggacgaaaccgaaaaacggaaatcaaaatttcaagggaaaaaaagaaaattctgctgtcaggagttccgcaaaagcggctttcctccctttgcggggaattcggctgcgtggttttttttcccgacgacctttctctcataaaaagcgctcccgaaaacagaagaaaatttttggacacggctctctgcacgctaaagccgggttaccgaaagctgcttttaaactataagcgggccctttcgcagaagaattttctgcttaaaaccgcctttaaatatgacaaagacacggccgacgccctgcttgacggatacgaccgccacattgcgaaattcggctcggtcatttgcggccagcgaaaaatatacaccgaaaaaatctcggtttttgccgacggatttttttcggggctgtcgtcgggaaaggaaagcctttcgctttgctatgacgggagcaattttgccggagaggacggcgagcaaaagcttttctgcgagcttttaagctcgagagaacagagccttaaaaccctttccacccccgtcggccctcacagaaacgaccttatcgtcgacataaacggcatttcggccaaaagcttcggctcccaggggcagcagcgctcggccgccattgccctcaagcttgccgaggcggcggtgctcagggaatattccggtgaacagccgataattctgcttgacgacgttatgagtgagcttgatttcggaaggcaggaatatattctcaacagccttaaggagggtcaggtttttataacctgctgcgacccgaagcagatttcggggcttaaaagcggaaaggcatttttgaccgaaaacggccgttttgaggagacggatatatgaaaaagacggtttttctcggaataggcgagcgcgcgctgccttgcgaaaaaattatcggaattttcgaccttgacaaaaccaccgtcaaaaaggacacaagggaatttctgaaaatcaacgagcaaaagggtcttgtgcagacggtgggttttgacattcccctttcctttatcgtcacggccgacaaaaaaaattcggcaaaaaaaagtaaagaaaaacaaaaaaacggggtcattctgtcgccggtttcggcgtcgaccctgctttcaagagcaaaaaacggcggataattttcaaaagaaaaaatccctttaaaataaattttttttcggttgttgcatggttttgtgcaaccgaccgcggatttcggacccctttatgacgggtcaaatcaggaggttataaaatggaaatcgaacagatgccgagcgtcaaggtaaatgaggagtacgacgccgaacaaattcaggtgctggagggtcttgaggccgtcagaaagcgccccggtatgtatatcggctctaccggcgagcgcggacttcatcaccttgtttacgaaatcgtcgacaactccatagacgaggctcttgccggatactgcacacacatcgaggtggacattctccccggcgacatcatcagggtcaccgacaacggccgcggaattcccaccggaatcaacaaaaaatacaatatgcccgccgtcaccatggttttcaccatgctccatgcgggaggaaaattcggcggcagcggatataaggtgtcgggaggacttcacggcgtgggctcgtcggttgtcaacgcgctttccacctggcttgaggtggaggtcaaaaacggcaccgacattgtaagacagagatatgaacggggcgcgatcgtcaccgagcttgaaaaaatcggcgagacgagcgagaccggaacaaaggtcacctttaagcccgaccccgaggttttcaccgacaccaccgaatatgactataacacgctgttaacaaggctcagagagcaggccttcctcaacgccggcgttaaaatcacgctgaccgaccgccgtcccgacgaggacggaaacgaacaggtcagacaggacgttctgcactatgagggcggaataaagagctatgtcgactttattctcgaaaaatcaaagaaagacccgctgcttcccgaggtcgtttacattaacggcgtcaagggcgactcgacggccgaaatcgcctttcagtataacggcggatatgacaccaagataatcagctttgccaacaacatccacacggtggacggaggaacccacgaaagcgcctttaaaaccgcgctgacaagggtggttaacgcctatgcgagaaaattcggtctgcttaaggaaaaggatctgaaccttaagggcgaggacattcaggagggcattgcagccgtcatttcggtcaagcttaccgacgcgcagtttgagggacagaccaaggcaaagctcggaaacacctccatgggttctatggtcaccgccatggtgggcgaaaagcttgccgaatatcttgaggaaaatcccgttcccgcaaaaatcatagtaaacaaggccattgccgcttctgccgcccgcgaggccgcccaaaaggcaagggatctgacccgcaaaaacaccggcggaaaattcaaaaagccggaaaagcttgccgactgcatttcaagagacccgaacgagaccgaaattttcatcgtcgagggagacagcgcaggcggttcggccgttaagggaagagacgcaagaacccaggcaatactgcccctttggggaaaaatgctcaacgtcgaaaaggcccgcgccgacaaggtctacggcaacgacaagctgacacccgtggtgcttgctctgggaaccggaatcggcgaggaattcgacataacaaagcttcgctacggcaagattttcatcatggccgatgccgacgtcgacggctcccacatacgcaccctgctgctgacgtttttctttaaatatatgcccgagcttatcgaaaacggcaacatttacattgctcagccgccccttttcaaggtgtcgagaggcaagaagtttttctatgccttttccgatgaggaaagggatatgtatatcgcctctctcggcggaaatgccgacgttcagcgatacaaaggtctcggtgagatggacggcgagcagcttaacgaaaccaccatggacccgagataccgcaccaccctgcgcgtcaccatggccgacgccgaaaaggcggctcagaccattacccttctcatgggcgacgaggtcgaaccccgccgtcagtttatcgagcaaaacgccacctatgttcagaatcttgacgtctgatttgcaaagggttttgagtttggagaatgtctcaccgtgcggaaaaagcctcccatataattgaaagggttaaatgttaattagcctcccctgtgagcggtcggtggcaaaatctttgattttgacggaggggttgtgcagttaaagcataaatctgcattgtcgggactttagttttcacgtcagttttgtgaaaaagacagtccccgtcaaaagaaaaagttgattaaaaagacaatccctcagtcgctgcgcgacagctccctttacacaagggagcctaagaaaagtacattggcgttttaccaagggagcttaaataaaaagacaacggctttttatacataagggccgaggaaaaacatcgattctttacacgagggtgcctaaaaaagacatgggttcttaagtaaggaagccgaggaaaacaggattttcacggcaatgaagatacgcagaatatcggccgaaaaattcggcatacaaacaaaaaggagagtggtttaatggccatcaaaacggtcaaatgcccgaaatgcgacagcgaaaccgccgtcataaaggacgaaaacggcaaggttttctgtcccttttgcggggaggagatagtcgacattcccgaaattaaggagggcgagcagtttgaatattcagacgtccccgccgagaaagacacaaagaaaatcgagccggtgggcgaggaaatagacctttccttcgtgctgtcggaagaggaggtgggaaacgccctcgaaacctcgggaaagcttaaaaagcgcaaaatcattccctttatcgaggcggcgcttttcggacttctcggcattttctctcttctttcgattattttcagctatgccggacttttcggaatgggcaaaaccaagcctaacttttcccactatctcgtgacggtcatttgcttctgcatggttcccgccggtttcaccctgcccgagcggcaaaagaaaaaatatatccgctcggccacctcgggaaatcaggtaaaccttaaggtatatgaaaacctgcttgaggtttgcgtgctcggcaacgaggaggacgcatggcagcttgagcttgacggagactacggcataaattatgaatgcaatcagacggttttgagccttaaaaacggccaaattctcgtcattcccgaccgagccgtcaaagaggaacagcttgaaacgctgcacaaacgatttaaaatcgaaagcaaggaaaactaaattccttttaagaatataaatttcatccgaaaggataggataacatgagcgaaaacgaatttcagccccacgccaaacagcttgacgtcgagctggttgacgaaatgagaaaggcatatttggattattccatgtctgtcatcgtgggacgtgcccttcccgacgtgcgtgacggtctcaagccggttcaccgccgtattctctatacaatgtatgaaaacggactgacccccgacaaggcctaccgtaagtgcgccgacaccgtcggttcggtgcttggccgctatcaccctcacggcgacgccagcgtttatgacgcccttgtccgaatggcgcaggatttttcgctgcgatacatgatggtggacggccacggtaacttcggttcggtggacggttatcccgccgcagcatacagatataccgaggcaaagctttccaaaatttccatggaaatgctgcgggacatcgacaaggacacggtggattttcagacaaactatgacgaccgtctcaaggaacccaccgttttgccctcgagaataccgagccttcttgtcaacggttcttcgggtatcgccgtcggtatggccaccgaaattccaccccacaatctcggcgaggtcgtggacggaatgtgctatcttatcgacaaccccgaggctgaggtttccgaccttatggaatacataaagggacccgacttccccaccggcggaattatcatgggctattcgggaattcgcgccgcttatgccaccgggcgcggaaaaatcgtgctccgcggccgtgccgaaatcgaggaaacaagaagcggatattaccgcattgtcataaccgaaattccctataaggtcaacaagcaggagcttgtcaagtcctttatcaaccttatgaaggacaaaaaggttgagggaatcgacgatgtcgtcgactattccggccaggacggcatgaaaatcgtggtcgaccttaaaagggacgcaaatccccaggtcgtgctcaatcagctttattcatacacccagcttcaggtcaccttcggcgccattcttctcgccctcgacaagggccgcccgaaaatcatgaccttaaaggaaatgctgcaaagctatatcgacttccagtgtgaggtcgtcacccgcagaacggcgtttgaccttaaaaaggcgagagaacgcgcccacattttggaggcgctcaaaaccgccattgactttatcgacgaggtcatccgcataatccgcggctccaagaccattcccgattccaaggcggcgctggccgagcggttcggctttgacgacgttcagaccaccgccattgttcagatgcctttgggacgtctcgccggtcttgaaaaaatcaaaatcgaggacgagctcaacgcccttcacgccaagattgccgagcttgagggaattctcggcgacggacacaaaatcagagagatcgtcaaggacgaggcctatgccgtccgcgaccgctatatcgacgaccgccgcaccgaaatcaccatggtttcgggagaggttgacatcgaggacctcattcccaatgaggacagcattctcaccctcacccacaacggctatatcaagaggcttcccgccgacacctaccgtctgcaaaaccgcggcggcaggggtgtttcgggacttgccaaaaaggacgacgattttgccgaatatatgttcacctgcacctctcacgagtatgtgcttttcttctccaacctcggcagggtctaccgtctcaaggcatatcaggtgccagagggcagccgaacctctaaggggcttaacatcgtcaatctcctgcctctgaccgaaaacgaaagcataaccgccatgctgcacgtcccctccatggaggaggagcttaacctttgtatgctgaccaagaagggtattatcaagcgcaccctcctttcggcctacaacacggcgcgcaaaggcggaattatcgccattgacctcgacgaggacgacgagctttgcttcacggcgctgacaagcggttccgacgagctcatcatcgccaccaaaaagggcatggccattcgctttaaggaaaccgacgcccgccttctcggccgaacggcaaggggcgtgcgtgccataaatctctccgacgaaaaggacgacagcgttatcggctgcgccgttgttgaggagggaaaagcccttctcaccgtcaccgaaacgggattcgggcgggtcagcgaatttgacaactaccgtctccagtcgagaggcggaaagggtcttatcaactaccacaccgaaaaattcggcgatgtggccgccgttgcggcaatttcgggcgatgaggacgccattctcatttcggcgggcggaataatcatccgaattcccacggtcagcataagcaaattcgcaagaccttcaaagggcgttcgcgtcatgagaaccgacgaggccgacaaggtggtcacccttgccctcacccctcatgaggaggccgaacaggagccttcggaagagggcgccgagcaggcggaacaggccgacgtgcttcccgacggacaaaacgagcaataatcggatttaacaaaacgggagtaatgaattttgctcccgtttttttgcgaaaaaaaccaccgagagaccggaactctcggtggtgctttttatatattatatatattataatgtaagggactcacagttacatcagattttgggggcaaccgccttttgcagaattatgagtgcgtcggtgacggtggctttgccgtctccgttcatgtcggcaagggcaagctgattatccgaaaacgttatctttcccaccgaatattggagcgtcataagcgcgtcggtaacggttatgctgccgtcggcgtcgacatcgccctgctcatattcgggggtttttaacgctacgcggatgttgtcatagccgataagggcgagggcgccgctcgcaacctcgcttttaaacctcaccgaggtgacatttttaatgtcaaatccaccgtctgattttgttttgtctattttaagggagatttcgctccagccgcccaccgtcggggtgaagccttcaagcccgtcaagctcaagggttccgccgcccgagcaaagctcgacggatttcaggtcgtcggggtcgacgacatagacaaagaatcgaatatcttccgcacttgaaaaatcggcgggagagaaggaatattcggcaacgccctgtcccgcaccggtcatgacgaaataaccgctgcccgagggcgagcccgccgtccaaaagcccgactcaaagccgtcggaaatgtgccagcccgaaatgtcctcgccgtcccacaaaaccttttgctcatacttttcgcccttgcccgagcaaacaagcagcaaatcgaaaagcttgtcataatcggtcacatatttcttttggcctgcaagcagtcggtcgaaatgctttttgaccgccaaaacggcgctgaggtcgtcttttgtcgccttgtccttttcggggagtgcggcaatttcgccgtttacggtgtttatgtcgcggaaaaattcttcctcatcggtgggctgctgctcggttcgaccgaatttgtcggcgtcgacaaggggaaaatcgcttataagatttcgaatattttcggagggctgatattttccgtttgaaaaattctcgaaaattccgttgtcggccgtgtgaacgtttgacgacacgtcgccgtatttttccacccgttcgtcgattttgaaggggtcggagttgtagagcacgttgtttcttatgacgttgcccttgggataacagaattcctcgccgtcctcccaaagctgggcgatttcgggataaaaccgataaagctcgctttcgagaagggctttgtcggcctcggcgtcaaaatcggcgggattgttgccccagattatgccacgcgcgtcggcgtcgcccgaatagggggtagcttcaccgtcgccgcaggaggcaagaatgttgttttcaaagacgttgtcccgtccgccgcctattaaaaatgcgcggtcgcaggacacaaaaatatttccgtaaacgtcaaaggccgagccgccagcggcgcagcgccgccttctgcgagaaggcggcccagaccgtca

SEQ ID NO: 3105 - DNA, 4169 bp, Unknown
  16S sequences of unknown bacteria
atcggttcccgccatattttatggggcaggcctccgcaggcgccaggttccccccggcccgcccccgtttttcaaagcagaaaatctccaatcgccattcagaaaggtcacattccctatggaacagaaaaaagaatataagctctataaaaggcgctgggtcgttctgctgtcctttgtctgcgtcaatgcggtcatgcagtacggctgggccttcttcagctccatcgtcaccgatgcctggcatttttacggcttccaggatgccgccagcggcgaagcggccatcagcgcgctcaccatgatcatcatgggctgcatgatcgttttttccattcccgccagctgggtgttcgaaaaaatcggttggtataaaaccgtttctatcgccggcatcgtattgatggtcttcaccctgctgcgcggcttcatcggcggcagctcctacacggcgctggtcatcaccaccaccggcatcgccgtcacacagcccttcatcatcaatgccttcggcatgatcagtgccctgtggttcccgcccgcggaacgcggcatcgccaatggctggggcatgatctccacctacctgggcgtggtcatggcacagttcggcgttccgtggctcatgtccaccttcggcctggatatccccggcgctttgaaggtcttcggcttcctgtccatccccatgatcctctggttcatcctctttgcccgggaaaaaccgcccacgccgcccgctgatgaggacctaatcgagcgtatcagctttgccgacggcatgaagcagctggccaaaaataaaaagttcatctacgcgctgctggtcttctggctgctgcagggggtatatttcaccctcaccaccctcatggagcccatcctgcaattcttcaatggcggcagcatggatagcctgttcatcggcaccctcggcaccatccttaccatcaccggcgttatcaccaccctggtcctgcccatcgcctccgatcgctccaagagcaaaaagagaaaacccatcgtcctggtctgcgaaattggcacgctggtcggtctggtcctcatcatcaccggccataccgtcggcctgcaaatcctgatggcctgctgtctgggcatcttcctcaccggcgttacccccattgtcatggtcttgggctacgaatccgcctatcccgtctccgagggcaccaccgaaagcctgatgcagctgggcgccaatggctggggcctcatctgcctgctggccgtaaacggcatctttcaggggaaccacatgggcactctggtgttcttcctggccggcaccgtcctttccctggtccttaccatgatgataaaggaagcctccctcaaggaacgccgcatcgaatgaccggctccgccgccccaaatccaatattctctctggctccgccgttcccttcaggaatggcggagccttttcggtctgtcccccgccaaatccccataaaagccgtccccttttcattgacggcccgcctttggtgtggtagaatattaagatagaaaaataggggtattatgccctttccattatttcatctgaaaggtcaggattttgccatgatacgcagtatgaccggctacggacgggatcagcagcttctgcacggccgcagcatcaccgtcgagatccgttccgtcaatcaccgctacttcgagttttcctgccgggccccgcgcggctgcgcctttttggaggatcgcctcaagcgcgccctgcaaagcgccatttcccgcggcaaggtggaagttgccctcaccctgcaaacggtggagagccgcaatacctccgtcgccgtggatcatgcgctggccgggcagtacatcaccgccctgcgggccctgggggaggaatacgccctgccggatgatctcaccctttccaccgtctgccgcctgccggatatctttaccctgtgccgcggtgaggaggatgaggaggagctggccgccgatgttctctcggtgctgcaaaaggcgctggagcagtttgtggccatgcgggaaaccgagggcgagcgccttaaggccgatgtcctttcccggctgctcaccatggaagagcacctctccttcgtggaggagcgctccccccaaacggtggcggaataccgggcccgtctcaccgccaagctcaccgagctcctgaacggcgccgtaccggatgaaaaccgtatccttaccgaagtcggcatcatcgccgaccgcctagcggtggatgaggaaacggtgcggctgcgcagccacttcgcccagctccgcaaaatactggaatccaccgaaccggtgggccgcaagctggactttttggtgcaggagatgaaccgcgagaccaataccatcggcagcaagtgcagcgataccgccattgccggccatgtggtggaaatgaagagcgagctggaaaagatccgcgagcagatccagaacatcgaataagcgaaaggtcgtgtaaaaccccatgaaactcatcaatatcggctttggcaatatggtctcggccaatcgccttattgccatcgtcagcccggaatccgctcccatcaagcgcatcatccaggattcccgcgaccgcggcaccctcatcgatgccacctacggccgccgcacccgcgccgttctcatcaccgatagcgaccatgtcattctttcggccgtccagccggaaacggtggccaaccgtgtagtggattatgaggacgaggaagaaatggagggccaggcatgatcggcagctacaccgctcccaaggagcatggcatcctggtggttttctccgggccctccggcgccggcaagggcaccattctcaagcgctactttgaggacgacccgcccgcggtgctctcagtttcggccaccacccgtgccccccgccccggcgaagtggacggcgtgcattaccacttcatttcccgggcagaatttgagcagctcatcgccaatgatggcgtgctggaatataacatctacaacggcaactactacggctccccccgcggtcccatcgaggaggagctctccaagggtcacgatgtcatcctggagatcgaaaccaacggcgccggccatatccgccgcatgttccccagcgccctttccatctttgtggtgccgccctcctttgaggagctgaaaaagcgtctcatcggtcggggcaccgaatcccccgaggaaatctccgcgcggctggaaaaaggccgggccgagatcgaaatggcgctggattacgattacatcgttgtcaatgatgaagtggaaaccgcggcccgccgcctggcggaaattatccgctccgcccgctggagcaagaaattcaatcaatcatttatacaagaggtgctgaacaatgcttagacccgctatgacccagatcctgaagcccggcgaaagctactataaattcgtggtagcggtcgccaaaaaagcccgtgagatcgccgcggaagcggaggaaaaccacattgcgctggaggaaaagcccgtctctctggcgctggatctctttgccaccggtgcggagcgtctttccgattttgattgttccatgaccgagcgcaaataacccctggttcctctccccctgcaaagccgatttgcaggggcggctttattttgcctgccggcaaggatattcctcggccaatcggcggcccgcgccccagcccccgcgaccccctttacaccaaatttcatctcgcctcaaaggctcccctgtgtaaggggtaacgaagtggcggcgcggtagtgaatgatatgccggtggcatatcagagccgcgccgtgaccgagccgcagcgagaggctgtcagccgcaggctgactgaggggttgacaccaaaaggaaatcgtttcatctcgcctaaaggcgttgcgaagttttataaaaggtattcatttgtacgcctgcccggcatggggttacttttctgtgaagaaaagtaaccaaaagtcattcagggctcctccctaaagacccgatgcgtcggtacaccccgtataatcggggcccccgcaaggtcgtaagaccttgtggggaaaggaggatgcaccgcagcggggagggctgcccggagcaaagcgcagggtcagcccgacttaagcgaaggttgcgtccgacgcgacgacgcttataaggt

SEQ ID NO: 3106 - DNA, 7578 bp, Unknown
  16S sequences of unknown bacteria
agcggcgcccgcgcccgcagctgcccccgagcagcccgaggccaagcgccctgccagctggaagccggtcacggccccgatggtcggcacgttctatgccgcgccgtcgcccgatgcagacccgttcgtcaaagagggcgacaaggtcagcgcgggcgatccgctgtgcatcgtcgaggccatgaagctcatgaacgagattccggcagaggagatgtgcgtcgtgcgcgaggtctgcgtcaacaacgccgacccggtcgagtacggcacggtcatgttctacatcgagcccgttaccgaatagagggcgttgtccatgcttgacaagattctgatcgccaacaggggagagatcgcgctgcgcgtcgtgcgcgccgcccacgagctcggcatcaagaccgtgatggtctactccactgcagacgagaacacgcgcgcggtgcagatgtcggacgagaaggtctgcatcgggcccgcaccgtcttcccagtcgtatctgaacatccctaacatcatcgcggcggcaaagaacaccggcgcccaggccatccaccccggctacgggttcctgtccgagaacgccgactttgcccgcgcctgcgtcgacaacgacctgatcttcatcggcccgtctgccgactgcatcgaccagctcggcaacaaggccgctgccaaggcgaccatgaagaagctcggcgtgcccacggtgcctggctccgacggcccggtcgacaacgtcgaggacgcgcgcgccttcgcgcacgaggtcggctaccccgtcctcatcaaggcctctgccggcggtggcggcaagggcatgcgcgaggcctacaacgacgacgagctcgtcgataacttcaacgccgcgcgcggcgaggcggcagtcgccttcggaaacgacgaggtctacctcgagaagctgctgttgcgccccaagcacgtcgaggtccaggtgctcgccgacgcccatggcaacgccatgcacctgtgcgaacgcgactgctccatccagcgccgtcaccaaaagctcatcgaggaggcgccgtgccccgtgctcgacgaggagactcgccaggccatgggcgaggccgcgctcaaggcggtccgcggcgtcggctaccagaacgcgggtaccatcgagtttttgctcgacaccgacggcaagttctacttcatggagatgaacacacgcgtccaggtcgagcatcccgtgtccgagcagatcacgggcgtcgatatcatcaaagagcagctgctcattgcctcgggagagcccatgagctgcgctggtctcgcgccgctttcgccgaagtgccatgccatcgagttccgcatcaacgcggaagacccggcgcatggcttccgcccgtgccccggcaccatcaccaagttcgacatgccgggcggtccgggcgtgcgcgtcgacacccatctgcgtgccggtgacaagatcccgcccacgtacgactcgctcatggcgaagctcatcgtctggggcgacacgcgcgacgaggccatcgcccgcggcaagcgcgccctatccgagttcgtcatcgagggtgtcgcgaccacgattcccttccaccttgccgtcctcgaaaacgaggcgttcaaggcgggaaaggtctacactgactttatcgaagccgaaatgaacggaggcacgctatgaaggaaactgccgaccagggcatcgagctcgacggcgtgagcatcgcccccggcgtagtcgagaccatcatctcgcttgccgccgcagaagtgccgggcgtctcgggcgtgggcactgccggtgccatctccgccatcgccgccgccttcaacgccggcaaggcaatccccacgacgggcatcaagctcgccaagggcgaagacggcaaactgtccgtcgagatcaccatccaagcgtattacgggtatcgcctgaccgaggtcgccgagaacgtgcgcctcgcgattgcagatgccatcaagggccagaccggcgccgatgtcgcgtctgtcgacgtctacgtcgatggcctttctttcgaggagtaggaaacacgtgtctgcaccgcaacatgagaacaccactgcgcgccgcgaggtgctgcaggttatgtaccaaaacgaactgacggggacgccgcttgccgacctggtcgccgatacgggcgacacggcgcgcctgctcatccccgagcgtcccgatggcgtggccgacaacgacctgatcggggtgccgctcgccgactatgcggcgcagctgctgacgggcatcgtctcgcacctcgacgagatcgactcctggattgccgacacggcggagaactgggctatcgaccgcatgcccatcgtcgaccgcaacatcatcaggatcgccgcctacgagatcgccttctgcgacgacattccgaccggcgtcgctatcaacgaggcggtcgagatcgccaaggccttcggcggcgacgattcccccaagttcgtcaacggggtcttgggcaagatcgcgaagcggctcgatggccaggaggctgccgagcccgcagaagcggatctgtagtggcaggcgactacaacaccttcggagaggttcgggcgcggctcgacgagatagtctccgaggtgcgcaagaaagacctctctcttgagaagagcctcgatctgtacgaggaggccatcaagctcggcaaccgctgcgccgagctcgtggacaagcccgattactccgacgaggaagcccgcgccgcgcaggagatcttgagcggcgacgatgcggggcagcctgacggcacgacgcccgagcagggcgaatcggcgcagggttccgaggattcgggggtgacggatacccatgccgtataagattctcgacaccatcgactcgccggcagacctcaagggcctctcttacgaggaactcgaccagctcgcattcgagctgcgcgcgcagatgatcgccaccacctcccgatgcggtgggcacctcgctccgtctctaggtgcggtcgagatcatcatcgcgctgcaccgcgtgctcgactgccccaaggacaagctcgtcttcgacgtcggccatcaggcctacgcgcacaagctgctgacggggcgaaaagaccagttcgagacgctgcgcacctacgggggcatctccggttttcccaagattaccgaaagcgaatacgactcgcacgactcgggccacgcatccgactcgctgtcgacggcgctcggctacgcctacgcgcgcgacctcgacggaagtgatgcgaaggtcgccgcgctcatcggcgacgcgtcgttcacgggcggtatggcgctcgagggtctcaacaacatcgggcattctcatacgaacatggtcatcgtgctcaacgacaacggcatgtccatctcgcccaacgtgggcgggttcgcaagctatctcgcaaaggcgcgcatgtcggatgcgtacacgacgatgcgcgactctgtcgaggaggcgttcaacacgcgcggtggccgtctgggcagagcacttatggacgccggaaactccgtcaaggagtcgttcaagtctcttgtcttgccgggctcaaagtttctcgaggggttcggcctcacctatatcggcccggtagacgggcatgacatcgccactctggaagacatcctgcacgatgccgtcgagatgaagggccccgtcgtggtacacgccgtcacgaccaagggcaagggctatgctcctgcagagcgccaccccaacgccttccatggcgtggggcccttcgacatcgagacgggcaagatcgcctcgaaaggcggcgacccgagctggacgtcggtcttcggcgacgagctcgtcaagctcggcgcgaagcaccccgaaatcgtcgcgatcaccgcggcaatggcagatggaacgggtctcaagaagttctctgaggcctaccccaagcgcttctgcgatgtcgggatcgccgaggaacacgccgtcaccatggcaagttcgctcgcgctctccggcaaggtgcccttcgtcgcgatctactccacgttcatgcaacgtgcgttcgaccagaccatgatcaacgtcggacttcagcgtgcccatgtcgtcttctgccttgaccgcgcggggcttgtcggggccgacggccccacgcaccacggggcgttcgacctcacgtacatgcgcgcggtccccggcatgaagatcatggtcccggccaacgacctcgagctgcgccaagccatgggctacgccctcgagctcgagggccccgtctgcatccgctactctcgcggctccgcgccggtggcagtggagcagccgcctgcctgggagctcggccgcggcgtcaagctcaaaggcggcgcggacgctgccatcttggccgtcggccgcatggtcccggtcgcgctcgaggcaagcgacaagctcgccgagctcggcctcgacgtcggcgtcttcaacatgcgctgggcaaagcccctcgatggcgaacttgtgcacgaggctgccaagacgggccacatcttcacgctggaggacaacagcgtcgtcggcggcttcgggtccggcgtgctcgagaccctctctgagctcggagagcttgctcgcgtcacgcgcatcggccttcccgacgacttcgtcacgcagggctctgtggcagacctggacaaggcgctcgggctcgatgccgcgggagttgccgcgaccatcggaaaggcgctcggcagatgagccagaagccccgccttgatgagctgctcgtgaggcgtggcttctttcccgatgtccatgccgcgcaggcggccgtgctcgccggcgaggtcatcgtcgacgagcatcgcgagacctccgcaggcaggcgcctgcgcgatgacgtctccattcgcctcaaggtcaagaaggacaaggaccgcctcggcttcgtgagcaggggaggcggcaagctcgcagccgcgctcgaggcgttctcgttcgaccccgcaggcctttcctgcgtcgatctgggcgcatcgacgggcgggttcaccgattgcctgctgcaacatggcgcgcagcgggtgagcgccgtcgacgtcgggacgaaccagttcgactgggggctgcgcaacgacccccgcgtttccgtcttcgagcagaccaacgtcgtcggcatcgacgtcgcggcggtgggcgggccgttcggtctggctgtatccgacctctcgttcatcagcctcacgcgcgtactcgcagacgtcgcgcgcctgctcgtggaagacgggtcgttcatcgcgctcatcaagccccagttcgaagtcgcgaagcgcgatgtgggggagcgtggcatcgtgcgcgaccgcgcgctgcacgcccagtccatcgcaaaggtcctctctgcgtccggcgaggcgggcctcgtgccgcaagggctcacctactcgcccgtgcaggggcgcgacggcaatatcgagtttctgttcctcgcccggcgcctgcctgcgggcagcccgtgggggagtactattgagccgtatcagattgagaaggtcgtcgatgatgcgcatgctgcgctaggaggaaagaagtgaaggtcctgctcgtcccgagcggcaacccgcagaccgtccagtctgccaagctgctcgccgcacgcctcgtgatcgcgggcatcgattccgaggtccaaccgccccagaacacgacggttcccgtcgtggacaagcacgagatagcgctcgtcgtccccatgggcggggacggcacgttcctttccgcggcacgtctcatcgactttgcccccatcccgctgctcgcgttcaactacgggacgctcgcgtttctctcgggcaaccccgagcgcgacgaggtcgagctcgtggccgacgccctttcgggtgatgtgctcttccagcgccgcagcacgatcgacgccgaggtcaccgagctcgacggcaccgtcaagcgcttcaccgcgctcaacgaggtggtgtacgcccgcggcgcgtcggggcgcgtcgtcgagttcagctacggcatcaacggcacgaagatcgcgcacctcaaggcagacggacttgtcctctccacggcaacgggctcgacggggtatgccctgtccgcgggcgggccgattgtctctcccgagtacaaggggctcatcgtcgtccccgtcgcgccccatgcgctcaacacgcgcgcaatcgtgacggcgccttcggacgtgatcgaggcgcagatttccgacccgggccccaacgagacctccctgttcgtggacggtctttctgccgatgtcgtcgagcccgtctcgatcacggcggtccgcgggagccgcgaagtgcagttcgcgctcggcggcggggagttctacgccaatgtctcgcgcgtgttcttcggcggcccggtagaggagtaggtgcgcatgctcgacgaactgcacgtgacaaacatcgcgctcatccaagacgcctcgatatcgttttcgccgggcctcacggtgctcaccggcgagacgggcgcgggcaagactgccttgctctccgccctccagctcatcacgggacgtcgcgccgactcgaaggcggtccgcgacggcgcgagcgagggcatggcagaggcgcgcttcatctcgggcgacgacgagctcgtcgtgaggaggcgcctttcggcggcggggcgcagccgctgcaccatcgacggcgccatggcgacggtggccgagctctccgcgaagacgacgtccatccgcctgcacagccagcacgagcaggtgctgttgctgcagcccgcaacgcagcttgcgtacctcgacagctggatttccgccgagggggagcacctcgtagcgtatcgggcggcccgaaaggcctacctgcaggcacgtgccgcctacgaaaagctcgccagcgccaaagacgccgctgcccaggagctcgagttcatgcgcttcacggcggcggagatcgagaaggtgaacccgcagcagggcgagtacgagcagctcgagtcggagcttccgcgcctgcagcacgcagagcagctcgccgtcgccgtccagacggcgcttgcctccctgcacgacgatggcgcggcgctcgacctgctcgccgagggcgccaatgcgcttgcccgtcaaggcggcatcgatccggagctcgacggtctggcagacaggatggcagatctccaggcagagctcgaggactttgcgcgcgatctgcgcgcctatgccgacactgtgcaatacgacccggggcacctgcaagaggtgctcgaccgcctcgacgagctctctggcataatgaagcgcttcgggccgagcatggagctcgtgttcgaggcgtgggacaaggcgaaggccgccgtgagcagcgcgcaggcatcgcccgagcgcctcgatgccgccaagcgcgcactggatgcggccgaagggaagctcgtcgctgcagcgcaggagctctcgaccgcgcgcaagcaggcggcgccacgcttctgcgcccagcttgccgaagccgtccacgagctttcgatggaaggcgcctcgttcgaattctcgttcgaggagcttcccgaggcgcggtggaccgatgccggttcggaggccgtcgcgctcctgtaccgcc

SEQ ID NO: 3107 - DNA, 3993 bp, Unknown
  16S sequences of unknown bacteria
aattagcccaaacttatacgcctgtggacattgtgtaagacattgagttgcgtaacaccgcagccaatgcagtagtggttgaagcaggaagctccgacttctataagtcggagtagttcacagtaacaattccaataatggcaagctttctggtaataggcacggcctttggcgttctcctcgaaagcaagggctacggctggtggtgggcggctcttatgagcgtaggcatatatgcaggctcaatgcagtttgtaaccataaaccttataacctcaggggcgggcctgctgataacggcggttatgactctgatggttaatctgagacatctgttttacgggattgcaatgcttgaaaaatacaaaaacataggaaaagtcaaaccctacgttatatacgcgctgcccgacgaaacattttcgctggtatgctcgcccgatttgcctgatgatgtggacgagaaaaaatactgcttcctggtgtcgctgtttaatcagatttactgggtgacaggcagcatcataggcgggattataggcagcgccataacctttgacaccgcagggatagattttgcaatgattgcgctgtttacagtaatatttgtggagcagtgggaaaaaacaaagcagcacctgccggcagttaccggacttggtatttcggttatatcacttctcatattcggaccggacagcttcctgatacctgcaatggcaggaattacggcgctgcttctcatagaaaaacgatggataacaaaggaggaaacagatgacagataatatatatgcgctggcagttataggcgttgcatcggtagttacaatagccataaggtttgctccgtttataatcttccgaaaagagccgccggcagccatactgtatcttggcgatgtgctgccctatgcgataatgggcatgcttgtaatatactgcctcaaaggcgtgtcatttacaggcggaagccacggaatacctgagttggcatcgatatttctggtagttgcgctgcacaaatggaagcacaatatgctgatttccatacttgcgggaacagtctgctacatgcttatgatacagtttgttttttaggagggaccatatgactttgacggcgataatagtgacaggctttgcaatagacacagcctttataattacggactatatgaaaaaatacataccggcggtaattctcaaaacgctggcatctctggtgtttgtgtaccttggaatttactgcgcgcagcttgcaggcggcggcacctacgcccacctcataattgcaggccttgcgctgggctgcgcaggtgactttttcctcaatctccgatttgtatcgtcaaaatacgatgaaatgtgtctcaagacaggaacagcattcttctttgcaggtcacgcggtatatattgcggcagccttaatctccggcagcagagtatatatagcggcgcttccaatgtcacttgtgctgtgcttgacgataattacaatattgttaagaaagatagatgtcaaaaaagaacttaaaccccttggcataatctacttcattattatgatttcgacattctcctttgcggcagggcttctgattatgacaggagcaacggaatttacaaagctgcttgcggcgggagctttcatatttatgataagcgatatattatatatacttacccagtttggcaaaatcaaacgcagctggtacaatgccgcaaaccttattacctattacatagcgcaggttatgatagctctgactatagctctttaaaaaattctgccggttttttaaaaaaatatgagtgtaaacagtaaaaggtcaggtataggtatatggaggaaggaaattatgactgatgaaaaactgatagcccttataaagaaaaaaccggagcagggcattgccgcagccattgacctgtacggcggcgcggtcagaaccatatgcagctctgtacttgaaaacagagaggatattgaagaggctgtatcgcaggtgttttataggctgtggaaatatgccggaaactataacggcaaggggtcactcaaaagctatatatacggcatagcgagaaacgcggctcttgacgctgccaaaactgcgcctgtggagtatgaatgggacgatatagatatagaaactcccgaaaatgtttttatgaaaaaacagcaggagcagattatacaccgcagcgtagatgaaatggatgagccggacaggagcattttcattttaaaatatttttgcttcttcaaaaacagggaaattgcagaaaagcttaatatttcgctgaagcaggtcgaaaacaggcttgcaagaaacaaagaaaagctgaaagcgaagctgctggaaaggggtatttaatatgaaaataagtgagaatatcacatatgtgacagaacgtgaagcggaagtgattgaaaacagcgccctcgaaaaggacgccgcagacagaattaagcagaaggccctgcagcttgcgggacttaaaaagaaaactccaagacttagaattgtgtgggtgtgcgcggcagttacagcgctgcttgcctgcggcgtgtttgctgcgcagaccacagggcttgactacagacttgcaggactgtttgaaaacggacagtccgttgatatgggagaagccgttcagaaccttgatgaaagcgttgagacaaacggagtaaagataactgcggtgcaggcaatgggtgacagacactgcgcctatgtgctttacagagttgatattaaagatgcggatatgctggacatgaaggatcttaacaaggtgtactttgataatgtatatgttgaaaccaaaaaacctgtggcaggaggctggtacacagactatatagttgatgacggggcgctttatgccgcagtttccatggactttcgcacagataaggttaacaggggcagctttgatgttacatttaaagacctgtgcagtacggatgatgaagtgctgattagtaaagaatggaaagtgtccattgaccttgactatacgcctgtaagccgcaggatatcgtcaggccgggttataaaagtggcaggcggcagatgcaggctcaaagggattgaaatatcaccgatatcggtaagagctgatttcaccagagggcgcaatgtgattatggagaatatcagcatagatgcagttacacttaaatcaggtgaaaaccttgcagatacaagtgtgtcaggcggaagcagcagcggagcattcggcagagtgtgcagcatgcagtttggcaaggtggttgacattgatgatatagagtctgttacaatcaacggacagacgataaggctgtagctgttggcgggaggtagtataacggcagcggaggcgcttcggatgagccggaatgtatggttatgtttgcaacagaatttgataccgatgagttccttattgctattgtggacagaggaaatgcggtgaaaatggatttcaagtcaatacgctgtaacgatgacggtacggagagtatagacaggtcggaaactttttggctgaacaaaaccggtatctcggcatatctttttgcagtaccgaattcatatgaaagagaacggcggctggtttatacagtttatgacaaggacggaaatgtactggcggaaactgctgataaaatataattttatattagaagaaacacagcttcagataagtgttgctgtgtttttgtttgacacaatacaaataatctgcaccaatttctaagcggtgctaagagttatttgcacttttaacacgccgtgagcaagaaatcccccatttctataagtggtgggatgaattgcgattaacacggcgatttcttgactcctgcatctttctgtactatgatatatttacaatcagtcgtatctaacagacaagtggagctaccgcagatattatcaggcagtacataatgtcacaggggaagaaaaatggcaaacaaagcaattaagtatcg

SEQ ID NO: 3108 - DNA, 14273 bp, Unknown
  16S sequences of unknown bacteria
gaaagttccgttctgcgataaagccgaaatgcggtcgggttcggctttttggatagactttaatatatcgcttacgcccagcgtattttcgttttttacgctctcggcgacaagtttgacctcgctgtcttttcgggacaccgtaaaggtgatctgcgtctctttgggacaggcgatggactgcgaaaaggtatagatctgccgcacgctttcaaaggacatttcgccgccgtactcttttcccgccaaagtgaatttgatattgtattcctcggaattgtcgggcgcctgcaatttgatctcgaacaggtcggaaagttcgcccacgatgccgtccgcgcagtagggatattctttctgcgaataactcgcggtgagggtaaatccgtcctgctcgcaataataaatctccgttcttttttccgaaacgtatttgtccagaccgctgtccgttttgcagccgatgaaggtaaagagcatgagtcccagcaagagtgcgggtacgattttcaataagatttttttgcattttgtcataaaattcggctcctgaatgaattagcggacgccgaacggcgcctcatatcccttattctatttttttactcttccgaaaatgataaattatgaaaattctgttgatttttttgcgcccgtgtggtaaaataacacaaatataattccgacggaagtggttttcggtcattctttttaagaaacgcttgcaaacggaattgttcggagacgtcgatttgggaaaactgattgcaaaaacggcactcataacgttgggcgggctcatcgcgctctgcctgattctgtgggggatattttcgtggctggcgccctccgtcatgctaacgatcacggacggtctgggcttggacgccgcgagcgcgcattacagcgtgtccgtctatcaaaagacggaaaagatcgaagatctgtcgcgcgccgtcgaaaaaaactacgcctgcggaaaatattccgtcagcgcgaagtacggcgaaaaacttttggagcgcgaagatttttccgcgtactgcgaagagcagggcggaaattatcgccagatcgtttcgggtattgcggcggtttcactctacgaaacggacgagggcgacaaggcgctggaacttgccgaaaagaacactgcgggggagtttcaaaaatataattgcctggaacggctgttgaacgccgctatggaaaaggcggacaagccgtacgtggaaaagatccgcgcggcggtcgccgcgatcaaactggattcctccgataccgagggggcggcgcatcgtgacgaagtgcttgccgtatgcgacgcgtttttaaagtaaggttttattttacgtttcagatacagaaaaagaattaaggagattgctatgagtaaaattgtgcaagaagggttgacttttgacgacgtgttgctgataccgtccgcctccgacgtgctgccttcggaagtgaaactgggtacgaaactgacggatgacatttgtctgaatattccgcttttatccgccgcgatggatacggtgacggacagccgccttgcaatcgccatcgccagagagggcggcatgggaattattcataaaaatatgtccattgaggaccaggcgtcgcaggtcgataaagtcaagaggagcgagcacggcgtcattaccgatcctttctttttagagcctgaaaatctcgtgaaagaggcggtcgggctgatgagcaaatacaagatcagcggcgttcccatcaccaaaaacggcaaactggtcggtattctcacgaaccgcgatctccgtttcgaaagcaattacgaacagcctatcgacaatgtgatgaccaaaaacaatctcgtcaccgcgcccgaaggcacttccctcgccgaggcgcagaagatcttaggcaaacacaggatcgaaaaacttcccatcgtagataaagacgggtatctgaaagggctcatcaccatcaaggatatcgagaagagcatacagtatcccaattccgcgagagataaaaacggccgcctgctcgtaggcgcggcagtcggcaccgcctcgaataccatggagcgcatcgaggcgctcatcgccgcaaaagtggacgtcatcgccatcgacacggcgcacggtcacagcaaatacgtcatcgattatgtaaaaaagatcaaggcgaaattcccgcagatcaccctgatcgcgggcaacgtcgcgaccgcagaggcgacgcgcgcgctcatcgaagcgggtgccgatgtcgtgaaggtgggtatcggccccggttccatctgcaccacgcgcgtggtcgcgggtatcggtatgcctcagttgaccgccgtaatgaactgtgcggaagaggccgataaactcggcaaacgtatcattgcggacggcggcatcaagtacagcggagatatcgtcaaagcgctcggcgcgggcgcgtccgccgtaatgatcggcagtttgtttgcgggtacgctcgaaagccccggtgatatcgagatctaccagggcagaagtttcaaagtatacaggggcatgggctccctcggcgccatggccgcgggcagcaaggacagatatttccaggaaaacgcgcagaaattcgtccccgagggcgtggaaggcagggtgccttaccgcggcagtttggcggagatcgtctttcagatgctcggcggcttaaaatcgggcatgggatattgcggaatgcatacggtcgaagaattgcgcaagaacgcgcggttcgtcaagatcacgagtgcaagcctgatcgaaagccacccgcacgatatttcgatcaccaaagaatcgcccaattacagcccccgcggtctgtaaggtttataaattttacacttaaaatgtaccgcaatctttgcggtacattcttctatgaaaacggagacaacgtatggaacatcaaaaaatactcatcctcgatttcggcggacaatacaaccaactcatcgcgcgccgcgtgcgcgaacaaaacgtctactgcgaccttttgccctacgatatgaccgtggaaaagattcgggaatacgatccgatcggcatcattttcacgggcgggcccaacagcgtgtatgccgataacgcgcccaacgtaaaaaaggaaattttcgatttaggtattcccgtgctcgggatctgctacggctgccagcttatcgcgtataaattgggcggcgtggtcacgcacgccaatacacgcgaatacggcaagagcgagatcgaatacgaagagagtcctctctttgacggcgtggataaaaacaacgtctgctggatgagccataccgattacgtgagcaaagtgcccgaaggcttttcggtaacggcaaccacgaaaacctgtcccgccgcgggatttgccgacgaaaaaagaaaaatatacgggatccagttccataccgaggtgcatcacaccagacagggcgaacggatattgcataattttctctattcggtctgcggcgcgaaaggggattggacgatgtccaatttcgtttccgaacaggttgcgaatttgcgcgagaagatcggagataaaaaagttttatgcgccatgagcggcggcgtggacagcgcagtcgcggcaacgctcgtgcacaaagcggtgggcgatcggctcgtgtgcgtgttcgtcgaccacggtcttttgcgcaagggggaggcggacgaggtcgtttccattttccgcgacggacttggaatgaatttgattaaatcggacgcgggcgaacgttttttgaataaacttaaaggcgtgagcgatcccgaaaagaagcgcaagatcatcggcgaagaatttatcaaagtattcgaaggcgaggcaaaggcgatcggcgccgtggatttcttggtgcagggaacgatttatcccgacgtcatcgagagcggcaagggcgcttccgcggtcatcaagagtcaccacaacgtgggaggtctgccctccgtcgtagatttcaaagagattttggaaccgctccgcgacctttttaaggacgaagtgcggaaagtgggttccgaactcggactgcccgattccgtcgtgcagcgccagccgttccccgggccgggactcgccgtgcgtattatgggagaagtcacccccgaacggctgaaaaccttgcaggacgccgattacattttgcgcgaggagatcgcccgcgcagggcttgaaagagagatttggcagtattttgcggtcatcacctcgaccgcgaccgtcggcgtcatgggcgattcgagaacgtatgaaaacgtgatcgccctgcgtgcggtgacgagcgtggacgccatgacggcggactgggcacgtattccgtacgacgttctggaaaaaatcagtacccgcatcgtcaacgaagtcgagcatgcgaaccgcattgtctacgacatcaccagcaaaccgcccgccaccatcgaatgggaataaagatggaaaatataatgggcaaagtttatgattttttgcaaaaatgcggtgttttctatgtcttgacgttgaatggcggacgtcctgagggcagaccgtttggtgcggtcatggaggcatatggtaaattgtttttttcgacagccaaaacaaaacaagtttataaacaattgacgcataatcctattatacaaataatcgctctaaaaccgaatacaagggagtggatccgaatcaatggggaagcgattgaatgtgaagatattattctgaaagaaaaaatgttgacagagtgtccctttttgaaaaaaagatttaatagcgcttgttgtgaattttttgcgttgtttgaagtttctttgcaagatgcttatataaatatcgataatgaatttgttaaaatcaatgaataaaaaactggttttatattttttattcataaaacaccgcatgaatatgcataaatataaatattatacaaaataatgtaaataaatttgtatattttcaaaaacaggcggtgcaatcgcttgacttatgacggggcagattgtataataatgctactatcacaaagaaggtaacgaacatggaaaagaaagagatcaaaaaagtagttctggcgtattcgggcggattggatacgtccatcatcattccgtggctcaaagaaaattataacaactgcgaagtgatcgccgtttccgccgacgtagggcaggagagcgaattggaaggactcgaagaaaaagcgatcaagacgggcgcttccaaactgtatatcgaagatctgcgcaaagagttcatcgaagactatatttatcccacgatgaaagcgggcgcgatctacgaaaacaaatatcttttggggacttcgttcgcgcgtcccgtcatcgcaaagcgtatcgtagagatcgccaaaaaagagggtgcggacgcgatctgccacggctgcacgggcaagggcaacgatcaggtgcgtttcgagttgaccatcaaggcgttcgcgcccgaaatgaccatcatcgcgccttggagaacgtggaacatcaagagccgcgacgaggagatcgactacgccgaggcgcacaatattcccttgaagattacgagggagaccaactattccaaggataaaaacctgtggcacctctcgcacgagggcatggatctggaagatcccgccaacgagcccaaatacgacgaaattctggaactcggcgtatcgcccgagaaggcgcccgatcaggcgacctatgtgaccgttacttttgaaaagggcgttcccgtcaaggtagacggacaaaaactttcttccgtagagatcatcgaaaaactcaacaagatcggcggcgcgaacggcgtcggcatctgcgacatggtggaaaaccgccttgtcggcatgaagagccgcggcgtgtacgaaacgcccggcggcacgatactctataccgcgcatgaaattctggaaagcatttgcctggataaggatacccagcatttcaaacagcacgttgcgatcaagtttgccgacctcgtttataacggacagtggttcacgcctctgcgcgaggctctctccgcgttcgtggacaagacgcaggaaacggtgagcggcgaagtcaagttaaagatttacaagggcaacgtgatgaatgcgggcgtcaggagcgaacattcgctgtacagcgaggacatcgcgacgttcggagaggacgacgtgtacgatcagtacgattcgcagggattcatcaatctgtacggtctgcccatcaaagtgaaagcgcttttggatcagaaaaaattgaaataaagtaaaaatttgcggcatttgtctttgcaggtgccgcaatttgcggaaaaatgcgggaggattgtatgtacagcgtatttatcgacgggaaagagggcacgacgggtttacagatctatgagcggctgggtaagcgttcggatctgagactgatcacgctttccgaagaactccgcaaggacgccgcctcgcgcaaagaatgtataaattccgcggatatcgtctttctgtgcctgcccgacgcggctgcgagggaggctgtaacgcttgcggaaagcgggcgcgtccgcatcatcgacgcctcgaccgcgcatagaacttcgcccgattgggcgtacggttttcccgaactttccgaggcgcaccgcgaaaagatcgtttcctcgaaacgcgtagccgttccgggctgccatgcgagcgggttcatttcgctcgtgtatcccctgatcgcgggcggattggtttcccccgattatcccttcgtgtgccattcggtaacgggatacagcggcgggggaaagaagatgatcgcgcagtacgagagcgagccgcgcgatacgcgtctggatagcccgcggcaatacgctttggggctttctcacaaacaccttcccgaaatgacggctgtatgcgggctttcgcataagccgatattcaatccgatcgtcgccgactattacagcggcatgtgtgtaaccgtgccgctttatacggatttaatgactaaaaaaatgagcgttgagcagataaaaacgtattttgcagagtactatgcgagacgtaatttcatcaaagtgatcgaaaaagaaacgttggacggaggctttttgtccgccaacgacctgtgcggcacaaaccgcatggaaatatacgtggacggcaacgacgaacagatcttgctcgcgtcccgattcgacaatctcggcaagggcgcttccggcgcggcggtgcagtgtatgaatctgatgctggggctggacgaaaccacgtctttgaccgaataagttgcaaaaatttccgcggaggacattatgaaaaaaatcagcggcggcgtgtgcgcgcccgcgggctttcgtgccaacggcgtgcattgcggcatccggaaaaataaaaccaagcgcgacctgtctttgatcgtaagcgaaaaaagagcgagcgcggcgtgcgtgtataccacgaatcttgtcaagggcgcgcccatcattgttacgaaatcgcacgtcgcggacggctatgcgcaggcgatcgtctgcaacagcggcaacgcgaacacctgcaatgccgacggcgtggagatcgccgaggcgatgtgcgctctcgtcgaaaagaacacgggcatcgcggcgtcggacgtagtggtcgcgtccacgggcgtcatcggacagccgctttccgtcgagccgatggctgagggtatgcccgcgctcgctgcgggcctgagcgaagagaacggcaatctcgcggcgcagggcattatgacgacggataccgtagccaaagagatcgctttttcctttgacctcggaggcgcggaatgtcatatcggcgcaatcggcaagggcgtcggcatgatcaatcccaatatggcgactatgctgattttcgttactacggacgcggcgatctcgcccgccatgctgcaaaaggcgctctccgctgacgtgaaagataccttcaatatggtcagcgtggacggcgatacttccaccaacgacatggtgtgcgtgcttgccaacgggcttgcgggcaatcccgaaatcaccgagacaggcaaagattttaacgccttccgccgcgcgctcaataaagtgacgacctatttgtgtcgctgcatcgccaaggacggcgagggggcgaccaaacttctcgaatgcaaagtgacgggcgcaaaaaccaaaaacgccgccaaacttgttgcgaaatcggtgataaagtccagcctgtttaaggccgccatgttcggcgcggacgccaactgggggcgggtgttgtgcgccgtcggctattcgggcgcggacgtggacgtttccaaagtggacgtttccttcaagagccgtttcgggcgcattgacgtatgcaaaaacggcagcgggatcgagttttccgaagaggaagccaaaaaagttctcggtgcggacgaaatacagattttaatagaactcaacgacaaaagcggaaaggcgaccgcctggggctgcgacctcacgtacgattacgtgaagatcaacggggattaccgcacataaaagaggaaaaaaatggataacaaattcaacgacaaacaatttcgggcgcacgtgctcgcggaagccctcccgtatattcaggactatacccataaggtcatcgtcgtgaaatacggcggcaacgccatgatcaacgacgaactgaaaaattccgtcatgcgcgacatcgtgcttttgaacctgatcggcgtcaaagtcgtgctggtgcacgggggcggtcccgaaatttccgaaatgctcaaaaaggtgggcaaggaatcggtatttatcgacggactgcgctataccgacgaagaaaccgtggagatcgtgcggatggtgctggcgggcaagatcaataaatctctcgtcaacctcatcgagcgcatcggcggcaaagccatcggactttgcggcatcgacgggcatatgctcaaatgcgaaacggcggatccgaaactcggctacgtcggaaaaattaccgaagtggataccaaaatcataaccgacagtctggatgccggttatattcccattgtttctaccgtcggctacgacgacgaaggccatatttataacgtgaacgcggatacggccgccgccgctctggcgggtgctttgggggcggaaagcctgattctcatgaccgacaccaaaggcgttctgcgcgacaaggacgacgagtccagcctgatcgaaaaaatttacgtgagcgatattccctcgctcgtgaaacagggcgtgatctcgggcggcatgatccccaagatcgagtgctgcaaagaggcgatccgccgcggcgtgcataaagtgtttattatcgacggacgggtgtcccattccattttggttgaaattttgtcggacagcggtatcggcaccatgtttatcaacgaagactgatttgacgatcagtcttttttttcggcgccgcagccgggcggaaatttgttagacgaaacgcatttcaaatatttgattaaagagcgcttttatgatagaatagataaaataggtgtattatggattttcaggatttacagcatctcgacaagcaatttatcgccaatacgtacaaccgttttcagacggacatcgcagcggggaacggggcgaaactcgtttcctccgcgggaaaagagtatatcgattttgccagcggcattgccgtcaataccttcggcgtcaacgacgaggcgtggaaacaggctgtcatcggacaactgaataaggtacagcacgcctgcaatctctattatacggaaccgcaggcgaaactcgcgcaacttttatgcgaaaagacgggcgcaaaaaaagttttcttttccaattcgggcgccgaggcgaacgaatgcgcaatcaaagcggcgagaaagtattccgaggataaatacggcgcgggcagatacgagatcgtcacgctgaaaaattcctttcacggcaggacgctcgccacgctttccgcgacgggacaggacgccatgcacaaacatttcgcgcctttcgttgcgggattttcttacgccgatcccacttacgaaggcgtgcgcgcaatgtgttccaagcgcacctgcgccgtcatgatggaactcgtacagggcgagagcggcgtcaacgttctggatatcgaggaggtcgaaaagatcgcgctcttctgtaaaaagaacgacatccttctcatcatcgacgaagtgcagacgggcaacggcagaacgggccgcctgtacgcgtacgaacactataaaataaaacccgacgtcgtgacgaccgcaaagggacttgctggcggactgccgctcggcgccaccatgtttttcggcaagacggaaaacgtctttacttacggcgaccacggctccacgttcggcggcaatcccgtcgcctgcgcgggcgcgctcagcatcctttcccgtatcgatcaggatcttttattcgaggtgcagggaaagagcgcgtatcttttcacccatctgggacgcatcagaaatgttttgaaagtgacggggctgggattgatgatcgggcttgaaacgaacaaggacgcgaaagcgctcgccgcggcgtgtttggagagggggctcatcgtcctcaccgcgaaaaacaaactgcgcttgctgccgccgctcaatattaaaaaagacgaattggactgcggattaaaaattttgaacgaggtgatttccgaatgaaacatttactgaaactaaaggatctgacgagcgacgagatcttcggcattctcaatcttgccgatcaactcaaatacgagcgcaaaaacaatgtcaaacatccctatctcgaagggaaaaaactgggcatgatatttcagaaatcatccacgaggacgcgcgtcagtttcgaagtgggtatgtacgaactgggcggctacgcgctgtttctttccgaccgcgatctgcagatcggcagaggcgagcccatcaaggataccatccgcgtgctttcgcgctatctcgacggtatcatgatccgcacttttgcgcaaaaagacgtggaagatctggcaaagtacggttccattcccatcatcaacgggctcaccgattactgccatccatgccaggtgctcgcagacctcatgaccatccgcgaatacaagggcagtttcaaggggctcaaaatgtgttttgtgggcgacgggaacaatatggcgaattcactgatcgtcggctgcatcaagacgggcatggagatcgcgatcgcctgtcccgacgactaccgccccgacgcggatctcatctgttgggctagggaaaacggcaagatcaccgtgacctccgatttaaaggcggccgcggagggggcggacgtgttgtacacggacgtatgggcgtccatggggcaggaaggagaaaaggcggcgcgcgaaaaaatattccgcggctattgcatcgacgatacgctcatgaaacttgcggaaaaggatgctatggtgctgcactgtctccccgcgcacagaggggaagagatcacggaagaagtattcgaggcgcacgccgatgaaattttcgacgaggcggaaaacagactgcacgcgcagaaagccgtgctctgcaaattgctgaaataaattcgatataaggaagtcatcaatgaaggaagaaaaagtttatttgacgttacaaaacggacgggtgttcgaagggaaacgcttcggagccaagggcgacgtggtcggggaactggtattcacgacgggcatgacgggatatatcgaaacgctgaccgatcccagttattacgggcagatcgtcattcagacgtttccgctcatcgggaattacggcgtgatcagcaaggacagggagagcaaaaagccgtatctcaccgcctacgtggtgcgtgagcattgcgggcagccctccaatttccgctgcgaagaaaaactcgacgagtttctgacccgaaacaacgtggtgggcgtgtacggcgtagacacgcgcgaactcactaaaacggtgcgcgaggcgggcgtcatgaacgcggtcatctcttcccgccccgtaacggatctcggcgaagtgcagaaatacgccatacgcgacgcggtgaagacctgctcccgtcagggcatcaaatattacggggaggagagcgcgaaacggcgcgtcgtgctttgggatttcggcgcaaaggaaaatatcgtgcgcgaactcgtgcggcgcgataattacgtcatccgcgtttcgtccgataccaccgccgaagagattctggctttgagacccgacggcgtaatgctgacgaacggccccggcgatcctgcggaaaatacggagatcattcgggaaattcaaaaacttgcgggtaaaattcccgtgttcggaatttgtttaggacatcaactttttgcgctcgctatgggcggcaaaacgcgcaaaatgaagtacggccaccgcggcgccaatcagcccgtcaaggaactgagaacgggcacggtgtacatttccagccagaaccacggctacgaagtgatcgccgaatccatacagggcaaaggcgatctgagttttatcaacgtaaacgacaatacctgcgaggggatagagtaccccgatctgaacgcgttcaccgtgcagtttcatcccgaagcgtgcgcgggacctttggacgcctcggacttgtttgataaatttatgaatgtgatggacggaggaaaaatcaatgcctaaaagaagcgatataaagaaagttctggtcatcggctccggccccatcgttatcggacaagccgcggaattcgactatgcgggcgcgcaggcgtgccgcgtgctcaaagacgcgggcgtgaacgttgtgctttgcaactccaaccccgcgactatcatgacggacaaggcgctcgccgacgaaatttacctcgaacctctgacgctcgaatccatcaagcgcatcatcatcaaggagcggcccgacagcattctcgcctcattgggcggacagacgggactgaccatcggctgtcagttggcgaaggaaggctttctggacgagtggggcgtcaaactcatcggaacgaaagtggacgcgatcgaccgcgccgaggacagggaattgttcaaagagaccatgcagaagatcggccagccctgcgttccctcggatatcgcgtacacagttgaagaatgtcttgcggtcgcggataagatcggctatcccgtcatcgtccgtcccgcgttcacgctcggcggcgcgggcggcggcgtggcgtacaacgaggaagaactccgcagtatttcgcacaacgggctgatgctttcgccgatcacgcaggttcttgtcgaaaagtatatttacggctggaaggaaatcgagttcgaggtgctgcgcgacagccacggcaacgtgctcaccgtctgttcgatggaaaattttgatcccgtgggcatccacacgggcgactccatcgtcatcgcgcctgcggtcactctttcggataaagaatatcagatgctccgcagcgcgtctttgaagatcatcaccgaactgaagatcgagggcggctgcaactgccagttcgcgctcaatcccgattctttcgaatattccgtcatcgaagtcaatccccgcgtgtcgcgctcttccgcgctcgcaagtaaggcgacgggctatcccatcgcgaaagtggcgaccaagatcgcgctcggctacacgctcgacgagatcaaaaacgatgtgacgggcaagacgtacgcctgtttcgaacccgccatcgactacgtggtcgtcaaacttcccaaatggccgttcgataaattcttatacgccaagcgcgagttgggcacccgcatgaaggcgacgggcgaagtgatgtccatcggcacgagtttcgaaatggcgatcatgaaggccgtgcgcggcgcggaaatttctctttcgtcgctcaatctcaataaatacgcgggcaaaaatatccgcgaggaactttccaaactttccgacgagcgtctgtttaccgtattcgaagcgctcaaacagggcgtttcggtggacgagattttcgacatcacaaaaatcgaccgctggttcctccataaactgaaaaatctggtcgattacgaaaagcggctcaaaaccgaaaaactcacgcgcgcgttatacgacgagggcaagttgttggggtatcccgatcaggaacttgaaaaactgtccgggcagaaaattccttatcaccgccgcgccgtctataaaatggtggatacctgcgccgcagaattcgccgcaggtatccaccattttatacacggcgaattctgcggcgcagg

SEQ ID NO: 3109 - DNA, 17451 bp, Unknown
  16S sequences of unknown bacteria
aaaaatacagctgctatttcgatatttttccttttttcggtcttgcttgcacgcataaaacctgctctggcttaattgccacagcaggtttttcgacaagctgaggcggacccgccggggcgcttttttatgccaatcactcgaggtcgtacagatagagcagcaggtcctcgtcgtacatgttgtagatgtccacatagaccgcgtccaccttggcgggcaggtcgcttgtcccgcccaccgcgcggcgcagggcggcctccaccccggcgtagccgtaggcgtacgcgctgcgcaccaccgtaaagcgcaccagcccgtcgcgcaggcccagggcgatgccgtcgtcaaagtccgcgccgacgatcggcgtctgcaggccgagggcgcgcaccgcgcgcagcgcgccgcgtgtcgccgcctgcgtccggcacacgatgccctcgatgcgcgaatcccgcgcgagcagttccaggcagtaggcaaaggccgcttcctcgctgtccacagtcaggcgctcggcgacgaggcttccctggttgccgagctcgccgcgcagcgcgacctcccaatcgtcctgggcgtaggactcggcgctggtcagcagcagaaagcgccgctgcaggccgatcttctgggcgatgagctggcccgtgcgcctgccgatggtcgtctcctcgcccgcgatgccgcccgatgcgccctcgatttcgcagcccagggccacgagcgggacctcgctgcgcagggcggcctccccctgcgcgccatccagcgccacggccgcaagatccgcctcgcccgcggcgggtagctggccggcaaggtccgattccccgtccaggagccgcacctcgatctcccagcccgcgtcctgcgccgcaaggcgcgcgccggagagcaggttctcccagtagaagccctcgtcgtcctgcgcgaggagcacgaggcgctgcgcgcccgccccggcggcgcagccgggcagcgagagcagcaggaggagcaccagggtcaggccgagcgccggacgggcaaggcgatgcgcacgcatgtgtattcctccatttcgctgtcgatggtgatgccccattcctctccgcagagcaggcggatgcggcggttgacgctcttgagggcaaggccgctgatctcgtccgggtgcgggggctggctctcgcgcagggcctgctgcacgctgcggagcttgtcgggcaggatgcccatgccgtcgtcccgcacggtcatgacgagggattccccctccaggaagacgcgcacctcgatggtgcagcccgtgttgtcgccgatgccgtgcttgatcgcgttctccacgaggggctgcaggatcagccgggggcagagcaggtcctcggccgcgcgctcgacgtggatgcggctggaaaagcgctggccgtagcgcgtgcgctggatgagcaggtagctttcgacgtgttcgacctcgcggcgcacggcgtggaagttgccgccgcggttgatggacaggcgcaggagcttggccagcgcgccgaccatctgcaccgcgtccgcgccgcgctgcgtctcgatcagccaggtgatggagtccagcgcgttgtagaggaagtgcgggttgatctgctcctccagggcggcgatctccatttggcgcagctggtcctggttgtccttcgtctcccgcatcaggcgctcgatctggtcgatcatggcgttgtaggcgttggagagctgggcgaactccttgcagcccgcaaggcgcagccgcggcccgggaaagcccgcgcccgcgccggccatggtgcgctccatcgcgcggaagggccgcgccacatacgccgacagggcgaaggccatcgtcagcgcgagcaggagcgaaagccccagcaccagcaggccccggcgctgcatgtcctgccggctggccgccagctgcgactccgccatccggcaggtgaggacgtactgcccgccctccaggggctgggagatctcgatctgccgctcatccgccgagcgcgcgcccacgcccgcgtacacggccgagaccgcgcgcaggttctgcgccttggcgtgcggggagtagaccgtttggcccgcggagtccgcgagggtgaaggttcccgcctccccgccggagaacgcgtcgcagatgtccgccagggccgaaaggcgcaggttcaccgcgaggatgccctgctcatacccgcccggcacgcggtagacgcaggggcccgccagcgtcacgacccaggtgtagcgcccgcggtagcagtgctccaggcgcgcgccgctgaaggcgcagccctcgcccgcgagcgccgcctgaaaccaggcctcctcctgcgggttttggctggagaggaagccctcgctctggtccgaggccgcgaccgcggtgcccatgcgcttgtagaggaggatggagctcaggtccccctccacgtccagcaggggctcgaccgcggcggagaagccgcccggggcaaagtcctcccgcagcaggaccgaatcctgcacatagtcccacaggtcctgcgcgccgagcagcacctcgtccaggcggtccttggcgcgggccaggttctggttgatgagcctaaggtccagctgggagaagacctcgcccgtcatgttgccgtagacggcgttgaacagcagcatcgtgcacagcgtcacggcgaccatcatcacaagcagcatcgtcctaaggctgatcctgcgcacgcgcatccgccccctgccggtagttcttgggcgtcaccccgcagcgctgcttgaagcagtagctgaagtagcccgggtcctcaaaccctgtctccagggcgatctcgtagatcttcttttcggagtcgcgcagcagcgcctttgcgcgctcgatgcgcttatccagcacgtattgcaggaacgaggtgcccatctcccgcttgaagacgagggagagctgcgtctgggagatgcggaaggcctcgcacacgtccgagatggagagcgagggctccgcgtagtgcgcgtcgatgtagccggcgatgcgctgggcaaaggcgcggttgtccacgcggccgcgctcggcgatgcggcgcgcggtctcctgcgcggcgctgcacagggcgcgcagggcggaggcggtctccaggggcagaaccaggcggtgcgcctcgagcacgggcaggatctcctcggcggagatgcccgcgcgcagcgccgtggtcaaaatcgccgtgtgcaccatggaggacagggccagcagcagcgcgggactcgcgcggcgggcgaggtcctcgcgcatccgggcgaagtaggcctcgatgcgcgcctcgtcccccgcgcgcaggagctgggcgacctcgcccggcaggcccgcggccagcatcccctcggcgctgggcgcctcctcctccgccaggagaaagagcccgtccgccgcggcggccttgtcctccaggagcaggagcgcgcgctggtagagcgcgggaaggtcggccggggcctgcgccggctcggtcagcaccgccttggtcgagagcttgaggtacatgcgcaccgtgtccatgatctccgagagcagggagacggcttgctcctgcccgcagtgcagcagcagaacgaaccgccccctgtggcagacgcaggagcccgcggcaagctcgcccagccgctcctgcgcgatctcctgcagggaaaagcgcagaaggtccatgcgcccggcaaagtcccggcgcagcacctgctcgttttccggcgtgcgcccgagggcgaccagcgccaagtgcgcggggaaggaggtttcatcctccgccgcgtcgcgcagcaggccgagggattcgttcgtgttctcaaagagcatctccagcaggcgcaggcggccgatctgcacgcggtcctgccgctgctgctccaggaacgcggcctcgtccaggcggcgggcaaaggccgcgtccagcgaggcgcggatgcgggcgagcgcctcgcgcacgcccgtcagcgacaggggcttgagcaggtagtccatgacgcggaactgcatcgcccgctgcgcataggcaaagtcgtcgtgcccgctgacgacgacaaagcgcatcgccgggtacatctgctgcaggcgctcgatcaattccagcccgtccatgtagggcatgcagatatccgtcatcaccacgtccggcacgaggtccctggccatctccagcgcctccagcgcgccggccgcgcacccgcagagcgaaaacccgcaggcctcccagtccacggtccgcgcgatgctctcgcgcacgtccacctcgtcgtccaccaacaggatcttgtattgcgccacggggcgcacctcctttgcgtctttgcgtcgggcgcggcccgctcagagatagcgctcgatgcaggaagcgacctggcgcgcgcaggcccggtacccctcttccgtcaggtgcaggccgtccgcgcacttgtagaggccgggcgcctccaggcagagggcgtagaggtcgttgaccggcacgttttccgcgcgcatgacctccagcgccgcggcgttgtacgcctccacccactcgctctggtagcgcagggccgcgcccgtgccggtgttgtcctgcgcgcccccggcgcggggcacgggcagggtcgtggcgaagatcacctgcgcgccgcaggagcggcaaaggcccaagatgcggcggaggaagtgctggtactccgggatggggtggatgggctcgcgcatgggggactcgatgttcatgtcccagtagccgttgttccagtggaccacgtccaccggcccgtgcgcgcgcaggagctggttcgcctgccagagcgtataggcggcaaagcggccgttgtcctccgggtcgtagagcacctccgcgcggccggccagcaggccgcgcaccatgtcgtcgtagcccatgcggatggaatcgccgagaagcagcgcctttttcatggttttcgtctccttttttctcgcccagtcgggggagggaatctctttttcagtgtacaacgcggaggcggcggggtcaagcgccgggcggccgcgctttttttcgcgcggggggaaagaggggcattccgtttttgcaccgttcgtgctatactgagggcgtcccacgttttgaacttcgcatccggagaaaggagaattgcgatgccgttttcctttgcacaggccacgcccgagagcgtcggcattccctccgacgcgatcctgcgctacgcggacgcgctggaggacctcgcgctgagcctgcactcgctcaccgtcatccgccgcggcgcggtcgtcttcgacgggcagtacagccccatgaccagcggccagccgcacaggctctactcctgctccaagtccttcgtctccctggccgtgggcatcctctgcggcgaagggcggctgcgcctctccgaccgcgtggcggacttcttccccgagtacgacaaggcgaagatgcaccccttcctgcgggagaccacggtggaggacctgctgcgcatgaccgactgccacgacgagaccacctacaacatggacaaggccgagccggacatggactgggtccgcacctattttgagacgccgcccacccaccgcgcgggcacggtcttccagtacaacacggcctgcacggtcatgctctcggtgatcgtcgagcggatcacgggcgcctcgttcctggagacgctccggccccgcgtgttcgagcccatgggcatgacgaaggacatccagtgcgtgcgcacgccctgcggccacgcctggggcggcagcggcgtgctggccagcgcgcaggacctggccaagatggcctacctctgcatgcgcgggggcgagatcgacgggcagcagctcctgccgagggagtacgtgcgccgcgccacctcccgccaggtggacaacgccctcttcagcgacgacgcggagcaccgcgcgggctatggctaccagatctggcgcatccggcacaacggctttgcgttcctgggcatgggcagccagcaggccttctgcttcccggacgaggacctgctcgtcgtgctcacgggcgacacgcaggacgtgcccgccgccgcgcaaaacgagctgacgctgctcttttccacggtcttccccgcgctctccaaggaccccctgcccgaggacccggaggcgctgcgccgcctcgccgcgcggcgcgagagcctgacgctctacgcggagaccggcggcggctactcgccctatggccagcggatgagcgggcgcaccttccgcttccccgaaaacgccctgggctggaagtgggcgcgcttcgacttcgacggggacgaggggtccctcgcctacgagaacgccacgggcccccaccgcgtcgccttcgcctacggccgcaacgttgggcaggcgtttgacgaaacttcctattatgccatggacatcgggcacccggcctatcggcccctgcacgcctttgccagcgccgggtggaaggacccgcacacgctcctgctccggctgtgcatcgcggacgtctgcttcggcacgctccggctctgcttcgtcttcgacgggcaggagctgaccgtcgccggccgcaagaatgcggagtggttcttccgcgagtaccagggcttcgccaccggccgggcggaccccgccaccggccaggcggaccccgccacgggccgggcggaccccgcctagagggggaagtccgcgaggcggtcgacgttctcctgcgcgtactcgatctccttggagagcaggcgcagcgcctcctgcgggctttggaaggccccgcgcgccagcagcgcgcgcgccgcgcagacgaacaggacgagcaggcgcgccttgcccagcgcgtcgccgtcgtaggcgcacttgaggaaccagcggaagagcaggtagaccgccgcgtgctccagaacccagtccgggcagggcacggcgtccccgcgcgcggcgaggcggcgcgtccagtccgcgtcgatgggcgcaaggctcgcaaggagggggaggagctccgcctccccgggcaggcgctccgcctcgggcgggcagtccgccggggcaaacccgtccagctcgtcctgcagggcccgcgccgcggccagaactcgccgcagccgggcgtccagggggagcgcgcggtcctgcaggaccgcgcacagcgagcgccgcgccgagacgaggcgggagagcagcgcctcctcacagggaggctcctccgcaggcgcgtcgtcctcggagacgagaaaggtcaggggcgcggggtcctgcgagagcaggcggcacgcctcctcgcagcacaggcccacgcccgtctcccgccaggcgccgaaccactcggtaaagcgcgggtgctcccggcagatctcgcacagggcctcggggcccagtgcccgctgcacggcgcagaggttgtcctcgtccagcagcgcgcagcggccgcggccgtccagcgcaaagtgcgcgccgtccgcgtccgccacaaggccccggcgcaggcgctcgccgagcgggcccgggacctgggcgtagcggcggcgggacgcagggtccacgtcgatctcccagccgatgcagcagttgtccgcgcaggccccggccgtgcagcgaaagtcatcgaaaaaccgcggtttgcaaaccctcatgttcccaaatcccctttgcagattccctctgctataaattgtacccccttcccgcgcggcgcgcaagcgcgcggagggaagggcgtgaaaaagaaaaaggaggccgttttcatgattcgccaatccgctttcaccggcagcgcgccgctcctcaagggcggcctgcattgtcacaccacgcgctccgacggcaagggctcgccggaggaggtcatccgcctgcacaagcagaacggctatgacttcctcgccctgaccgaccaccgcgtctacaactacgagaacttcgcgccggatgcagacatcgtgatcgtgcccggcatggagatggaccgcagcattgagggcttcccgggcgtgcactgcttccacacggtgtgcctgggaaccaaggactcgacctatgcgcaggagcagacctttcccaccgggcgcgtgagcggccaggaggagttccagaaggtgctcgacgacctgcacgccgccgggcagatgacgatctactgccatccggagtggagcaacacgccggcgcgggagttcgaccagctgcgcggcaacttcgccatggagatctggaacacgggctgcgcgctggagaacggcctggacaccaacgccgcctactgggacgagctgctcatgcagggcaagaagatctacggcgtcgccacggacgacggacaccacatgtaccaccactgcaagggctgggtgcgcgtgaatgcggagcggaacgccggggcgatcctcgcggccctgggcgcgggcgcgttctattcctcctgcgggccggagatccatgacttctacgtggaggacggcgtcgcggtcgtgacctgctcgccctgcgcggagatcgtcttccgctgcggccagtacccctgcccgcgcatctcctcgcgcgatggggacctcacgcggcacgagttcgcccttcccgagtacctcgactacatccgcgccgtcgtgcgcgacaaggaaggacgccgggcctggaccaaccccatcttcctgcgctgagggcgaaccccggaaaaaaatcccgcgcgcccgaaaaaaatgccttgacaaaattccgccgccgtgtataatagattctgttcctacgcgagggtggcggaactggcagacgcgcacgtttgaggggcgtgtgggcaaccatacgggttcaagtcccgtccttcgcaccaatggaaaagaagctgtacagcaaaaaacgctgtacagcttctttttttgcaattcccggcgcttggagcaccttctaagcgccggggagaaactcagcgcgcgcccgccgtccgcctgcgccgctccccgcgctgggcgcaccgctgcagcaggtacccggcgaggacccacaggacccgaaaaaaagaggctgtacagcctctttttttcgggccgctcccaaggcggcggagagagattcagcgcgcgcccgccagccgcctgtgccgctccccgcgctgggcgcaacgctgcggcaggtacccggcgaggacccacagcgccaggatgcagaacagctcgcccaggacctgcagggcggacgcttcgtaatcgaggaaggcgaactccgtccgcaggaaaagataggaaggaattccctggcgcaggaagcagaacaggcccgcgcccgcaaggagcgccgcgcccaggcgcaggccgttccgcccccacgcgggcagcggccggccgcggcgcagcgccttgcgcccgagcgacaggaacgcgccccagtgcgcccccaggtgcaggccgacgagcaggaggctccaatagccgcaggccaggtggagcagccgcgccgcggacgtgggcagcggcaggtcgaggaacggcagcgcgctgcgggacatggcgatcccgctgaccatttgcgccagcatgctccccagcaccagggcgtccagcgccgtggagaggacgcgcggggcggagtaccgccccttgcccagggcgcggaaccaggagaggttcagcaggtggtgcaggacgaacagggcgaaaaagccgatccccagccactcgtggaccgcctggtccgtgagcacataggccatcagcagcaggagagcgatcgtcatcagcaggtcgacggcgtgccgcagcgcggacggatgcttcatcgcgccgtccctccttccgcgcggtccggcgcaagaccgatctgcgccagccagcggtcgatcgcgggccccgcggcggaaacctcgtccccgcgcagggagagcagcgggagcacctcgcacccggcgcacagacgagtcaggtccgcggcgatgcgccccgcgccgcccccgccgtgcgtgcagaagggcgcgatgcgcaggccctgcggcagggcttggcgcaggaaggactgcaggggcggcgccatcgtgccgcaccaattcggcgtgcccagaaagagcgcctcgcagccggacaggtccagggacagcgggcgcagcgccgggcagatgccctggcggatttcccggccggcctggcggacggtctgggcgtagtcggcggggtagggggagacgggttccagctccacaaggtccgcccccgcccgctcggcgagcaggcgcgcggcccgccgcgtgttgccggaccaggagtagaagaggacaaggcgcgtcttgttcacggaataaaccctccttttctcccccattgtaggacgcgcggcggaaaaagtccaatgcccatttccaatgcgtttccatatcccggacgaatccgggcgggcgcagcaacggggcgcggatcaggcgcgcgtcctgcaggacgagcacttgccggagcaggcccagagagagtccgccaccggcgcccagttttccgccgcgcgctcgcactttccggcgagcgcgtcgacgtcctccgggctctccaggtccgtggagtgcgcgccggtggcgtgcaccatggattgcagcgcgcgcgggttgtccaggagcggacaggggcgcaagtgattgtcgttgaagggctggcccgcgtggtaggcgcggaacagcggcgattgcagcgcctcaaggatcgacttgtcccggatgttggagtccgagtagtggatgaaggcgcagggctcgatgtcgccgttggcgttgatgtgcaggtagcgccgtccgcccgcgacgcagccgcccgcgtactcgccgtcgttccagaagtccatggtgaagaggggctttgtggcgcggaacgcgcgcacctgctcgtacaggaagcggcgctgctcgggcgtgaccatcaggtccggcaccgcgtcgctgcccacgggcatgtaggtgaagaaccagcagaacttcgcgccccaggcgatcatctggtcaaagtacgcctcgctgccgatgacctccacgttttgacgggtgtagcagcaggagatgccaaagggcagcttccgctcgcgcagcagagccatggcgcgctccacgcggcggaacgtgcccgcgccgcggcgggaatccgtcgcctcctcaaagccctcgacggagatggcggggaggaagttcttgacgcgcagcatctcgtcggcaaaggcctcgtcgatgatggtgccgttggtgaaggcggaaaactcgcagtccgggtgcgcctggcagaggcgcaggatgtccgccttgcgcacgagcggctcgccgccggagaagaggtagaagtggatgcccagctccttgccctggcggaggatgtcctccagctccgcatagctgaggttgagccgattgccgtgctccgccgcccagcagcccgtgcagtgcaggctgcaggcggaggtggggtcgatgagcatcgtccaggggatgttgcagttgtacttgcggcgcagctcgtcgttccgctcactctgcaggaacgagccgttccgggcgaagttctcaaagagcgcgcgccgatgccgtcccagaggcgcaggacaaagcggttccagttgttgtccgggtccgccaggccttctttgatgccccggatcaccccgtccatgtcgctccccgcgggtccttgaccacgtagtcggatacggtccgcaggcccgcggccccgcgcgtgccatgcagccatcctagggcgaggccgtttccggtttgtttgcattctgtttgggaagtgtgaatccgcgggagctgtgcattcattcctcgcaaaccctttggcaatccaatcgaaacaaaccccgtctatacttgcaggcgtcgtcgggaccggcagggcctgtgcagcgcccgcgccctgaaatctgcgaatgcaaggaggaaaaaacatgaagaacccctggaggaccgccatctgcgcgctgctcctatgcggagcctttgccctgggctgcctccccgcgcaggccgccggggccgcaccggccatgggggccgcaccggcctggtctatacctgcgcgcgcacgatgatcgtcgacgagcagacgggcctgtgcctggcctggcgcgcgcagagcgcaagcggcgactacagcctctgcgacggcgcgggcgacttcctctgcgcggactttgcgacgcaggacgtcgcgctgcccctgtccccgcagggacagaccgcgtagggcgcgcagattcacaattcccaaacaaaaccgcagggattcgcaaaccctcgcggcgcagaattccagaagaccgagaacggaaaggagcaaaccaaaatgtcttttgaaacctggaagcgcacaaacgagaaggtcgaaaagaaggtcgtggacggatacaagaagatcgaggacgccgtggtcggcgggtttgaaaaagtgagcgacggctttgtggagcgcctctttgcccgcgagggcgagagcgtcgggcaggccaaggagcgcctggccaggcaggcggccgcccagcgcggcgcagatcccgcagggaagaaaccgggggacgcgctttaacaaaacagaaacaaatctccaacacaccgcaaacgaagcgccggtatactggccgtgcatcgcgggaggaggagagagcatgattcacattctggtcgtggacgacgatccggagttgaaccgggcggtctgcacgtatctgaacgactccggcttcacggcgaccggctgcctcgggggcaacgacgcctgccaggagatgtacaataagcactacgacctgatcatctcagacatcatgatgccgggcgtggacgggtttgagtttgcgcgcgcggtgcggcgggtgaacgggcacatcccgatcctgttcatgtccgcgcgcgacgacatgcccgccaagcgccgcggctttcagctgggcattgacgactacatggtcaagcccatcgagctggacgagctgctcatgcgcgtgcgcgcgctgctgcgccgggccagcatcgaggccacgcacaagctgacccacggaaacctggtcctggacgcggacgccgtctccgccgtggtggacggccaggaggtgcccgtgaccatgcgggagttcaacatcctgttcaagctcctctcctatccgaacaagaccttcacccgggcccagctgatggatgagttctggggcatggagagcgagagcacgctgcgggcggtggacgtctacatcaccaagctgcgcgacaagttctccgggtgcacgggcttttcgatcgcgacggtccgcggcctgggctacaaggcggtgctcaaatgagtccgctgcccaagtactttgacggcatccgcctgccgcggtacgtcttcttcctctcgctggggtgcctgatgctcttcagcggcgtgcacgtggggctgatcctgctgctctaccggctggggtgcagcgacatcgtgctggtgcacctggtgctgctgtactgggtgctcgtggccgtgggccttacgaagtacatccagtggtatacgcgcaggttctacgagaagcccatccgccgcatcgccgaggccgcgggcaaggtcgcgggcggggacttttccgtctaccttccgcccgtgcacacgccggaccacctggactgcctggacgccctgacggaggacttcaaccgcatggtcgaggcgctcggctccatcgagacgctcaagaccgagttcttctccaacgtctcccacgagatcaagacgcccatcgcggtgatcctgaacaccgcggagctcctgcgcgggtcggaccttggcgcgccggagagccaggaacacgtcgaaacgatcctccgcgcctccaagcgcctgtccacgctgatcgcggacatcctcaagctcaacaagctggaaaagcagaccatctccccgcagcccgaggcgtacgacctgtgcgcgcagctgtgcgagtgcgcgctgcagttcgaggacctgtgggagaagaagggcgtcgagttcgaggcggatttggaggacgagcggccggtgcgcctggacgcggggctgatggagctggtgtggatgaatttgctctcgaacgcgttcaagttcacgccgccgggcggaaccgtgaccctcgccgagcgcaggacggaggaaggcgtcgtcgtgcgcgtttcggacacgggctgcggcatggacgcggaaaccgccgcgcgcgtgtttgagaagttctaccagggcgacacctcccacgccaccgagggcaacggcctggggctcgcgctggtcaagcgcgcgctggagatgatggactgcaccgtcgccgtgcagagcgcgccgggcgagggcacgacctttgcggtgaccattccggcagaagaaagggaaatgacatgatgcaaacgggaaaaacgccctttgtttccttcgactataaagaggccgcggtggagcgcgagcgcctgtcgcaggccctggacggctatgcctgcttgggctgggagctggaccggcaggagggcgcgggcgggcagatccgcctcttcctgcggcgggaccggcacatcctcaacaaggcggagctgacgcggctggagcggcagttcgaggcctgcctggacgcgatccgcgcgctggaggcctcggtctcccagcgggcgacgatggccgcgctggccgtggggcttgcgggcacggtctttcttgcgggcgcgacgtttgcggtcacggcggcgccgccagccgtctggctctgcgcggtgctcgccgtccccgggttcctcggctggggcggcgcgtatccggtgtaccggcgcgtgcgcacgctgcgcgcgcggcaggtggagccgctgatcgagggcaagcgcgacgagatcgaggcggtctgcaaaaagggcgtccggatgcggagcgagtgaagggtggcccgcgggcaaggagaggggagagaatccccctctccttttttgcgcccggcctattgcttttgcgcgcgctctaaactatactgaatacatatgccgtttgccggccctctttttttccggaccggcggcgagggaagggaaaggcgacggaaatggaagaccaacaaaaaattgacctgtttgaaaagctgccggtgccgcgagcggtgatgaagctggccgtgcccaccatcctcagctccctggtcatggtgctctacaacctggcggacacctactttgtcgggatgctcaacgaccccatccagaacgccggcgtggcgctggccgcgccggtgctgctggccttcaacgcgatcaacaacctgttcggcgtgggctcttcgagcatgatgagccgggccctgggccgcagggactacgagacggtctacaagagctcggccttcgggttctacagctccatcctgtgcgggctgctgttttcgctgctgtgcacggtgtttgccgggcccctgctcgggctgctcggcgcggacgagaccacctacgacgcgacgatgggctacatgttctggacggtgaacctgggcgcgatgccggcgatcctgaacgtggtcatggcctacctcgtgcgcgcggagggcgcctccctccacgcgagcctgggcacgatgagcggctgtctgctcaacatcgcgctggaccccatcttcatcctgccctggggctttgacatgggcgcggcgggcgcgggcctggcgacgttcctgtccaactgcgtggcgtgcctgtacttcttcgtgctgctctacgtcaagcgcgggcgcacctacgtcagcatccaccccaagatgtaccgctggaagaaggagatcgtcctgggggtcttcggggtgggcgtccccgcctcgatccagaacctgctcaacgtcaccggcatgacggtgctcaacaacttcaccgcggcctacggcgccaacgcggtcgcggccatgggcattgcgcagaagatcaaccaggtgcccatgcagatctccatgggcgtgtcccagggcatcatgccgctcatcagctacaactacgccagccgcaacgtgtcccgcatgaaggggacgctgctcttcacggtcaagatcgccctgtccttcatggtggtggtggcgctgggctacttcttcttcgcgggtccgctgacggagatgttcatgtccaacccggacgtcgtcgcctatggcacggcgttcctgcgcgggttctgcctgggcctgcccttcctgtgcatggacttcatcgccgtgggcgtgttccaggccacgggcctggggcgcaacgcgctgatcttcgcgatcctgcgcaagatcgtgctggagatccccgcgctgttcgtgctgaactggctcttcccgctctatggactggcgtacgcgcagtttacggcggagatcctcctggccgtggccgcggtgctggtgctgcgccgcctgttccgcgacctggagagagggcacgccccggcgggcgcgtgaccgaacgctgctttttcggagaatcgcttcggcggttctccttttttgtccccggggcggcgcgggcgttttcccccgtaggcaagccggggcgcctatggtataatgggggcgaaacggcaagcacaaaaaattgggaggacagagcgatggtgcgcaacgtggtctttgacatgggaaaggttctgctggacttcaatgtcgagcgctatctcctgcgcgtggagcgggaggaggaccggccgctcgtgcggcaggcgctgtttgcgagcgtggaatgggtcatgacggactatgggacgatggacgacgaggggctgctcgccgcggcgtgccgcaggctcccgcagcacctgcaccccgcggcggaggagatcgtgcgcacctggtatcgggacatgcccgcctacccgggcatgggcgaggtgatccgccgcctcaaggacgagggctaccgcctctacctcctctccaacgtctgcgggcactacgacgtcatgcgccggaacatcccgcacatcgagcggtttgacggcgagttcatttcctcggactggcatctgctcaagcccgacccggagatcttccgcacgttctgcctgcacttcgggctcaaccccgcgcagtgcttcttcatcgacgaccagccggccaacgtctttggcgcgctgcgcgcggggatgcgcggcatggtctaccacggggacccgagcgccatcctcccggcgctgcgcgcggcgcagggcgaggcgtgagcctcggggcgcgcatcgacgcgggccgcacggcggaggtctttgccctgccgggggagcgggtgtgcaagctcttctaccccggcgttccggcggaggcggtcgaggcggagctgcggggcgcgcgctgcgcagacgcgcacggcctggccgcgccgcgctgccatgggcggatgcgcgccctgggccgcgagggaatcgtctttgaccgcgtgcgcggccagagcctgctcgagcggatgctgcgcggcggggacgcgcgccgggcggcgcgggaccttgcggacctgc

SEQ ID NO: 3110 - DNA, 5193 bp, Unknown
  16S sequences of unknown bacteria
tgatgaatgtgttgtacatacaaaatttctgtactatgttgttttcaatgttcacgcgctgtttcagcgccgctgaccgcgtcagcttgtctataataccaagtatatctaaatctgtcaacgtatttctcaaaaaaagtttcgtcatttttagacattttttacgttatatttactttgttttttcatttcgaatcgtacctttatagtattcgatgataacagaaaatatcccccaatggctttttcgaaaaggtatttctaagctgagaattccgaataagaaaacgcggttttggtgatacttattcaaaatacagaatttcagatcagagatgtttccttcggcagatttcttccatcaaaaatgcggacagaaaatgcagagaacagatgcgaaaatatctcatggaattttcaagttggcttcacgagggtattgattatgatgattacatttattcggacgtttatcgtctatgcagtggctctgtttacgattcgctgcatgggtaagaccggtctttcgtccaccgatccttttcagattacgatcatgctgctgatcgcagaactggcggcaatgccggtatcttcaccggagatttctctgctgaacggagtcgccgctatctttatgattctgtttctctacgctctctccggttttttatcctgtaaaagcgaatggtttaagaaatttatcaacggcagaccgagcattctgatcgataacggcgccatcaacttcaaggagatgaaacgttccaatgtgactctcaccgacttgatggagatgctccggatacaggactgcccttctatcgcagacgtggcatacgcgtatctcgaaacgaacggagatttcagtgtcattctcaagccggaaaaaaagcctctgacccgggaagatctccacattcctgcggaaccggaagcgatgccctgcatcgtcatttcggacggcaaaatatataaaaaaaatctggaacgatcgggctacacggaaaatatgctgcacagggaaatgaaaaggcacgaatttcaatcggaaaaagacgtctttttatgtttctgtgacgaaaagcgaactctgcacttttatccgaagaaagatgaccgcttcattctgccgctgacttcacagtctgtatcaggaggtcgggaaaggaggtctctatgaaatccctcagcgttcctctgatctgtctgatcctcgtattttccttctggttcttttcggcctcctatacgcaacgtacggaaagccgtctgactccgatcctggaggagacattctcatatgccgcggaagaagactgggacaacgctacggcctcctatgaatattttttccggcaatggagtgaataccgcaggatttattcttattatatgaattcttcagatatggaagaaatcgaacggtctgtacggcgcggtttcggttaccttgcagcaaaggacagcgcgctggtctgcggggaaacagaaaatatcgcggcgcttttgaaagatctcactgcagaaaatcagttccgggcagacaacattttttaagaaacaagatttcggccgcagttctctgcgcgcggtcagtacggttaagaatatacgggagattttctctccgaatcatataaaggaaaaacatcagactgcggtctgtacagacataaaaaattctacagaggctttcttctgtccgggcggaatgttaatttccgcccttttttccgtccgcatttacaaaagatgattttctgtgatagaattgttcacgtagagtaaataatgcgcgttgattcttcggaatctgaagtgcggcaggatgggatgttgcctgccgacgaaaagtccatgctttttgcatttgtctttcccgaagtaaagacaaatgcaaaagaaaacaaacccaaggacttacggtgcattattgcatccgctgctgcattaaagagacccaaaatcctttctctttgatgcggtattgcaaaccgctttataaaaagagaaaggagtttttatgtctaaaaacaaaaataattatctcacggtcatcgttacggtagcgcttttgatcgcactcgacgtaattctgacccgtttcctgtcgattcagacacagtttcttcgtatcggattcggatttcttcctgtcgccgtagccggcatcgcttacggacctttctggggcgcggtcaccggcgcggtaggagatatcctcggtatgatcatctatccgccggcagagtattttccgggatttacgctgacggctcttctgacgggtctgattttcggactgcttttgtaccgcaaaccggttacggtcccgcgggttcttctcgcttccgccgtagtgtgcatcgcgctgaatctcctgctggatacgctttggctcgatattatgtacggcaacagctttatcgcgctgctgcctgcccgggccgtcaaatgcgtgatcaatatcccgatttacacgctgctcatacgaattttatggggaaacgcactttccaaaattccgcagtttaaatcggtatagcccgtttatcgagtttattgcgaacggaaaaaagcagatcaagttttcttactgacacgcgacggatcgttccgacatccgaagagaaaaggtcttctccggatacagtcggttcccctcgcccgggtcaaaaagcccgaaaatcaaaagcggtttcacgattcatcgattttttaaatctccgcaaatctctcatcagttcatttgatcagagtatgcggacgatttccacatgatgcaaggaagaagcgttcctctcagcccggggtacagaaagacatttttcactgaaccgcgaagaggaaattctccgtttatagaggcggaagaatcccggcatcctgttatactgcgttctgatactttccgcagcgatcgtagaggcatcccatgcggccgccgtcggacataatttcagtaacttcacagtgattggcgcagtccgcgcactgaaacgtgcgggtgcggatgctctcaaaaggagcgtcaaacccgcggaatgcagtgccggccgcgccttttctttttttgcgctctacggattccgcagcgaggaccgcagctccgaaggcgcccatcaccttattgtactccggtacgatcaccgggcaccccagttcattctcaaaggccctccgaatcgtctcattggcagaaacacctccctgaaaaaatatcttctctctgatctttttgcctctggctacgtttccgagataatttcgcaccatcgcctgagcgatccccgcgatgacatcagctctggcggcgccctgctgctgcctgtgaatgatgtccgattccgcaaaaaccgcacatcgccccgcgattctttccgcacgtttcgcttccagtccctgcaggctgaattcgtcgatcgtcatattcatgcgctctgcctggcgatccaaaaaagcgccagttcctgccgcgcagactgtattcatggcaaaatccctgatgacccctttttccagaagaataatcttcgaatcctgtccgccgatctcgattacggtcttcacttcgggatccagcacagaagccgccacaccgtgagcagtgatttcatttttcaccacatctgctcccagaatgctgcccgccagcattctgccgctccccgtcgtaccgacggcaaaaatttcatctccgcggtatttttcttttagctccttcatgccccgcgctacagtccctgcaggatcaccatgggttctgagatacagagactctataatttttctgttttcatccgtcagtacaaaatccgtgctgacagatcccacgtctacaccgagagaatatatcatcgctcctatttccccgctcctttcacattcggcatcttacagccctctcattttcatttttcagccgatccggtcatcgccggacatcctgtcgcagttttcctgtctcctcatcttccgtaccggattactgtatttggcccgctttccgttctctggctctctgcagcatatcggtaaaagcctccagacgcgtcaccattcctgcttctccgctcatctcgtcatagaccagcgtcatgacgcggatgtcctccttctcgtctacgcggttcaggatagcgcgccctacgatttcgggcatgcagccggaaggaaagatctgaattacgccgtcaaaacctctcagtccggcggatgccgcatactccacggtctgcttcgtgtagccgccgatctcgtaaggaagataagcgtttttcagagaatttcctttttttccaaaaccgccggatctgttttttatggaatcggtcagagttttgcggatccaccagttcagcgtgatgtccctctccaggcagacccccagttccgtcaggcggtcttcaatccgcatattggcggaaggctcgttcagcgtaaaaatctctccggtgagagcgatcttcacgggtgtttttgaaaaatccctctgcagctgcgacttcttccagcgataacgccccatgatctgaaaagcgtcttctaacccgcccgctccgctcaattccctcttacaatccgaaatcagatccgacgccgtcttcggcttatcgtaataaccggcgtctctgcgcagttcctgttcgaatttctccaattccttcagaagatgacgagtttgattcagctttttcagcagagacttccggtgttttttatctctccacacttccggcaggatttgggacgcccttttgagaagttctttcatcccgatatcggaaggcacatccaatacgatccattcatagtcgcaccccctgttccgcagaagtacgcgcagcaactcacagaattcccccagacggcagggtccgcgggaagaaggcatgactacagtattggcgccctgatgccaggcttgttccagctgcgcggcaaacagtttaaacggcagacacatatcctccggcgcacttcggaaggctgccgatttttccgcgccctgattcgacggcgcaggaatataagtcaccccgagatcccgcagaaaaatccccgctatcagacctgcacagccgatatcaggaaaagtcaggacctgctgtcgtttctccgtctgactcaccgtacctcctccttttcactcatatccattccgctcttgcaatacgacttcacagaagg

SEQ ID NO: 3111 - DNA, 32759 bp, Unknown
  16S sequences of unknown bacteria
aacgccacgctcaacgggcttgtgatccattccattttccctcacttcctttcatgtttttcaagctctgcttttgcatccattcgcggaataagtctttgtcaaatctccattcatttccgactttaaacgccggtatttgcccttttccgcacaggtacttaatattttcatacgagcgaccagtaatagcgcaggctatggggatgtcaaacatgagcggaacggcactccagtcacagatcggcttcatttttgtcacatcatcgcctccttgtgtagattaagtaatatcgggtttggttatgatcatgttatcatccaggatttgaagcagtcgcttaaggattgaccgggcttcttttgttgaaattcctataagtgcatcctgaatagcatcgacgcgcggcttttcgctatcaacaaagagtctcgtgaattctataacctctcctgtcgcatttcggctgctcgcataaacagcgtctgaaaaacgcaattaataacacctcccactcccgtcatcgctacggcaatatcaaccaatatccatcccatgctttttagcctcctttttttgagcggcctctatggctctcaatatggctgcctgtaacgtgtcgcacctgtacggctcttggccgtctttgcggtatacgatatactgtcctctgtccgttttacagattacctggttcccgcaggtgtacaaggctttcatcgtcccccccttgcttgtccattttcgagataggcaggggcctatgaggcccctaatgtttatgtctcgtttttggcaacgtccgcctcgtggtcttttttgtatttgtctacatcaaaatgccccgacataatagcccggtagtaaagatcaccgatttccgcgagcaaccgatcaattaccctcgggtcatgagtcacaaggcttgtattgattgccactgtatcaccacctttcaaatagatatatatgcctatctgcttgtatcacttgcgctggctttggtcgttttttcacaccttgtgtatttgttggctttattgcgaatttggtgaaattaattcaaaatcaattgaaatatgcatagcggtgtgctagtatttggtcgaaaggagtggtaatgtgaaaaagtgcgaaaaatgtggaattgagtatgagggaaattattgccccagcggatgcaacagccctgcattcgctaacgcacagcagcccggagcacaacaacctgttcagtatcaagcgtctggccagcctgcacctcagaatccgtatcaacagcctgtttaccagcaacccacacagcccgtttaccaacagccaatacaacaggggcagtattacccacagcagcaaatgccgaccatcatcatcaacaacgcgaacaccaacactaacaccaacatgaataccaacgcccatccgatgtatgggagaccgaaaaacaaatgggtcgctatcatactttgcgtgcttctcggcatggtcggaggtcacaagttttacgagggtaaaatcggaatggggattctgtatctttttacgggcgggctatttttcattggtgtaataatagactttattgcgttactcacaaaacctaatccgtattttgtgtgatctccccgccctctccttgggggcggtttttttatgcgcctttttgatcgacggaatcctcccctctcctgccttccggcgaaaagtctaaagggcttttttcaagaaatttgcacacggataaaaattcatccgcccttagacttctttttcctgaaaagcaagaatatactttgccgtaaggtatgcctgtctttttcgataggttgagaatcgatacccctttgtctcgcgcgaactcaactaaacgctttgtcgaaatgtccatcaagtcacctccgattcttcaaattgaagatcacgctcttattatattcttcatattttggaatgtcaagatatattttccgaaatttgaagaaaattttattgacaccgaaaaatatacgtgatattcttttagcgcggaggcgatgatatgtctaacaacataggtaaccatctgagaaaagctagaacggagtccgggcgttcggttaaagacgtgacttcatttttaaaaaccaacggagtcgatatttccgaaaagaccgtatacggatgggaaaacggtcatagtcaaccgtcgccagattgcttgctgcttctgtgccgatattatggtattgaggatgtgcttggttattttgggtataaagaatcctcgcttgatggaggacccacaagcgaggaaaaattagctaatatgttatacgaatcgctacaatcgtctggttatttaaaaccaggcgaggatttgacgccaaaacaatttgaatttcttgatgggctgtcggctatgttaagcgctttttttgatcgtcgatagagcttttgcaaccgcaacggcatgtttcctttttgaaatgttatgcgccagcttggccaccaatggtggcacgtcatatttatttttttctttgtcgctcacaccggcgccccctctccggccaaagagccttgaagcatgtcccacatgcgccgatgcatccgtacccgctcgtgatctctgaggcataaatatagagcgtcgtaccatctcaaatccattaccttgtgttccgggtggatggcccatcttcccgaccataaagccttaaataaggctctcgacgcaattttttccggtgttgacacagcgcgacacataaacgacccctccttatttttccaacagcagacgccgcaagtctgccatcaacatttattcgaccatattttacaaatcactacaggtaaatgttgccaatgtccgacaaaattactacattacgccttttcttcgttgccttttgcaacgtccattatagaacaaatgttctaaccttgcaatagtaaattacagatacaattatataaatacgttatatgcacaaagacacgtaaaaaaccgcccacccaaacagggcagacggctgcatcagaagatatattacccatagtcattgacatcaacaatatatgcggttataatataggtgtaaggtgctaccggttagacggttagcccctcgctcgactagaagtagaaaccgctagctttgcagggtggcggtttctacttcttttttgttatctggtaaaccagagttacaatgccgacgatcaatgcgcagaactggaacagctctgtatatgtaatcattggcacccctcccctctgggagggaaaaagaaggattcccctcccgggatgatgggagggactaaccgcctaccgtttgcgatagcaccttacggctttgagtataccatattgccttgtgattgtccaccgtgaaaggagcacacgcgccatgtcatatctgatataccttcggaaatccaggaaagacgttgaactggagcagtatggagacgaggagactcttgcaaggcacgagcgtatcctgctggaccttgccaaaacaaacggatatgagataggggctatatatagggaggttgtttcgggcgaaacaatttctgctcgtccggaaatgcaacggttgatatcggaagttgagcagggcctatgggacggtgtgcttgttatggaagttgagcgactggccagaggcgacacgatagatcaaggcattgttgcgagggcgtttaaactgtccagcaccaaaattgtcacacctgtaaagacttatgatccagacaacgagtatgatgaagagtattttgagtttggtctttttatgagccgccgggaatacaaaacgatcaaccgccgtatacagcgcggcagggtatcggcggccaaggaaggaaaatacgtgagttctacaccaccgtatgggtatgatcgcgttaaacttaaagataaaggctactctcttgcagcaaacggcgaatctgacgtggtaaaatcgatttttgcttggtatttgcaaggcgacggttgttcggttatcgctcgtcgcctggacgatatgcacgtgccaacaaggagcggtcggccgtggtctaaggctactatacgtgatatcatccgcaatcccgtctatgccggaaaaatccgttttggatatcggcaaataaaaaaggggaccgaatcagaggcacgtgttattaacgaggatgcattgtgcgttgatggggtgcatgaggctcttatcgatcaagacgcatttgatagggcgcagtatcttatgacgcacagcgccagacttccggtaaagctagatactactttaaaaaatccatttactggacttgccgtgtgcggaaaatgtgggagccgaatgacccggctcggtgtcaattctcattgttgctatgcaacgctaaaatgctcaaatcgatattgtgacaatgtgtctgcccccatttatctgatagagcacgaacttattaaacagatatcgcaatatatggacggatatctggtacagttaaaaaacatgatggggaatgatgctcctgacaaggcagcggaaaaagcattattcaaagcgaatggggagctaatgaaaatcaaaaagcagctatcatctttatatgatctgctagagcagggcatttatacagtagatatatttacgcagcgcaacaaagatttgtcagagcggaaaaagcatctcgagcagattatcgcgcaattagaggacaaggaagctcagcggtgtgcacaggaagagctgattcacgagattccggctctttcgcgcgcactagatggttattactatttggattccgcaaagctaaaaaatgatctcctgcgtaaaatcataagtaaatttgagtatgtcaagaacgaggccaatttccgaggtgctcgagacaatgcaaatttccgtatcgaggtatatcctaggttcccgaaattataatgcctatatcatgtatgtaaatacgaatagccccattcatacgtcatcagcagcaccgcgttgctgaccgccccgatcccggaataatcgtgcgcctcataaagcagcccgggctgctcggcgtaggtcttcggggccagcgccgtcaccacgatatacccttccgcattcagccgggcggtcaggctggcgataaaatcgatatacgcctgccggttttcgggggcgacaaattcaaaatccacgtccagcccctcataattcttggcccgcagcacctccagcacctggtcgatcagccgttcctgcatggcgggatcgtttaacagacggttggccagctcactgctgaaattcccctccggcgtcagggtggacagatgcatcagcggggccaccccgtattcccgcgccaaacggatcaaatcctcgtcctccagatcgatcaggacgccctccgacgtgaaaccgtaggtgaacatggtcagatacgtcaaatagggaagcgcctgccgcagcacctcccggtccacaaagggatagacgtatccgttgaccgacatggccccctgtttttcctgccggtaatcgatcacgatcgtctgcccgggatacaccgtgacgtcgccgcccagcccatagttgtttcgcaggagctgattgaccgtcaccccttcccgggccgcgatggccgaaagggtctcgccgggctgcaccgtcacgctccgctccgggtacagaatcaccagggtctgccccgtcaccagccgggtgggattttccagtccgttatcaagggccaggcgctcgggggacacaccgtacctccccgcgatttcatatagcgtctcccccgcccgtaccacatggatatccatccgaaaccggctcctttccatctgtgcctctataggccattgtatggagtccggtggggatcggcaatttgtccggtgccttttccttgcgtgtcgggtgtccgccccattttcaaggtgacagacgggctgacgccatactgttttttgtacatccgggaaaaagcgaaggcatcagcatagccgacgctttcggcggcctccgccacgctgcacagccgggatgccaataaccccgccgctttttgaaggcggacggcaatcagataggcctgcgggctcacgccggcctcccgggtaaacaggcgggaaaaataccgccggtcgatgccgagcatacaggccatcccctccacagtgattggacgatcataattggcctgcatgtattccgccgcgcgatgcgcgtaaagcgcgggggtacgccccgccgaatacagggcggtgctttgctcttccaggactgtgaataccgtatagagataccggcaaagccgtaaagccgaaaagggccggtccgggtcgctttgacggatacgctggaaacacgcccgcgtctccggaagcaccgcggtacgggtttctcccataaaccccgccttttccagcaaaggctctgccgccctgccttcaaacccgatccaggcatagccccatggatcctcctcatccgcttcgtacccgaccatctcccccggccggatcaggaacagcccggaagcctccagcggataggtccgcccgccgcaggtgaaggttcctttgccggataagacataatgcaggatataatggtcgcgtatcccggggccgaagcgtcgcagggagtcccgctgatgccagccgcagttgatggggtttaagtcctccagatggaggttgtcgacgaaaaagcccaccgcttttcccgcgtcgtccatacgatcgatgaccggcatacaaccacctccttccaggcgacattataccatattttagccctctcagtctatggccttcctcctgttttgagtttaggatgattctatcatccgaaagggaggctggaaaatgaaacaatcactgcatcttggactgatcggcttaggagggcgcggatccttcttgctcgaaaaccttttgctgtccatggacgacgtcgagatcgccgccgtgtgcgacctgtacgaggaccggcgggaacacgccgccgaagtggtccgggaagggcgggggcggccctgcaaggcctatgcggattaccgtctcctcctggaagagccgggcttggacggcgtcctcatcgcctcttcctggcgggatcatgccgccatggccgccgccgcgatgcgcaaaggcctttacaccggtttcgaggtggggggcgcctattcgctggaacagtgctggcagctcgtccgtgcctgggaggagaccggcacgccctgtatgatgctggaaaactgctgttacgggcgcagcgaaatgatgctcctgcatatggtgcgccaagggctgttcggcgagctggtacattgtcaggggggatatgaacacgatcttagggaagaagtggccactggtgtcgtcaaacgccattaccggttcggccaatacacccatcggaacggggatctatacccgacccacgcgctcggccctctcgcgaaaatgctggacatcaaccggggaaaccgtttcgtatccctggtctcgatggcgtccaagtccgtcgggatgcgcgaatggacagcacaaaacccgccggagggaaatccgctctttacacagggagatgtcgtcaccaccatgatccgctgtgcccgcggtgaaaccatccttctgatccacgacaccaccctgccccgtccttactcgcgtgccctgcgggtccagggcagccgcggcctttacatggaggatacgcagtccgtccatatcgaggggaagacggaacatgaaaaatgggattccatcgaatcgtatcgggaaacctacgaacatcccctttggaagagctatttggccgaaggggtgcgcgggggccacgacgggatggattatctcgtgctccgcagcttcgtcgaaaacgcgaaagcgcaggcggtccccccgatcgacgtttacgatgccgccgcctggatggccgtcacctgcctgtccgaggaatccgtcgccctggggggcgcgccggtctgctttccggatttcaccggcgggaaatggatcggcggcacggcgggcggcacgggacggtacgccctgtgacagatcccggaacaaaagaaaaaggaccgcttcgcggtcctttttttatcagaacaatccggatcagtctacgttatacttctgcagcgcgacggcgacccggcggaaatattccgcattgatgctgtaaaaaatggtgcggccggcattgcgggacttgagaaggcccgtgctggacatcatttcgagatgatagtacaccagggtgacggaagtgtcccactcttttgcaatatccgccgtacaaagttcgccccgttccagcagcatctcgaggattttataccggttggcctccgacatcaccttgccgaactgaaccagatcaggctcggggaaacggattgcgcgcaagaggcggttgttctcgtattcgcagcccagaagcagcaaataccgggcccttttttgcacttgaatcaagcccttatccaacagggaaagggaatactccaggctctgatcgtccatcttctcttccgggcaaagcagacggaacagagattccggctccagccctgcctgcaggttcagcagcacggaaaaattttcttccgtatatttctttaaaaggcgttccttttcctgcaattccttcaccagcagacggatgtggccggccgggtcgacgcagagggagagcagatggaatttgagcgtgtcggagtaggccgactcataaatatgacgggatatcgaatggacggagctgtccgcctcttcaaaatgcggaaaatagaactgaagaaaacggcggaatacctcatcctcatcctgcaggtcttccaaaagggaggcaacgcccccggaccggccggaggccagctcctctgcgtacagagacgtcatgaacgtctctccgtcctcgcgcggataaaagaaggtgtagagctccgccgggcaggcgccaaaggtatcctgcataatttcagcatactcttcactgcccgcgtcggccgttttataggccaacataaaaatgtaaaagagatcatggatgtacccaggttcctgcacaaattggatcttcaagaaagcctctcctttcactatttcaaaaaatccaccttagaatttacaatgtcagttgcagtttaccatggcaacggtactttgtcaatcatattttccattgaaatagtgaaatatcatcactttattaacgttaattccggattgtataacggtcattaaaacaaaatggattggtggataatggactggacgaacccaaaaaataccgcatatgattcaatagggcccatatgaaacagcggtcctgcacaaaggcctgatccagcagcgtatcgagacgaggtatgagctcatcgtccccggtcctttcccatttaaaggccaccgcccgcaacagcccgagcgtttcctgcaatgcgttcagcggctcgggatcgaacggcatccctgcgtgggacaagatttccgcttttttacgtaatatcgccacatgttctatatatttgaatacaccgtgtgacatccggatccacatgcgggcctccggatcgcgcgcttcccgtgtatccagccactcccgatagccgcggaatatttccgaggctccccggtatacatactgccgttcccgtccctgatcccggtcaaagtaatccgtggttgttttgcccgaggcgaaatcctgttccagcatgtgaaaaaaacgcaacatattggcttcttccctggtgtcatgccgcagccggatgcggcacatcggaaaggcgtgttcccggacctgacccgcaaaacacgcatgatcctcataaaacttcagcatgagctcgtggcaatcgatgatctcctcaaacgattgttcccgttcggaaaaatggccatttcgcagatccgggctgcaagcggtctttttttccgtgtcaatggcgtaaaacaccgtttcgtgcagccaaagctcatccggaataaacgtattcttgtttggatagccctgttccagcagcacgtaatccccctccgacaggatctgaaccatagcccggatgagatcctcccccgactgaaacgcccggtaatccaccggaatgaattccagcaaaggcgaaaaatcctccatccggtatcgctgcccgaaccgtccgaggtaggtgttgaactctccatccataaatacccctccatggttgaagagccagtcgtcataattctggtggtttttcatcacggccaatttgtaaaaaatcgggcattcgcagtagacatccacatcataatgaaatggaagagatcttttcatcccatctttccccctttgaaccccggcggcatccaccgccgccgggtcatccgcgcagaaaatccggcagcctgtccatggtcacaatccggtcgcatgaataggttttggcaatggacggcaaatcggtataccttcccgtcagcctcccctccttgtccacaaggaattcccggcaccagatattgaaccaggaccaatacaccccatcgcgggccatgcggtccggatcgggcatgacgcccgcttcggtcagggcgaccagcttgccggacgagacagccgtcgcatccgcaaagcgtttggcctgggcatcggtgttgtgaggctgcgtatacacatcctcgcccaggatatcgcacaggtcgtcccccacataccagtccggatgctccccattccagacccacagcagattacgcagccgatgaaaatgcgtcagccggtcgaacaaaaaccgccagagccagcgataggccccgggccccccggctccccaccagaaccagccgcccgcggcctcgtgcagcgggcgccagagcacggttacgccgtgatcctgcagccttttcagcagtgacgctattgcgtcgatatcccgtaccatgtagaacgcctcttcggtgagaagaccccgccgtttccgctgtgccagttcctccaaaggcagcagggccgccttttcatcggtcatcgcgcgcgccaggttccagccggtatattttgtgtagaaattcgcgccatggaggggcggcgcccagtgccaggaaaaggtcaccagcccgccccggcggctccacgcgatcgccaaatccgtatcccgcccctttccgctgtagaccgggcagtcctggatgaagtcgaacccccggatggcgggcagcttccccgtaaaggcatacagcgcctcgatctcccggctggagccatggtcggcgtattggcccgccaggatccgtttcccataattctccacgagatactgcaggatccggcacgtcttttcatccgcataagggttcacggggataccggcttttccccggtaatagatgtccggcagccgttcccccgggctgatccgaatttggtccagatcgaaccaaccccagctttcgagcagagaaaactccaccgtccccttttccaaccaaacagcggggaaggaaacgaggtgaaaggcaccgtcccctttcacctcgcacatccccacatcgtttccattgacgagcagattgcagatccggcgggaatccgcggcgcagcggacggacagagtatagtggccggtttccgggatgccggcgcggacgctccaccggtccccctcccgctgccggaatcccgtgacatagccttctcccgtatagcccggccgctcccgtgaaatgcggagcccgccttccaggtgccccgtctccgctccgatgaccgatagggccccctccgtcacagcgtttttcatgcccgattccgccttccgcctttttggatctcaccgcagggatatcggcagctcgtcccgggtgacgaccagctcgctctgatacaccttgtagatcatcggtttttccgtataggtatcgatgatcgttccgtttccgtttgtgataaaatcgtatacccaaatgttgaacgaggaccaatataccccgtcccgcgccatccggtccggatcggtcatcaccccgttttcggtcagggccaccatcttgttcggggacgcggccaccccgttcatgaaccgcatggcctgcgcgtcgtagttccgggcatcggcgtaaacgtcctcgccgatgatgtcgcagcggtcatcccccacgtaccagtcggggtcctgcccgttccagacccagatgaggttgttgagcttatggtaatgggtctgccgttcatacatcaggttccacagccactggtaagcatccttgccccggcagccccaccagaaccaaccgccggacgcttcgtgaaggggcctccacagcactgtcacgttgttgtcctgcaggatcttgagctgttccgaaatcgcgtcgatgtcccggatcaggtaccatgcttccatggggatcgtgcccgcgttggccagccgccacacctcatcggaagaccggccggcgatatcgacgctggtcacggcacgggacaaatcaaatagcgcgtcgctcgcataggtgttgccgccaatcgggtcgatccaatgccaacagaaggtcaccaggccgccgtcccggctccactggatcgcataccgggtatcggtccctcccggccggccgagggaaggcgaatcatacagaaaatcgaacccccgcagggccggatatttgccggtcagattgtagaggccctcgatggcctttacaaaatcgccgctggtatactgcccggccagcgtcttcttgccgtaaatatccgcaaggtactgcatgatccgccgcgtcttgccgttggcgttcggattgcagggggtggaggtgatgttctgatacagagaggccggcagcggcgcccccacatctatgacgatccggtcgagatccaccccgcccgcgctctgggtcacggacagccggttgagcccctgttccagccagaccgccgtgtaggggatgtcgtagaagccctggccgggcctcacacggctttcgccgatgtcctgcccgttgatcctcagggtgagggtgcgcgccgcgtcggccgcacagcggacggtcagggtataatgccccgactcaggtaccgtcaccagagcgtaccatttactggccgtattgtccgcgtatgccttgaaattggtgacgtagcccgttccggaaaaccccgaacgggacgaggccgtgcggactcctcccgatacgaggccatcctccgcctccagggtgtacggcagcaccataccgacgggttccgcgccggttgtggaagtggatcccgacgacgtgaccgtcgtccccgggcgcggcggcggcgtcgtgccgcggccgccgcccggcggcaaggccgtatcttccgtaccggtttccgtcgtggtgtcggacgaacccatcgcatcggtgtccgtggtctccggtccggaaagctccggcaaggtcgaggccagggtggactccgtaccgctgccgctcgattcggcaggcggcgctttctcattccggcagccggggccacaaaggcagatcagaagtaccgtcgtccacgccaggaaacgcaaggacaggcttgtcctcgacttcggggtaggattcctcatgatatcctccttcaaaataggacgcccgggtttccccctctatgaaaacccgggcgtcgtgtttatgctttttctgcccgctgacgccgcagttcctcaggggaaggcagggcttgtggacattcgatggacggcgcgatagacgacggggccgcccagcgcaccgcgttcaggagaatccgttggatcggagcctggaaataggcggtgttggactcatgcccgggttggaaatagaagacccggccaagcccgcgattccagcagcagcccgaacggaacacctccccgcccgagaaccagccgatgaaaaccaactcatccggttccgggacgtcaaagcgctccccatacatctcctcctcttccagctcgatgaactccccgacgccctgggcgatcggatggttcggaagcaccgtccacagcctttcgaaatcgccgtccctccatttgagggtgcaggatgtccccatcaggagctggaacggcttgctcaaatgggcggaatgcaggacgatcaggcccatcccgcgcaaaacccgctgctgcaccttccacgcgacaccgtccgacaccagatggtgcccggtgtgcgcccaccagatgaggacatccgtgttctccagaacctcatccggcagaccgttttccggctggtccatggtggcggtccgcacgtccaaatccgcttccttgccgaagagtacggccagatatccgtgaattccctttgggaacaacgccgccacatcttcatatttcgtctcactcagattttcgttccaaactgtcacccgaatcattcggatgccccctttgcgtatttactaaaagtataatcgttcaataattatactcacttaaggttgtcgtaatagtctagaatccggcgagagggctccttcagctgatcgaagctttcctgccgtccgaataccgcctgccgcatccactccccttcttcctcgcaaatccggtcgtggcccggaaaaacgcgcccgaacaggaaggcgcacagccggacataccggaaatcgccaaacgcctcgggcatctgtcccggcagcgctttcacggccacgctgcggccggcacgtaccgctcccgcaatcgcctcgaaggtgttgtcctcggcaaacacaatggagtaaaagaggccggtaaacagcccggagtcggtgctgtggcagtcggagcatcccataagcggcaggaggctcccggcccccatacagtattgataataatacgcggtctggaacaggttgtcgcggtattcgtgcggccagtagccgccgattacctccagcgcgtcgaaccgccggtgatccagtagatagcgggtgacatcctcgtgaatatcgaacccatcggcggtttcccagaaggggtggcagaacagggacagggctcccgcttcccgcgccttgtcgaacacggcctggctcgcggcgatcctggtacgatcgtcctcatcgagattggcggggagcttcgatttctcctgctccagcttctcccggtagtcgcttgcaccgtcgtacccccaactgttgacgctgaaccggccgcccacactgagaatatgcacgcggcaatcgggcgcatggacttcctcgcccggcaggaccaggaagtcggtacccagctctttccagtattcgagcgcctcgagggacggctggtaccagccgtgatcggtaatagaggcgaaatcggcccctttcttgcggagcatggcgatcacataggccggtgattcccgcccgtccgaaagataggtgtggttgtgcagatcgcctttcaagggatagcaggcgtgaaggtcgggctcgagcgcgtacacgcgcggacagccgatttctctctccccgtcgctgacccgcagccagtattcgtcttcctgggggaagcacatgtccagccggagcctgccgtttgaagccacggccggtctcgcccggtcaaaaccggcaaaatccgacgtgtccacctccctgccggcgctataccggcgaaaccccgacagcggtgtgcagcgtatcgtatactctttgccctcttccagccgaaaaggcggatcgggcgtcagttccagttccaccgatcgcccggtcacgggcagaagcggtctggcggtcagggacatggtcatgcctccttcccagaatggggtatgatcgggccgttctcacagccggcggacaaggcccggcttacatcgcgtgatcgcgtatgaaagcggcgacctcctccgcgttgcagaaagccaggcccgtcacagtatcggcgcagccgtaatacagggcgatccggccggtaggcgcgtcgcagagcgccgcgcaggggaaaaccacgttgggggtgtcgcccacccgttcatagtccgtcgaaggggccatgagatagggcgccgtccgggcaagcaccttccacggctgctccagatcgagcagcgcggcgccgaagctgtagacatagccattgcagctcgtcaaaacgccgtgatagaacagcagccatccctcgtcggtctcgatcgggatgggcccagcgccgattttggtcgactgccagccgcccgccgtacccatcacatgccggtgccggccccagaaagtcaggtcggggctctcactgtagaagatgtccccaaagggggtgtgcccgttgtcgctgggccggctgagcatcgcgtatcggcccccgatacggcggggaaacatgacgccgttgcggttgaagggcaaaaaggcgttctccatctgatggaactctttgaaatcctttgtccagcccaccccgatggtggggccgcaatagccgttgcaccaggtgatgacatagcggtcctctatccagcagacacggggatcgtaccggtaatgggaacggagcacctcgggatcgtcgttttggaacgtgatgacctctttttcgatatcccaatgcacgccgtcccggctgaatcccacatggatattcatattccgggcggtatcgtcgcagcgaaaaatcccggcaaagcccccgtcaaacggcacgacggcgctgttgaatatgctgttggaatccggcagggcatcggcggggatgatggggttctgcgaatagcgccaaacgggcgccgtgcagccggcgggccggtcctgccacggcatattcgggactgcggggccaagtatcttcatatgtataaccatgcctttctgtgttttgcaggatcccgtgcccgtaccggtatggcccggattggacatcgatacccgccgtctggaatccgtctttccagactttccttggattttagaaagccggcgcggccgcggaatgcggccgcgccggtttacagaacgattcggttaccgggaacgctgcctgcggcgccgcagggtaaaggccatcgcgggtacacagaatgcgatgagcacgacggtcaccagggcggccgtctgggtatccacacccgtcttgggattctcgatgatggctttggcggtctcgaacagccggaagttccgcagcaggatctcgccgccgccgtcataggcgaagaacgcaatcttctgatgctcgccgctgttgaaccggaccgagtagctggtaaactcgcctttataggagagattggcccattccttgaaggtctggggcagcgtgttggaatccatcaggccgatggcgttgccgccggccttcacgcccttgacctccacggtgaaggtgtagttggtgttcggctgcacatccatccacagaacatagctcgcgccgatccggctgccgttcagcagcaggccgtcctgcgtcatggtggcaacggtgccgaatccgtcgcccttgctcagatcgatgtttttgaacaggttatcggcgtccttgcaggtccgctcgttttccggggtgtcggtgacgcccgtgatggccgccagcggctcagccacggcgggagccacggcgtccgtgagctcgcagagtacgatgtccttgaggtccagcttggtgttccggccgctgaccatcaggtagaccgtctccagatccccggaattgaagaccaggccgcgctggtgccaatcgttatcccagcaggcggcggtcatggaggaggtgaaggggaaggtgacaaccgtctctccttccaggaccggcgcggtcatgagatactggccgctgcgcggattcgcgacgccgaagacgccgttcgggcggacgccgtcggtgagatacgcgcctttgacgaacgcggagaacacgtagtcggtctccggcttgaccgggacttccaggacgatggaatcataaacgtcgccggcttcgaagttgacaacgcggtcagccgcttccaccagattcttggcgtccgaagaggggttgagcttctgcgcgacccactcggtgacttcggcggtggtgccttcgtcatcggagagctgggactcgctcttcttggagagatagatgttgtcgatataggtggtatgctcgccccacgcgtcgttcatcagataaatgcagaagttatcgctcagggcgccggtattgaaggtgatcttgtattcgtgccactcgccgtccatgatcaggttggcccagacctggtcggctgtctccggattgtcccaatccgcctgacccatatggttgggcatggtcagccagccgccatcccagaatcccggcgtatacgccatggcgatggtcggggacttatcgcgccctgtcgatttgtacatgaaggagaattcgtaatccgtatcctcttccaaattcgcgtaccacatcatacgggaatcccaagcgttggtgccgacccacttgaaggcgttctggccttcgtagacaccttctggttcgtcttcgctgccgatgatgcagttttcagtagtgaaggggctgccgccattggtatcgaagcagagaggggcatccgtcctcgtgccgatgtcgatgtttccgttctcaaacccgccgtcgacgtagacactgttggtcttttctacgacaaggttatcgacacagatggtcgaggtgtcgcccgagctcatcagccgcagggcgaaatcggcgttgtcacccgtgtagaaggtgatggaatacttgtgccactgtccgtcgctgatcagcgcggcccagggattggacgagaatacgccggtcgcctcgtcggtgatccactcagcctgacccttgtagttgggcatggtcgcccagtccgcgatgtacggatcggcaaagctcgtcttttcgaatccgatcaccggggcgttgggttccccgttcaaatccaccttatacatgaaggaagcgtggtaggtggtgttgagctccaggccggtgcggaactgcgcgcggccttgccagtcgccggcgctcgtgaacttgagggcatagtcgccttcgtacaccgcgtcgggatcgtcggtcttgccgacgaggaggtcgtcataatacccattgtcggaccaataattgttcttggtcagcgtgccgctctcgaacccgccgtcgatatacatgttgccgctttccacaatggcgaggttgtcaaggcagatggtcgaggtatcgcctgaattcatcagccgcagggcgaaatcggtgttgtccttggtgttgaaggtaatggcgtattcgtgccatttgccgtcggccaccaggtcggcccaagggttggacgagaagacgccggtcgcctcgtcggtgatccactcggcctgacccttgtagttgggtacggtcgcccagtctgcggtatagggatccgcatggctcgtcttctcaaagccgattactggcgcattgggttcgccgtccagatccaccttatacatgaaggaggcgcgataggtggtgtttggtttcagcgtagcttggaactgcgcccggccctgccagtcaccggtgctcgcgaacttgaggccatagttgccctcgtacacggagtcggcgtcgtcggccttgttgacgatgatgttgtcaaagaaggagcccgcgtcggtccagtagccgttcttgccggtcagcgtaccgctctcgaagccgccgtcggcgtaaagattgccgttctcctggctgagcgcggcgttgtaggtatcggcgtcgacgctcgccgcctgcgcagccggaggtgccggggttttgaagagatagatgtcgtcgatcacgatgatggtgcccttagcattgcggatcgtgaacagatattcatccgacgtggcggtgaagttgtaggtgtaggcgtgccactccccgtcctgaatcatcgaggtcatatagacatccgcttcatttgtcttcggatgacgccagccatcactattccgcataaggccaacccacggggtttctgcatagggttctccttcaggaacagggattttgtagtacatggtaaaagtatactgctcaccggcttccagcatcgggcgctggttttcggcgttgttgaatgaggtcagcatctggttccaggccatggtggggaccaatttaaacgcatattcgccgtcatgcgtggtcccgtcctccggggagcccttgatgaggaagctgtcccagaagtcctgctctgtctcattgcagtaccagtcgttcacccagtcgaacccaccggccgcgccgctttcttcaaagctgtggtcgaacatcaggttctcgtcctcgtcgcaggtgatcttggggacgaagacggtgacggagggatcggaaacgatttcgccctgatccgtcacagccacgacacggtaggtatagtagttgttgagctcggcgttgctgtcgctgtaggagcagacaccagtcataccgggatcggcggcaccggcattcatttccgcgatggtgctccaggtggtgccgtcggaagtccgctccagcctgtagctattggcgctccggttgggcagccagcggatatcggtcggggcattgagatacaggaacgccggtttttccggggctccgtcgatggcaacgtcgatgccctgacgatcatatcggttatctaggatccgggtacggataaaggtagtcgcctggcgcaggttgccattgctcccgatcagggaattgaccgtgagagcgcccaattcctgatcgccgtactgcgcgaagaaggccgcgcggtacccggaagtcttggcgttctcatacagggccggaatatttctggaaacgctttcctccggcactgtgtcgtcggcgagacccatatccaccagccagaccggctcggtggtgtgcagatccttcgccttggtgacttcgccggcgctgttgtaattggtgacgccgatcacatcgaggctcaggttgttgaacagcccggccttgaccgccgtctggtcgcggtcggcggaggaggccatcaccggaacgttcggcagggccttcttgaccgcggcggcatttttcttgataaagttctggaccacgttccaggaggtaccataaattttcgatgtgtcgtagatttccccctccggattggagaggacatccacagacagcacgacgtcgggataagacgacaagatctcgcacaccggcgcgaccacgttttcgatataggtgtcagggttcgcgataacctgggacaccttgtcgtaagtcgccttgcccttgagctcaaaggtctgggccgttcccggcagcaggacaaacgccaggttcaagccatactccttcgcgagtttgagtagggtttccaggtttttcgtcagttcctcgctgacgccggagacgaggccgttttcgtccagggtcaggccctgcagcccccggaacagatgaatgcggacaccggtgaagccgatggcccggatgtcatacagggttttttcgagtttggtttcgtcaaaggaggaggccgcgccggtgatggcgttggccgcccaggtgctgccgtcgtccccttggctgatccaaggcaggttgacgccgtagataaacccgtcctcctcgaggaccttgtcatagagccccgtgccggtttcctgcgcctgcaggaacagacagggcgccatgacggtgatgagcagtgcgatggtcaggatacaggacagcgcttttttcaagatgaaccctcccttttcgtttccttaataagacatcgctctttccaggctctcaatgatcccattgaccttgttttcgttagccagcaggttggtcttcacctgatcgagctcgccgtacgcaacatcggagaagaggctccagaagtcgctgtcggtgttgtagccgatcacgcccagggacagcagcgcattcttattcatcgcgctggctctcaggaacacctgctccgcctcgtcactgatgaattttttaccgcccacttcggtgttcggatccaggaaataccggatgaaataggaagccgcgcgggctttctggggcttcgaaccggtcgggatgccccagattttcaccgaggacgccagtacttcttcctgcccctttggagaggggaagggcaccacaccccaggggtcggtcatcttttccatgcctcttccttccaggagataataatcctcctggacgaccatggcgagcgtgccgttgaagaaggcgttatcggccgtgctcatgggctcgaccttatccacggaacgggtctggatatagaatttccacgccatctcgagtttggggtcattcagattgttgatgatcttggtgttattgccgcttgtttcaaatttgacgaaatccgtcccggccgacagcatataggtggtcggaaggacctgcgtcccgtaataattgacgccgtcgacggttttggtcagggctttggccgcctccaaataggtgtcccagttccaattgccttcgatccagaggtcggtgggagttttcaggttgttgcgctggaagatggccttgttgtaaaagagcagttgcagggcactgcaccacgtgctgttcttgacagctacgccgtaatatttgccgccccaggagcagcggtccatgatgaacctgtcgtaagccggatcgttttccagatcgaaatcgccgaccgtgatctcctggaaatacttgttgacgatcagggacggccaccagtcgggctggatggaggcgatgtcaggagacatgttgctgccgaccaggctggcgagtttacgggtgtaatccccccaggtagtctggataattttcaccgtgatcccggttttggccttgaaatcctcgatctgcttcaggagcacgtcgtccggggcgaaccaggtgagcatgctgatcgtctgaccgctgagttcagaggggaaattggccaggaagtcatacttctccgtcgggggtacggtcggcttcggtatttctgtcgtcgtggttttcgcgccgccgccgctttcagtcgtacggagaatatcccctccgggattctccgtctcggtcggatcagccggatcggtgctttctcccggatcagtcgggtcggtctcacctcccgtcgtcgtaacctcggtttccgacgtcggttccgatgacgggttggcggggccgccgcatccggcgaatccggcgacacacagcaccagagccgcgaacagcgacagccatcggaccagggtctttcgggtaacctttgacatgatgtttcctccttcttataaaatgcgtgtcggatggatatgcgggttatggaattggctcaccctacgatccccaccgtttcgattccacggatgaaccatttttgcagcacgagatacatcagcaggacaggggcaatgaacatcaggcagcccgccatcaggatattccggaccagcacggggttgcctcccgtccccactcccgcggtcatttgcagtccgtcgcggatctgcgacaagctgaccgccagcgggaaattctcagacatatacatggaggagagataataatcgttccagtgccagacgatagagaagatcaccaccgtcagcacggccacgccggaaagcgggatcacgattgaaaaataggtgcggaagggaccggccccatcgatccaggccgcctcctccagttccttcggcaagcccttgaaaaactggcggtaaatgaaaatgaacaggcccgagcggatccctacaccgaacaaagaaggaaggtaaaagacgaacggggtgttgagcaggttgagccgtatctccttgcccgagaggagggatatcaggtgcacgatccctaggaaatccatatcggagtagttgataaaggacgggatgacaatagattgaggcggtacgatgatggtaagcatcaccaggccgaacagcagggtattgcccttgaatttgaaccgtgcgaacccatacgcaacaaaggaacacaccgccacctgcagcagggcgcagaccacgcccacttccaccgttaccaaaaacgaatgcccgtaattcatggctttggccgcggtctcgaaattctcaagcgttacgctggtcgggatccacaccacgctgggattgatgacttgatcagcggtcttcagggaattgctgatcatatagaaaagcgggaacaggatgatatagctgaccgaaaagagaaacaggagccggaagatcgaatacaggaaccgcccgggcctgtgttttttgatcatgtcccgggctgcctctccccgatctttcaaatcgaagcgccggctgattgcgttcatggtgccttccccctttcccctttactggtcccagcgccgcagcaggaaatgccgcagcaggaacatgaatatcgcgatgaccgcgccgacgattgcaaaatacacccaaagcattgccgagctcagatcgtagttctgattgccgatcatggcggagtagacttggtccatcaccgggttatcgctcttggtgaagaagtcgatgatggaatagacgatcaccaaaatcaggatgttggacagcatcggcagcgtgatgaaccagaagtcctcccatccggtggagccttccaccctggacacctcatagaggtgttccggtaccgactggagtccggcgatgaacaagatggtctgaacgccgcacccccatacgaggtcaaaaatctcctcgatgaacgtgaccatcggctccaccaggttcggcggcagatccatacgggtcagaatcaaagcaaaatcaatcccgcccgtaatgtagctgttgctgccttctcggacttgttccgccatgacgtcggtattgaagatttccagcaccacgccggtggctatgatgacagggaggaaaaagaccgccctggcgagcagccgcccgcggaacttctggttgaggatcaccgccagcaccaggctgaggatcacggtcaggggcagggagtaaagaaacgacttgaccgattcccaaaggttctgtttatacgtcgtatcctgttcgaaaagatatcggtaattttccagcctgatgaagtcgaatgaaaagccggcatcactcggcgacactttgcagaaggaatagtaaatagactgcccgagcggtaacagaaagaacagaaggaacccgatgatccagggaacgatgaacacatatccgtaccggttgcggcgggcggccaaaacagatttggtcttgtttttcattggaatttcctccattcccggacggcggggatcattctacatagataaaactgtggccatcaaccgtccccaaaggagttgctgccggatgatcggtctggttgactaccaccgatacgccgttatcgaaatccgtccgggtaaccccttcttccaaccggatgtggccgacaattttgcagccatccaccgcctgataaaatgcggcgctctcctcgatcatggagaggatatcgtcccggttatcctcatagacggaggctaaaagggcgttctgcgtggaccggataaactgcctgtcgtaggtatcggtcaaactgaagtataaaccgctgccggtttcgatcgcctggagataccgcttggtcacatccccggccatattgatcggagagagcgcgatcggtatcctgccgcggaaaacaagctgataaaagggcacatcttcatccaccgcgtcaaaccgggcggaattggccggggagcccgcgataaagtcggagttgaccgccgcgtaatcattcggactggtggtcaggagcggatggccggcctcccggatatccgccagccactgggctacttcttcgcccatccggccccggatctggtattgcacttcgctgtaatcggaatacgcggtttttccaaggctttcgaggctgatgccggtcacgccgagggaagcggattttttaatcagcttttgaaccgcctctccgagctttccacgggagagcaggcggtaggtatagtcgaattcctctcgatagccctggaacatgggcgaatagatgtactgataggctacaacgccgctgaccttctgcgcggaattgaaattggtgctgaagccgctgccggactggcggaaattgatgaggtcaaaatccgcgaacagggaaagctggttggtgctgcaatactccagcagggttttgtatcccttttctcctcccatgcggttatggaaggtatagccgcccgcgatcttacccgcatccagccccgcgtttccaaagccggtcaatttgacgaccggtgaggcgccggtggaatccccgatatcctgcaaaatctcccgcacctgtgtgaaggtggtgctggcctgcacgctctggtaggggaaccccaggaaattctgccggcaaagcgccccgccgaggaattccaggaacagctgaggcgtctcgcccttctccggcatccctcccgatttcaccaaataatcggcgtaggcttcggccattcccacatagtttgccttgtctccggaaagaggatagtagccgacagacacgtaatccatatcgatgacgttcgaagcgtaatacggagtctggctgtatgtcccatagagggcagggacataaatcgtttccgccccacgcacacggaaaccgctgccaacccccgcgtagccgatattctcatatccggcctgtgcctggatccaagcatattccgcgcctttttcgataatgcccatcagggcgttctcgccgtccgtcgccccaaaaaccggcagccggataggctcgatcatcttgggctgttcggtgttgttcgtcgtcggatcttttccgtacacatcgtcccggaaagtccgctgttcatgagatgcggtatccgtcgtcatgagcgcgccgcttcccgacggcacaaacaggtagccgccctcggtatcgttcgccaccgacgccaggaaaggcgccaaatggatctggtaaatccggttatcgccttcaatgatatcggccaccatgatccggacttccacgctgtcctcccgcaggaggtactggaccggcacggcaatctgctgctgatcgtagcagtaggtgacctgtacgccgttttcgatcgccttggcgacgatccgccccttcatcaccccggagtagctttcaagggtcttgacctggtcgttgaccggctcgatatactcgatggtaatgggggaatacagctgcagatccgcattggaggcaccggaaaaataatactcatacggcacggttccccagatcttcgacgtttgtttatcctggaagaaaaccgacttggtctgttcgtcccacagcagcgtgaaccgtttgttgctggcaacggtcccgcttttggcggatttcagatcattggtggaatcgtaggaaccccggggagtattccctttggaagaacaggcggttgccagcggcagagccagcaaaaccgaggcaatcagcgccacgaccctttttgcacgcatcggcaacctcatcctttcagccgcaaggcgatttctttgaacacggaaaccaggaacgaatagaaatcctggaaaagaatcaagatcattagaagaatgaacacagaaagggccatgccgagaagggtcaggatcgtggtgccgaaggtgcgggcgaaggtgaattcatgaaccgacatagtccccaggaagatcaggagatagaaccagatatcggaaacggtcaaaatgacatcgatgattccactctcatccggaagcagcgtataggagaacaccagcatcaaaactgtgctgatcagcttgggaagcagggcgtaacaggatacaacgaaaatatgccgcagcttgcccttcccctcgagcagcgtgcataccgcccagttgatgataacccacaggatcagcatcccgactgtcggcaggaaggtatacagagcgctgtaccattccagcgcaacgtcgtaatacatgaagccgccgttgagaataccgaacaccgtcaggccgtaatacaggatcaggatcagggcggcgatgaggacggagccgttgcctttccagcggaccgcattgaaggtgtcgatcggatggataaaggtatgcagagccgtgcggaccttggtatttccgatcaggacgacctgttttttcgacgtgtaaacgactagaaagaccacgccgccgatgagggccgcacacaacagcaggatccaccaaaaattggcgccgataaaatccgaccgcacctctgcgaaggcctgcgcgtaggtgccgcggtcgcctcctatccgggcatactccatggagccctgcatatccccctgctcatacagggctttcgcgacgccattgtacgccacccggaagttccggtcctgggacaggatgtcttcccagagcggcagcgcctgctgatattcgcccttctggtcgaggaccgtggcctcccggatctgcgccatgatgggggtgggtttgaataccgtcagggaatttttatttttgtcgagtaccaaaacatcgtcgccgtggttgaccatcgccaccggcaaaacaaaggaaccctcctgggtcccctgccccaggccggtgccgaatatcgacagggaattgcagttctggtcgtaaatgaacaccttgccgtatgtctggtcgagcgcgaaaataaggccggtgctgtccacggatatatcggagaataccgtcgaccggccttctcccgtcatgagtttatagccggctccgtccccgaaattgaagtagtccgcactttcgctgtcaatgtaacggacgtagcgcaggacgttgtcgccgcccgggctcaatttccggatttcgcccatattgttttgcgttacggccgtcaggctgtagagaatgtcctcgctgtcgatgcagaggttggtaaactgatagggaagtttctggacccgcacgttggtatcgtcgataaagaaattcttgaccacgcggacgacattgctcagcaggtcgggttccgtcgggttcgagccaaaaaatccgaaaaaggtgttgtcttgtgagaaaaccagcgccccgtaaaaagagccgtcgctaagtacgtatgtaaagccctttttatctttaataaccgccttgggacggaattggaatccctccggaatgacatcgctgtccgggagggtgaggacttccttaacctgctggtccagtgtggcgacgatgacacgctggttctccgtgtccgcgatcagcagctcgtgatcggcggagacaaacatacccagggctttcttaaagctgagggtagctccttcatacacaaaattgtcgagaacgcgggacaatgtcaaatccgggttcagcaccacgatccggtcgttgttgctgtccaggacgtagacgttcccttccgggtcgacggccacgtcggccggttcgttccattttcctatgcccagggcccgcccatcgatcacgctgtccacttcgaaggtgggacgctgatacatcgacaagcctcggatgttgttgctgtaggtggcataaggattcccgtcgagctccgcggccgcggccgggaggcagaaaagcagcgccaccagggccaccagcaatatacgcctcatccagcgccatggctgatgtttctgttttgttcgcatgtgcacacctccgtatccggcctcagtccttgatgccggcgctgctcatggtctccatcacattcgactgcgagatgagatacacgatgatgggcggtatcatcatcaggacggtggcagccatggcgcttcccgcacgggcgagccctccgctgacgacctgggagaggacatagggcagcgttttcatttcttcgctgaagatcgtgccggtcggctgcatggaccacatatcacggaacgcgaacagcagcagggtcagccatgccggcttgatcagaggcatcacgatacggaaataaatggagaaatacccggctccgtcaatgcgggccgcttcaagcagcgccaccggtacgctgtcgtccatatactgcttcatcaggaacacccccagcgtcgaggggagatacggcagtatatacacgagcagggtgtcgatgatccccattttggtaaagatcaaatattgtgggatggccagcgtatacgcgttatagagcagcgcgaactgcacgatccagtaaaggatgttccggcctttgagatcgctcttggccaggacgaaggaggccatcgacgcgatgaaaatgtgtaccacaaccgtcacgactgccacgaacacactattgaatatgtatcgggacagcggcaccgataaactggtcagcagggtcggcagcgccgcgtagttcgccagtgtcggccgcttcaccgtaatcagcgtgggcgggaacagcctgagttcctcaagcggcttgaaggaggtggcaaccgaataaaccatcggcagaatcgtaaagaggcccgccgccagcagaagcagaaacagcaggatattgcccatccgggaacgggtataccgccgtgtctgcgatttgatgtatcttctcatgctccctttcccctatccatggaaattcaccgccttcgcctcagcgtccggccatgtcgagcagcttgccgaccagaacccgggtcaccgccatcagggcaaacaggaacacggagatagcggcggcgtaccccatttcaaagcggacggtacccacgtcggtcagatgggtcacgatcgtttcggtggaatagttcgtactgggccagccggtcaaggtcgtggctacctggctgatggaaaacaccgactggatctgcatgacacagccgaacagcaggatgtttttcatcgacggcagggtgatataccacatctcctgccaccggttggtgatgccgtcgatgacccccgcttcatacagctcggtattgacgttttgaaggccggcgatattggccaggaaagaaacccccatacccatccaaagctggacgatgatgacaatcgtcatggcgtaggcaggctccttgagccactggatgggatagctgatgaagcccatggacatcagcatgctgttgacatatccatagctgtcgccgctgaagaggatggaccacaggaaatacacgtttccagctagggccggcgaatagaaaaggaaggccagcagcccccggacatggggattgaactcgttgatgatccaggccagaatgaatgccagcacaaatccaatggggccggcgatcacggatatatacagggtgttgcgcaccgagatcaggaacaccgagtcctccaggaacatccgcttgaaattctcaatccagacaaaggacggcgccgataccatatcgtagttgaaaaagctcagcaccagggaggtgaggatcggcaggatggtaaacaggaaaaacaggatcataaacggcgccagcatgatgtagagcggcacccgggatcccaggggatgcttgattttatgcggcttggaacccgccttggcaggcagagcggcttgcattggacgtcacacctttctgttgtaacaggacgcgctcagccgtccagatggtactcctggcgcttgcgggtgatttcgttgtcgacttccttgctccatttgatgagcatatcccgcggcttcttatacatgtaagccgtgttccaataggcttggtcgatagcccgggaagtgaagtaaccgccggggacctccgggatctcccggaccttggaccactgccccagcatggtctccaagccgtttccggcccaggagaggcggctgaaagctgtcacgttggccgtggcgggacgggcggaaatgcccagcaccgcctccaggtcagatgcatatcggtactgtgcgtccgcgctgacccaccatttcaggaattcccacgccttttccacgttctggctgtccttgaggatgacgcagcccgttccgcccccggcggaggagttgtcgatcgtaccgtcctccttcagcatgcccgggatctccgacatctcccagcgtccggtgatctcaggcgccgcgacgctgagcatggcatactggtcatatgtggcgatggccatcggcatctcgccggtacggaaccgggtagagaaatcgtaatcgatgggcagcctgtacttggtatagagctccgtccagtaggtgaaggcctgcacggcctccggctccgtcaaagcggtggccgtgtgcgtgtcgttatacatctggccgccgaattggttgaggaaggtcggaaacaggttcagcgctcctatgcccacctccatagtcgccacatccgagatccgggcgtaagggataccgacctgcaggttataccgctgtgccatcgtcaccgcagcgaggaattcgtcccatgttttgggaacttccagccccatctccgcgagcacgtcggtacggctgaacagcatataatacagctgtgtgtcgggcagcgcatagcagccgccgttgtactcataaggcagtgtagcccccggcatatactgggcagggtcgttcaccagctcctcaaagcccggcagggtggaaagatcgtagagaacccctctcatcgccatgttgaccggctgggttcgggacatggtcagcaccacgtcgggcgttttccccgacagcatagcctgcaccagcgtggcgttgaccacctgcacatgcacggtggtgccatattccgtggtgaacatatcccggatcatgaaatcgagcacccgggattggtcgcggccccaatatacccagaccgtcaattcatctccgcccttggcagaggaaaaggtactgtaatccgccatgaaagaggagatgaagcgtttgaacg

SEQ ID NO: 3112 - DNA, 4115 bp, Unknown
  16S sequences of unknown bacteria
acacggtttgcggtttgcttggaaaaattaaagttttagttaataaatgatatgttgaaaattgtaaatttcttgcattttttgtcacatgtgctataatcaagatggatttaaataaatttttggttgaatgttgtctttttaaatatatggattgataagagatatggaacggaaaccacagcgaataccgtgatttctgagtatagaggttaaaaatatgactgagcttgaaaaaattacggaaaaactgtgggatatgtatataggcaggaaggatgatataacagaactgctggaatattacgacgataatattacggttataggcaccggagagtgggaatattgccgcaacaaggcagagtacgccgaatatttaaaaaatgaacgcataaagagagaccaatcggtttattacaaggaatatttttcatgccgtgagaagaaaatcaacgaaaagtcctccgccgtttacggccgtcttatactgtgcaacaaagacgataaaaacataaggatgtatatccgttttacacatttatatgaattagaaaacggcaagccgagggtggtgcttattcataaatcctgccctaacaaagaacagcttgccggagaagtagtgcctcacagcttgagtaaaaaattaggagaagcaagtgaaaagtatgataatttgcaaaaaatcgtcatgacagataacgagataatcgcaaacttgggctacggcctttggagaatagaaattcccgccgacggtgaaccgcagatgtttgtatcaccttacttaaagaaaatgcttgtggtcgaggataaaaatttttccccggaagagatgtataaatactggcgcgcccatattttagaggaaaatattcagtttatgggcaaaaccggcaaagttgaagttggggatacttttgaaatactttataagtgggacaacccggaaatcggtatgcagtatataagatgcggcggtatggttaatgccgttgacagccggcgaaaatttttaaggggttatttgggtgatgtaacaaagcaaactgtggaaacattggaaatccaaagagacctaaaacaggcaaaggaagaggcagaaagggcaaacgcagcaaaatccagctttatttcaagaatatcccacgatatgcgtacgcctctaaacggaattatcggcacactggaaattgaggaccacaattcggacaatgtggaattgcttaaagagttgcgagccaagcaaaaagtggcggcaggtcatctttcgtctttgataaacgacgtgctggatttaagcaagttagagggagaaaactctgagcttaacagggaagttttcagtatgcccgatttgatgaaagatgtttacaccatggccggcttgaaagccggggagtttggcataacattagacggtaaatccattgccgatatgagaacaccttatgtttacggttcgcctttgcatctgcgacaggtgcttttgaatattttgggcaactgcgtaaagtacaacaagcccaatggcagcattacatgcaatgttcggcaaattgcggacaaagacggtaaggctgtttaccgctgggtcatcagcgataccggcataggcatgagccgggaatttttaaagcatatttttgagccttttgcccaggaacacagcaacgcaagaacggtatttaaaggcaccggactgggtatggccattgtaaaaagtttagttgacaaaatgggcggcaccatggaggtaagcagccgagagggggaaggcagtgaatttacaattacaattccatttgacccggcacaggaaaaggactatacctcagtaatggagtccacggcggttacggacattcacggagttaaaattttgcttgccgaggacaacgatttaagcagagaggttgccgcaacccttttgaaagagcaaggggcaattatccgggaggctacaaacggcgaagaagttttaaatatggtaaaagacagccggcccggcacctacgatgttattttgatggatattatgatgccgaaaatggacggtataaccgccacaaagaaaataagggaacttgacagggccgatgcaaagaccttgcctataatagccctttccgcaaatgcatttgcagaggatattcgcaaaacaaaggctgcgggaatgaaccggcatctgtccaaacccattaagattaaagagcttgtggtggaaatttcaaaatgtgttttcggggataaaaatgcccgggaaaaagaataaaccggactgctaatacataattattagtcataatctacaattaagatacaaaaatattgtcatttgcctttgttgacaccgggtaaatatagttatacaattattatattgattaaattaggagcttttaaaatgaaaatacttgatttcggttcacttaatatagaccgtgtttatgccatggatcactttgtaacaccgggggagaccatatcttcttcttctctcaatgtgggttgcggcggcaaaggcttaaaccaggccatagcctgtaaaaaagccggcagtgaagtttatatggcaggtaagataggttccgacggcatggcattgctgcggaagcttaaagaattcggcgtagataccgattatgtgcggattcgggaaaacgaattttccggccacgcaattattcaggtggataaaagcggacaaaataacataattttgtacggcggcacaaaccgcaccatagacaaaaattatgttgataccgtttttgaaaaattcggcaaaggggatattctccttttgcaaaacgaaatttcctgccttgattacataatcgaaaaaggccgggaaaagggcatgacagttgttttaaatccaagccctatggacgaaaaacttttgcggtgcgatctgtcaaaggtttctatattcattatgaacgaagtcgaggcaaaggcgatttgcggttttgacagcgccgaaaaagccattgaagttttgcataaaaaatatcccaattcaaaaatcgtaatcacattgggcggggacggctcggtttattttgacggcacaaaaatatatcgtcggggtatttacaaggtaaatgccgttgacacaaccgccgccggagatacctttacaggctacttcttaaacggaattttaaccggaatgtaccctgaagaaattttaaaaatgtctgctaaggcaagcgcaatggcagtttcaaaacacggtgctgcggacagcattccttttaaagaagaagttttggcacggcagcttgaaatggcgtaaaaaaccgttttataggctttggcaataaaaaagtgttgacaaaaatattgctttgttatataatgatttagcaatatttaacggacctttagctcagttggttagagcatccggctcataaccggacggtccacagttcgagtctgtgaaggtccaccattgcaaaccgcaaagatattctttgcggtttttttattgtgtttgacttttaagggtttatgactgaaatttgatgtaaacaggttgtttgtgtgcaaacccggggtttgcataggcgttcaatgaacgcccctacggattgattttataaatatatttatctgtaaccgtaattcaatacaaacaatccgcaaaacaacccctcagacggctaacgccgccagctccccttgcacaagggagcctaaggtgttgctaacctttgaaaacgttattttgtatttgatatttatttataaattatattgtttaaaatggctttccgctataaatagcaagccaaacagacagcaaaatttgccctccttgtgtaagggagggtgtcggcgtagtcgacgggagggttgattgaaaatctataaacttataattttcaataaaatcggctttctttggtacacttgtttgattgtaaattagcatttcaaaccgaacgaattgtaaggctctctttggtaaagagagctgtcagcggtagctgactgagagattggaaactttttgtttatttacgatgttcggttgcaggttcggttgaaaatcaggttatcataccaaggtcaatccctccggtttttcttacgaaaaa

SEQ ID NO: 3113 - DNA, 13357 bp, Unknown
  16S sequences of unknown bacteria
ccggaaccgccataaaaacaggcataccgtccaaactggcttttacctgcggatcagacaaggcaatcgctgcgcccaatacgccggtcagctgggcatggtgtccgcagcagtgagccgcccctgtctcgggattggtatgagaagcgttagaaatcggcagcgcatccaactcgcccataactgccacccggagtttttgatctctggtaccggacagctcgcttttgaccccggtaacggcaagcccctcctgcggctgcatccccagccgacgcagcgcctcggcaaacttacccgccgtacgatgctcctgatagcccaattccgcatggtggaaaatatcccggccaaaggccttgatctcttctgcatgcgcatcaattacctgaaggattttctgttctattgcgtccattcttcccatcccttctgccggcaattttgccgtgtaaactgataaaatcatcatatcaaatcctattcattccgtcaatacgtcaccacagtgaatcgaaaagaccattttactagcagcaaatagaccttttcttcccttttatgggaaattattatcatttttgttataaaaaaaggatataacggggttatatggttgggaaaaatccaatgggttttccttgttttttcacccggaagggcgtaaaatacttttgaatacaggcggcggatatcctgctgcaggaaggcgagatcgatggaaaagaaaaaagtcagacgttatactcggcgtgaagtacggcgcaatcggatgatagctttttgctgtctggtcgtgctggcaattcttctgattgctttgattgtttggggaatcaaaaatctcgtaagcggcgatgacgggaaaagcagttctgaaagctctttgggaacagtctctacctttcaaagttcttcaccggataatgcaagcaattcggacagctctttatccggagcggttgtctccgggggcgattcatcagcagatgaatctgcttccggtacttccagctcttcgtcctcctcaaaggtttcttccagcacttccacatctgctttcgattccagtgatccatattatgaatcctccatgccgcttttggtgaacccggatcatttaataccagatgattattctcccacagtggtcagtgttggcggcaattataagctggaaagcaaagcggcagcagcctggcaggatatgcaggccgccgcatcccgagacggcgtttccctgtggattatctcagcttaccgcactttggagcggcagacagagctttatcaggaaaaggtagaagaatataaaaatctgggatataatgaaggggacgcaaaaatagaggccggcaaatgggtggcagttcccggcacatcagagcattgtcttggttatgcggcagacctttgttcattggaagaaaactttgaaaattccgatcaatttgcctggctgcagaagcattgcgcggaatacggttttattctgcgctatcccaaagacaaagtcgatatcaccaaaatcagctatgaaccttggcattaccgttacgtaggcagcaatcatgcacagattatcatgtctcaaggtctgtgtctggaggaatatctggaacaatacagctcttaaaaatctttcgggcaaggtatagccctaccgttacttttccaaaaagaaccattcatctttgatgaatggttcttttttcgtgttccggctcagctgcgtatgatctggttttcaaccgttccacttctgatcgcatcttctgttggaaaattttcagaatcggatccatcttaaaagagttatttggttaggccatttttctggcggtaaagcttttttccttggcaaacacgcccataaagaagtaccagtttcctcagctcacgttttgtctttcccgcaaaaagtccggcaaaacacaacaaagatttaccgcttgttcataattttattttcctcccctcttgcatttatcacaaaaatgtactatgatactttttagcactcaaatagttagactgctaaaatcacaagcgaggtggatttctcatggcaaccaaacaattcaaagcagaatccaagcgtttgctggatttgatgattcattccatctacacccacaaagaaattttcctgcgggaactgatctccaatgccagcgacgcgatcgataagctatactaccgggctttaagcgaaaacatcaccggcctttcccgggacgattttgccattaccctcaccatcgacaaggaaagccgtactctgactgtatctgacaacggctgcggcatgactcgggatgagttggaaagcaatcttggcaccattgccaaaagcggctctctcgcctttaaaaaggaaaaagaagccaaagaggatatcgacatcatcggccagttcggcgtagggttttacgctgcctttatggtggctgacgaagtaaaggtcatcagccgcaactatcagggagacgaagcctggtgctggcagtccaaggggtctgagggctatacggtcaccccagcagaaaaagacggccatggcaccgacattattttgaagatcaaagaaagttccgacgaggaaaactacgacgaattcctcgaccaataccggatcgaaagtctggtcaaaaagtattccgactatatccgctaccctatcaaaatggaaaaaaccaaaaaccgaaaaaaagaagattccgatgagtacgagtcttataccgaagtggatacgctcaacagcatggtacccatctggagaaaaaacaaaagcgagatatcgcacgaagattactgtcaattttataaagacaaatttttcgattacaacgaccccctgtgggtgatccatagttctaccgaaggcgcttctacctacaacgcgctgctgtttatcccggaaaaacccgcttttgattattacagccgggactttgaaaaagggctgcagctgtacgccagcggtgttctgatcatggataaatgcgccgatctgctgcctgattgtttcagctttgtccgaggtttagtggattctcaggatttgtctttgaacatctcccgcgaaatgctccagcacgaccgccagttaaagctcattgaatcccgtttggaaaaaaagattaaatctgagcttttgtctatgctcaaaaatgaccgggaaaaatatgagactttctggaaaggttttggccggcagttaaaatacggcctttattcctctttcggggcgaacagtgaactgttgagcgatcttttgttgttctattcctcccacgaaaaaaagctttccacattggaagaatatattggccggatgccggaagaccaaaaatatatttactacgcatgcggcgattcgctggagcgcatcgatcagctgccgcaggctgagctggtcaaagacaaaggatacgaaattctttattttaccgaggacgtggatgaatttgtcaccaagatgatgccggtttatcaagaaaaagagtttcgttcggtctcatccaatgatctcggattggaaagtgaaaaggaaaaggaagaaaccaaaaagcagcaggaacaaaacaaggatttgtttggcgcaatcaaagaggcattgggagagcgagtgactgaggttcgtttgtccgggcggcttaaaaacgcggcctgctgtcttaccgccaaaggcccggtatctctggagatggagcgggtgctgggcgctatgcccggagagcaaaaggtaaaagcagaacgtgttctggaattaaaccccgaccatgaaatttttccgatcctgcaaaaattatattccgaacacaaagaagatttggcagattatgccgagcttttatatgggcaggctctcattcgcgaaggtatgcttccggaagattctgccgctttcgctgctgcaatgtgccgtttaatggagcgaaaagaaaaataaacttcccttttcaaaaagaatttgttaagataaaagagtctgtagtgctttattggacaggctcttttcttttacctgaaataatcgtgctttttctttgtttatggtatagaagaatagaaaagcaccaatggtaaagaaaattatgccttctgctcaatgcttttggtaaaggagaaccgaatttggaaacgatttttaatgctcttacctttttgggaaacgaatttgctttgttcatcatttccatgatccccttgattgaactgcgaggagcagtcattttgggagccgctttggacatgaactgggttattgtgctgatcgtatcggtcattggcaatatggttcccatcccttttctgctgttatttggccgtaagatcctcgactggctgaaaaccgttccgcttttttccaagctggcccattggtacgaagaaaaactggttaaaaaggcggatcaaatcaacgaatacgccaaatggggactgtttttgcttgtggcgattccactgccaggcaccggtgcctggactggcgttttggtagcaacttttctgaatatgaaaatgcgtcaggcgcttcccatgatctttttaggtgtgcttgctgcgggaattgttatggtaatcggttcttacggtctgttcggtgcaattcgtttgttttaatcgcggctttacttccgcccgccttgatgaacaaaaagccctttgcaaaaaagcaaaaggcttttttatttttctgttttttgggcgcataacagccacaaaaaatcccaaactaaaaaagaatccgacatcttccaaaaagcatggaaaatctcgtcggatacggcaaaaacaggtcaaacaaaagagaataatcatcccgttctggcaaacaatagaactactgatcctgacatccatcgtcccggtaaaaacgaaggatctcaacggccaatgccgtatccactgtttttaacatcatctctgagccggacgatcctgtaaacatgccataaggcaaagaataaacgcacggaggaactttaaatatgaaagccactggaattgtcagacgaattgacgatctaggccgggtcgtcatcccaaaagaaatcagacggactatgcggattcgagaaggtgacccgttggaaatttacacagataacgacggagaggtcatctttaaaaaatattctcctatcggcgaactctcagggtttgccggcatttacgctgaggtgctgcataaaaccggcggttccccggtggtcgtttgcgaccgggatcatgttgtcgccgtctccggtatccccaaaaaagaactgttggagcggcgggtatccccatctttagaggaaatgatggaggccagacagacctttactctgaccgcttccaacgcaggcagattacagccggtagaaggctctgaccgcctggctctagccgctgccccaattttgtccgcgggggatgtctgcggcgctgttatgttcttgaaagaagattccaccgcagctgccagtgaagcagatgtgaaactcatcagtgccgctgcttcttttcttggacgtcagatggaagaataacttgtcaaacccacaagcggaaaggcgatggaaatcccatcgcctttctgcttttcttcttagccatatcaaaaaagctatacaatatatgccaaaatgctcccgtggtatatctttgcttagaaaggtaatctcaaaaaaatctctaaaaagaaaaaccagggaatttgtgccattccacattctcccctggttttctttttatctataatatttatgacaatggatagttcccctgttcgttgtataaaatatatccggttatgccggattcctccaaagcacggatctgttcttcaatctgaactgccgtgtactccagagatgatgacgcatctgtatatgcctgcagcattggcaaaaagcttttgtccgcacccgaagccttcagctgtaacaaaactgcctttaccgtatcgtatggctgcccggccggatccgccatggtcagcgattcgggacggaccccacttgccaaaaatgccggccgtacgtccgggcagaaattttctatcggataatacaaaccgccggaatcataagaagacgtttccattcccagcatcgcttgggcagaggacgcatagattaaagttccgttattctctttcagcagttcttccatatcctgcacaaaatcagacagcacctgttgacggcttttcgtctgtgcaccgtatcccgccagctccagactatatccagcgggaaactgcactccatccagcataattgcagaacaaccggcgcgcacacactccaaagacagatccgcaatatacatttgcgccacttcagaataggggttcagccagctttttccgccgttttcctttgaattatccagccaaagcatttccgtatcctgatattttaccgccgcttttttcaaaatcagagaactaagcggatcccgaaatgcgtaaattcttgcgattactgtcatgccgttttcttttgccaacgccgtaatctgttccatatccaccgcaccggccgcctgtgctgcaacttccgccaccgtttgattcgcagattgatacagcacctgaccttgtgcatttttggcgtcgaccaaaatgcagttgatatcctgccgtttcaaatccgacagtgtctggctcaactgttcagtattctgcagcgccgtcaacgggagatatactcccctaacctgtgacaagttcaatgttaccgactgctgagaatccgtctgtggctgttccggcagcgactctgtcaactgggatgcatctcccggttctgatgatggcagcgtgttttccggcaccttcattgtaccagacaaaaactgggaaaccggctcatacagtacccatcctaagcaagcgatgccggctaaaatgacaacagtcagcacaatacccattacctttgacaaagtactccggccgccataaatgcgccggtagcgctttatttttttctgtccttttgccaaaacgcctcacctcttggttttgatgtctttctacacaaagcttacccttgagagactatatttattccatactctgctttatgccgccaactgatgccctactaaaccatataaagaaagggaaatcagccccacataaaccaattctgccggcaatccccgaaatgctttgggaatattacagatgctcatacagtgccgcccctgctccagcaaaaatatagccagcagaaaggaaagaccgattcccaatccataaaccgttgattccagccaatgaagcccagaatatacggtcaatgccattgcgccataggcggcacagttaaaaaaggccattgtcaacagcatactgtggtcgtggaaccaatcccgttttttccagttcagcagaaagcaaactattccatacagcagcgtcaaaatcagcacatagacaaccggacgcaaatattgaacattttcccactgactgataagcggattcaaaagtgccgcaaacaaagccgcgactgttgtaatacctgtcaaaatcagtccaaactgccgaagcccttttctgcctccgggaatcaccaaaagcgaggtaatatccaaagctctggaaaagactgcgttttgtagaacaagcgccgttaaaagaagcgaaaaaattccgattaacgtattattcatcgctgagtcctccatttcttttgctgccgccgaaccaaagctacaacatcgcggcttctgtcaacgcaccaacgcaaaacggctgctgtcacgccaacggtaataaaaccggcaaaggcataagctactgccggaaatttcaccgaaagggcagtggaatttcccccaaaagtgccataagccaaccattcctgcagcgccgaaaccgccaatacgcaaatagaaaatccaactgtctggcaaactccttcccataaagcccactgcggttttttttcttggcacagaggagcgcggacaatccaaaccgtattcaatgccacaacagaaaaatacatgcccagcgaatcaaacaggttgggagcaattcctccggccaacaaccgcgtaggaatgagcatcagtgctgccactaccgcacaaatcgcagtacgcgcatactgagggacctttttcggcagcataccaagaaaggaggataccactaaaaccggtattgtaaccatgccgaataccaaagacagccccactccgtttttgacagtaaaacttcccaccacagctggcgccagagccaatccagttacccaaactggatttttgacaaatatcaaatcaagctctttgcgcagattttttttcactgagttttgttcttgttgcaagataaaccctccttaaccggcgcaaaagccgttcgctgtatcggtctaacgtaaaactaaacacattggttaaaagcaatgcaaaagcaaatgtctgctccgcccggccaaagcgctggaatagaatggtaaatacagctgccagcgcaccgtaagccaatcgggagctggagcgtttgggaagagttcccggctcattcagcatgaaaatgccgccgaacacccacattcctgtggtcgcttcatataccaatgacatcggaccgctttctggaattctggggaacagaagcattgccagtaccatgatcccgaaaaaagcagcaggtgcctgccagctgatcgcaccacggaacagcagataaaacagacaggtcgccaataccagtatattggtaaggcccataggccccaaaaaacggcccaacaaaagatctaaaatatcattggcaggtacgcccccctggaaaagattccaggcgggtccgctggaaagtcccgcggaaatggttccgaacggttccaacgaggaaaaaggcgcaggataagaaaatacctgcacaggccaacaagctactgcaaaggcaaagcctgccgcagcgggattaaaggcgctttgtcccacaccgccgaatacatgcttcacaaaaacaacggcaaacacagaagcggaaaccaccacataataaggcgttgccgcagacatcatcagcggaagcatcataccggtaaccaccgatgaaatatcccggaaatagggttttttcccttccagcaaaatgcagacaaaatcactgacaaccgccgccgcgacagaagccaaacccaacatcaatgcccttaatccgtaaaagtaaaacgccataaaatataaaggcaataaggcaatcaccacatccatcataacggtgaaagcggaatcccggttccttacatacggcgctttcggttcatactgcaacacgatcagtcaccctccttctcatggcggcggcgcttcatttcgattttggccagtttaatattttcggcaatatcgattttagaagggcaaatataagagcaggttccgcagccaatacagcggtgaatatcgtaaaaggacaatgtctcatacttaccaagttcaatatatcggttgatataaaatggggtgagattttcagggcagacctcagcgcatcgtccacatccaatgcactggtaccgacgtttcttttcttcatctctcaaagccaaaaccgcccgggacatcgtccctaccagatagctgtccggatcctcacaaatcgcgccagtcatgctcccgccgatcaccacataccctggttcttccgccagtccacaacgctcaaacagctgcgtcggcgtcataccgatggatacttccaaattggtcggattcgctacgcagatacctgctaccgttacaaagcaggtggactgaatacgatgttcgtataccgcacgatacagatgaatcaaactgcaaacgccaattaacacagcagggccatggctgtcaaaatcgtccatggtccgaaattctgctgggtatcgaccgcgaatccggcgaatttcgactccatcaatatccttgggaagttttgtcttgagatccagatcgctcaagtttttgtaaatggcaaagtaaatcttggggtttcccacagctttcgctgccagccgcaagccccccccagcttcttttttcaaaaacagcagtgggttgagctggctggatacgtaaggctcatcgtcgatggcatctcccaccacaaccctaatgttcatacgccgggctttctccaatttttcatgcaaaaacaggccgtcccgttcatcgacaatccgagccaacctcgcaatttcgatgatctgtttgccggaaagtgctgcaccatcataaggcaaatcgctttcaaacagcattcccgcataattcgcgtttaaaaaggtgcgcagctttcggcgaagagccggttcctttcgttgttctaaaatgattccgcgggtaaaatttcctgacacccacttcaccctttccatgtttattgggaaaagctttctcccttgcttccaccggtcaaaaaacaccgcatgccgctgtcaatcctcataccgtcttattgtgcaggcacggccccgtgcaaaatggcctcgatggctttctgccgatccgtggtgccaaataccgctgatccggccaccaatatatctgcgcccgccgctaccgcggtccccgctgtgacggcatcaattccgccgtccacctgaacccaaagagatgcatgatttttttttgcccaattacgcagatattctaccttgcccatcatctgcggcatgaatttctgcccgccaaagcctggttccactgtcatcaccaacgccatatccagttgcggcaaaaaaggctccagcacagatatatccgttgctggctttacagccatccctactttaagccccaggctccggatcacatcaaccgtttgctgtgcattcgcctgcgactcgtaatgaaaagttatcatatctgcccccgctttcgcaaaggaaagcgcataagtccgcggatcgctgatcatcaaatgaacatcaaaaaacagctttgttctgggccgcaacgacgaaataacacaactgccaaatgaaatattcgggacaaaatgcccgtccataacatcaatatgaagcatgtgtgcgccactggcctctacgtcggcgacctcctgttccagtctggaaaaatctgcggaaaggatggaaggcgaaatccgtatcataaaaaagctccctgcagcggcctgatcaggcctgtcaaattggtatcgcaagcatctaagcaagaacataaacggattcgttttctggctttctttggggcggtttgtccgtcttacaaaaaacttttccgtcaaaacgtttatctatgctgtttcattgatgcaaggcataatacagatttattttaaatcatctgtcggaaaacgtcaaataaaatgggctgatttttacaatttggtcatatcccggagaatcggggaggccgtttttctctttgaaccggaaacttccaaatgcctaatcggcctggaccaaactccatgtgctatggtaagaatggtgttagcgaatacactgtccatagtttgcaaatcaatcgatttgttgttataataagaaaaaacaacgggagcaaaacaaattgagctggaaaggactgatgaatgatatgaaacacaatttactggaaaaattaggtgtcagcattccgcagctgggccttggatgtatgcgcctgccgacggataatgataccatcgactatgcccacgcgcaaaaaattgtagattatgctatgaaaaacggtgtcaattattttgataccgcatatatgtatcacgatggagaagcgcaatactttttgggcaaagcgcttgccaaatatccacgggcaagttattttctaacaaacaaattgcccatttggtattgcaaagaaccatctgatatggaaaagatctttcaggaccaattacagcgctgccggaccagttattttgatttttattttatgcactccatgaacgacgaacactggaaaatggcaaaagaactaggccttgtcgaatttatgaagcagaaaaagaacgaagggtccgccaaagccatcgggttctcttttcacggcactctgccgctattggaagaaatggtagaagctgctgactgggattttgtgcagctgcaattaaattatctggattgggacaaccagaatgccaaggcgttttatgaggtattagagaaaaaaggaatcccctgttttgttatggagcctgtccgaggcggctatctggcaactttgactcccagcgcacagaaggtgttccaaaaagctgctccggaacgttcgatggtatcttgggcgtatcagtggcttttatcaaaaccgaacgtcaaggtcgtattaaccggcgcctcttctctggagcaattcgtagaaaacgtcagcctatttaatactttgtctcccttgtccgaaaaagaagctgtggtaattgacaatgcaatccgtgaactcaatgccatccccaccgtcccctgcaccggctgccgctattgtatggaatgccccgcaggggtagatatccctgccgtatttgccgcgtataattaccgcgccagccatcatacaatggcgcaagtccgcaaaaaatacgaagaaattcctgcagggaaccgggcagatgcctgtgttagctgtcgggtctgctgcgataaatgtcctcagtctattgatatcccagcgcagcttgcccgtgtcaaggaagaaatttatgctgaataatccgatgcaatcccataccgcgccaaatggcgcggtatggtgctattagatgcgcagctttcgcccttttggctattcatgggctttggggccaccaaaaaagctggcgcgcttgtgcttttgcatcgtaaccggggccttcttcatcttatggccttttcttgtctgctgctaccgaaaaagaaatgccttatcagcaaaaactccctctgcaaaaaatttgcagagggagttttattcgctcatatatttccgaaatgctattttcgccgcctttacaatatccctgataacacgcatttgctgtatcgtacagcctttcagcaactcttcaatttcttttcttgaagggtccgctccactttgcccatctgagagcaaatcatctgtacgcacatttaagctatcggctatggcaacaaaaaccgacagactcagtttggtatttccggtttctatgtggctcatatgtgtgactgaaacaccgatccgctctgccaactgctcttgcgaaatgccctgtgcttttctgtatttccgaattttttgcccgattaaatagtagtccacttgaaatcacgctcatatttttttattacacttgaattgtatcggctattttatgcttatataattaaaatatgagagtgtgtaaaat

SEQ ID NO: 3114 - DNA, 7582 bp, Unknown
  16S sequences of unknown bacteria
gaaatgcaaaataattgacaaaaggagataaaaaaatctgcctaaataaagcagattcggaactttatgttatatgcgacgttcaaaactcaggaaatgttcacacgagcgaagcgatttcatggtaaaatgatactaacaacggagagctgtcggcagtctatgcattctgagaggcagtaaactgttgggtaaacttgctgcgggatggacctctatccctaatatcaactttttcatttcgtcccgtggcagccgtgtgtaattgcacggtctttttttgtatgcgatgtaggcatccgaggaattctgcaaggaaatgtgctataatacatcaatgaaggtgattgatggatgaatatgcagagaaattcacgctgctggtgcggcagcggaaagaagtacaaacagtgtcatgaaaagtgggatgaccgctataatgtcatgaagctggaggggcatgtgatgcctgagcgcacgctgatcaagagccctgaggacatccgcctgatccgtaaggcggcagcgatcaacaacggcgtgctggatgaggtcgccaagcatatccgccctggcatgacgacagaagcggtcaatacgctcgtgcatgagtttacgatcaagcatggcgggatccccgccccgctcaactatgagggtttccccaagagcgtctgcacatcggtcaacgatgaggtctgccacggcattcctgatcgcagcgtcgtgctccaggagggggacatcgtcaatgtggacgtgacgacgatctacaagggacattacgcggatgcatcgcgcatgttcatgatcggcgaggtgagcgaagaggcgcagcggctggggggtgtctgcagatcggcatcgacgccatcaggccgtggggccatgtcggcgatatcggcgcggccatcatggagcatgcgcaccgcaacggctataccgttgtccgtgattttgcgggacatggcgtaggcaacgggttccatgaggatcctgtcgttccgcacatcggacgcaagggcgcagggatggtgctggcgccgggcatggtgatcacggtggagccgatgatcaatgccggcggatgggagctgtatatcgacgccgacaacgggtggaccgcctataccgcggatggcagcctcagcgcgcagtgggaacacaccctgctcatcactgagcatggcgtggagatcctcgcctattgacgctgatttgtcatctgcacagaaacgtgctataatttcagtgttttgattgtcaaaacgaaaaggagtgttttggaatggagaaatggagcatcgaacaatactgtgatcgtctgcaggccatgaagtgtgaagcacatgataaattatggctgtatatcgaagtaaatgccaaagaattcatgaatgaatgcgaaccgggcgtaaagaatctgaacgcatgctgcaaggcaatgctgagcaagatgctggagggagacgggttcatcgttgaaccgaagagccgcagcaagtgtgccggcaccctgaccattcgttactatgtcgacaatctgagcccagagcgccgtacgtatgcagaagcgatggaagatcagaaataacagctgatggacattcaccccagcggatggatgtctttttatctattcaggaggaacagagatgaagacgatcaagagtttttgcgtcgatcatgacgtgctgaaaaaagggatgtacatctcccgcatcgacggcgatgtggtcacttatgatttgcggatggtggtgccgaatcagggcccttatctggaaaatgccggcctgcatacctttgagcatctgctcgcgacatatgtgcgcaattcttcatggagcgatgcgatcgtatatgccggtccgatgggctgccgcacagggttttatctgctgacgcgggataccatgtctcatgcagaggcattgcggctggttcaggaggcgatggcgttcatcagcgcgtttgacgcgccgatcccaggcgctcagtacagccgggaatgcggcaattatctcgatcatgacctgccggcagccagggcttacgcacgcgattatgccgaagtgctgaaggactggagcgtcgaaaagatgcattatgaggcatgatgcgctgaatcgaatgttcagcggtatgctcgctaaaatgggtctttgaacagattccgcatgtttctttagagaatcttaagatttatgttctattctgtattacagaagaaggaaattgatgttattcttaagatgacaggacatttccatgcatgacaggaggatgaatgaacatgtcggaaaagcagctgcaggtgctttatgtggaagatgaccaggaaatggcaaggagtctggcgctggctctgaaaagatacaacatctcactgaccgctgccggctcatatcaccgagcgtggcagctgatccagacgagatgcttcgatctgtatttgatcgatgtctttctcaaggatggaaatggttttgacttgtgccgggagatccgagaatatgagcggacgccggtcatctttctgaccagcgcggccgatgaaccagagcagatcaaaggatatgagatcggcggggatgcttatgtcagcaagccatttacgatcgagagcctgatggcgcgggtgcatgccgtcatgcgcaggcagcactggcagaatgtccggcttcccaaccgggtgctgaccggaaacctgaagatcgatttcagcaggatgagcatatggcgcaacgcggagccgatcgcactgaccaagatgcagtttcgcatcctgcagctgctggtggaaaatgcccagaccgtggtgctccgcgataccatctgcaattatctctgggaagaacgcggcgtcatcatggagcagaatacgctgaatgtgcacgtgagcaatctgaagaaagcgcagaaagcagaaggcagctgcatcgagaccgtgcacaacatcggctatcgttggaatcagccggtggaaaaaggagagcggcggacgctgcaggaagaggaaaaagactgctgcaagagctgacaggacgcgcttccttttttcgctgagccggtttatactggacacagagaggaggtgcgtgaacatggaatttgacgcattgctggaacagcggcgcagcattcgccgttaccaggcacagccggtcggcaaggagcagatcgaacagatgatcgaggcggccattcaggcgccgacctggaaaaattcgcagaccggacggtatcatgtcgtcatgtcgcagccgctgctggatcagctgaaagagcaggggctggcccgcttcaatgcggaaaatacgcatgatgcgccggtgctgatcgtcaccacgtttgtgaaggaccgcagcggatttgaaaagaacggacagccgagcaacgaactgggcaatggctggggctgctatgacctcgggctgcagaacatgaacctgctgctgaaggcggaagaactgggcctgagcacgctggtcatgggaatcagagacgcagaggcgatccgccgtctgcttggcatcgatgaagcggagaccatcgtcagcgtcatcagcgtgggctatcgggacatcgatccgcagaagccgctgcgcaagagcgtggatgacgtcgcatcattttattgatcaaggcatgcatgtctgaggatgtgcatgttttttagtgcgccttgcgcgcctggcgtaggaggagggcagggaggtggtgacatgatctcgctgctttgcggaatgctcgcgctgaatgcgctgctcaggcattatcaggcgcagcttcgtccgctctcgctcgtgctgcttaccgcaggcgcatggggactgtctgtctgtgcggatgatctgcgcacggcgttcttccgtgatgcgcagctgctgatcttgatcgcgatcgcgcagatcgatcgaaagcggatgatcattccggataggctttcgctggcgctgcttatcattggtcttctttccggtaatctgccctcgttggggcagatgctgatcgggatgagcgttcccgctttgctcatgctggcgatggatcatctgtggaagccctgcttcggcatgggcgatatcaagctgtgcctggtgtgcgggatgctgagggggacggatttcctgcgtgccttgcagctgtcgctcatcgcgggaggcctgtgcgcggcgctgctgctcatcagaaagcggtgcaggccggacagccgtctgccctttgcgccatggatcgtccttgcggatgcggcatccctgctggagatttccctggatcttctgctataatgagggagatgaggtgatgatatggatcgcagagacaggatcgtggaagaaatcaggaagagcggaaagccgctgtcggccagtgccctggcagccatgctgcatgtatcccggcagatcatcgtcggtgatgtggcgctgctcagggcaaggggcatcggcatcatcgccacgccgcgcggctatgtgctggaggagcagacgcatccttgcgagaagaagatcgccgtcatgcatgggcgtgagcagctgcaggaggagctgtacaccatcgtggattatgggtgcacggtggtggatgtcatcgtcgagcatcccctttatggagagctggtcggccagctgcatctgtcttcccgttatgatgtcgatcgtttcctggacagcatccgcgaaagcgaaccgctcagtcagctgacccatggcgttcatctgcacaccatccgttatccggatgaagaggcattcgcaaagatgaaagaggcgctgcgcgaaaaagggatcctgtatccgcagaagatcggataatgagagcatgtcatgaggcacatgcttttttttcgtatgtgcgcgccttatcctggaaatactgctaatggtgattagggtggatgaaggcatcttgcgtaagtgagggatgaaaggaggaatcttgatggatgtcagaacattatatacgaagatcagaaatggcagtgagcatcaggtccaggagatgcaggtcatcatggaatcgttcctgaaacagcgatcccgcagcttcagcgagctgaatcataaggagcaggcggaacggctgatctcggaggcgaatctggaggagcgtcagcatctgtattcttgtacggcattaggcgtcgatgtgcgggtcggcgacatctgctttatcgatttcggggcagacgcttaccagtgtgagatcggatttcagcatttcggcatcatcatgaagctgtttcacggcaaggcattcgtcattccgatgagcggcaatcccagcgcggcggcacaggcttatgatgagcaggacaatccgcgcggcaagcgtcacttgatgcgcatgccgcatatcgaggggctcaataagcagtccacgctcctcaatgactgtaagttcatcaatacggcccgcatcatcgatgtgaaggcgcatgtggaccgcggcagtcctctgtttcagaagatccattcccgcatgcgtcaggtgatcggataaatcgcgcctgcgcagattccgacagtcttcgaatctggtgtttcttacaataagagacaagaggtgatgctgtggaaaaaacagcgatgaaggatcccgccgtgagccttcacatgaatctggagatcatcctgtatctgggcgccggtgtgctctgcgcttttctgccgctgcgcttccagtacctgatgctgtttccgtttcttacctatggatatctgcacaatcgcagagcgctcctgttttttctgttttcccacgtcctctttctcggggcgctgtcggtgtccacagcgtatctgacactgctgggcatcttgatcttcttcctgctggtgcaatgtgtccgctcgacacaccgtctgtcgctatggctgacgctgatcaacatcgccatgcagttcccttttgtcatccagatgcaggacgctgcgcagatcatctccatgatgctgctgctgatcgtgctgtatggggaacaatatgaaaaggatgcgtggatccgcaataaatggtgggacaatgatgtatggaaagggacgctgatcgtttccctttatttattcttcggcatcttgttcccgaagcaggagctgctgatcgcgacggcggcatcattggcggtcgcgctgttttgttcgccggcttccgctgcagtgctgttcttgatgatgcggacatgtgagccgcattttccgctgctctctgccatagggctgctggtgtttcatgcgaaggagatccgcatggaaggcaggatgctgctttatctggtcatcgtcatcctccagcatcctgactggcaggaactggctgcggcggccgcatgtctgctggtctttttgaccgcgcatctttatgtgcagcgcaagaagccgctggtccatccgatgcagggacaggatgagaagcagcagctgcgcagacggctgcagaacttttccgggatctttcattcgatggcccagttttaccgccagcatgcgcatgaggatgcggcgctgctgtttcagatggcggaaggcgtggaacagatgtccagagagctgttcgatgaccgggaacagctggatgagaagcagctgcgtgagatcctggagggctatcagtttgacgtctattcgctgaacatcgcgcacctggcagaaggcgatgtgcagatcgaaggggtggtcggacgcatcagcggaaaagagatggaaggcacgctgatgcctttgttgtctacattgtatcattgcagctttcggctcacgcatatggaagacagcaggtggctttgccgctcgacccgcttcgtagtgagctcggcgcctatgctgaaggtggaaggggcgtgtgagagcattgcggcagggtgcggggagaacggcgatacctgctcgctgtttcgctatggcgcatgcacgctgtgcacgatctcggatgggatgggcaacggggcgatggcggcggagagctcttcgctggtcagcggcatcttccagcggatgatcgtcagcggcatggagctttcacgcgcggtgcgcaccatcaaccagctggtgcacagcgatacttatgcgacattggatgccatctgcatcgatgcgcataagggcagcgcatatctggtgaagtccgctgcctgtccgacgctgctgctgcgcggcagcgaactgatccggctgagcggaagatcgctgcccatcggcatcgtggaagagatccagccagactgtctgcgtctgcagctgcaagagggtgatgagatcatcatgttcagcgatggcgtccatccccaggagatcctggaatggacgcgggaaaaggacgagacgcaggatgtgcgcggcgagctgagcgttttgatgcgtaagctgaagagccgtgagcgcagcgatgattcgacggtcgccatcttgaaggtggaacgatatgaggtgtgaaggcaggcgtgccatgcaccttttttattgccgtgcaacgggattgcctaaacattcctgctgtactataatacatccatggaaaaaatgaatcagctcaaacagggagcctggctggccgcggtgagcggcggcgcagactc

SEQ ID NO: 3115 - DNA, 3183 bp, Unknown
  16S sequences of unknown bacteria
gggaaagccggactggctgtccggctttcctgtccaaatttattgtaataggagtttggcagtatgcttttacaatggtccgccccgaatatatgcctcactcttttcagatttccggcctttcgggtaccgtagggcataaacaaaccggcaactgctttgatctcacaaaacaggttgccgatggttttgtgggtatgcaggagttatccaaaggactgtttttggttcagtctgaaatggcctttaagcgggaaacggaattgtacgaagaatatccagagcgcaaggtctttcagctttccttctgtatgaatgggatctgcgaatgggattatcgccaaaagcagggcgagcactaccagctttccccaacacagtgtagtttgcaatgtgggacgttttcacagtgcgtaagccatttcggttccgagcagccttaccataccttgagcatttcgctggaggaaggacgtttttcctcactgacagaagatttagaagcagcgcatttaattcggcgggatgataagatttgtacccatgtattttccaccacaccggagatacgccttgttttacagcagttgttggactgcccgcccgagcggaagctgcgcaagttgtatctggaaggaaaggttttagaactgctgtctttgttttgtgatgaagcgattggcaagcagaaaaataccaaagatatttccagagaagattaccgatgcttgatgaaagcgagggaaattatcgacaatcatttcctccatcctttgacaatcgcacagattgccgaacaatgttttttgagcgaaaccaaattgaaacaggggttcaaaatctgttttaattgcacggtttatgaatacatcgtggaaaaacgaatggagatggcctaccgcctgctgcaaagcggaaagtacaaggtaaaagacgtggtatggatggtaggatataccaacgcaagccattttatcgacgcttttaaaaaaagatatggcgttacgcccggagaaatttaagttcctactctgcgggaaaacttcggagaatcggcacttgccaatctttcgcatcatgttaaattaggagaaaaaatatgtctttctttcaaaacacctgcaaaccaaaaggattcgccgggaagatcatggtcaatatgatgaacaccggccatgccgcacttgcagaatggggcttgacgcacataaaaatccgcgacgatgatttctgtctggatattggctgcggtggaggggctaacctcaaacgccttttgggaaaaagttcaaatggacacataactggcgttgactactccgaagttagtgttcagaagtcgaaaaaacttaatcgggcagcaattcaggaaggccgatgcgaagttttgcaaggcaatgttatgaatctgccgttttcagaaaacacttttcacttggtaactgcctttgaaacaatctacttttggcccggtattcaagttgcttttcagcaagtatatcgtgtgcttaaaaatggaggaactttcctgatatgcaatgaatccaatgggaaaaatgcaaaggacgaaaaatggacagatataatccacggcatgacaatttatacttccgagcagattgagaaagaattgaaaaatgctggattttcaaaaattcaagtagagcaaaatgagaaaggttggctctgtgcgatttgcaaaagagataattgaaaatatgatcatacaaaaaaggtacgtcagcatacatacaacgctgtcgcacctttcattttgcttcaaacttatagccgataccgtagacgcttttcacatagtctggcaggttaggagcgatctttaacttcctccgcagattgctcacatggttattgactgctttgcgggaatagtaagtgtaatcttcttcccatactaattccataagcatttcataggtaaatacccgcttcggatttaagataagcagcgagaagatttcaaattccttgacggtcaattctatcggctgctcccggattgtaacaagtctttgctctaaacagaagtacaaatctccagatcgtgtttctgttaggggatggttcagcctttgggggatagaatatttaccgcggaagatggcctgatgtggtaaataaatcgggttagcatagtttgtttcactctcgaaaacaaactgcgcaagttcccgccgttgctctgcggatagcagagcaaacaacttttctccaatctgccagccagtttcagctaaatcaagcacagctaatttcccatatcaccacctccttagccttcattaaatgctttctttaatttctgaaaggattccgcactaactgcatgttcaatactgcaagcgtcttgttctgctattttggggtccacacctgccgctatgagccgttctgtaaaaaaacgatgcttttcataaatctgttcggaaagctgcaatcctgtttctgttaaggaaagtgtaccgtcagcgtttttaacaagatggccggatttggacaattccttgactgcccggcttacggaaggttttttcactcctaaatgctctgcaacatccacgcagcggacatagccatgacgctgctgcatcattaagactgcctccagataatcctccattgctgatgttaaagccataagcacacctcccttcaaaataactaacccagtttccagcctatggcctcctgtctggccgatacaaagtcggcatacaggcccttctgccggatcagctctgcatgagtgccgcgctggacaatatgggcattgtttaacacaaggatttggtcggcgttccgaacagttttcagccggtgggcaatcatgatgatggtcttgttgtgggtcaacgcctcaatagcccgttgcaattcatcctcattctccgggtcaacgctgcttgttgcctcgtccaaaatgatgatgggcgcatttttcagcatggcgcgggcgatggaaatacgctgtttctcaccgccggacaaagtgccaccgccctcgccaatcacagtgtcataaccctccggcagagcggaaataaagtcatggcagcaagcctttttcgccgcctcaaccacctgctcatgggtggcgtccgggcagccaaacttgatattgttctcaatcgtatctgcaaataggtacacgctctggaacac

SEQ ID NO: 3116 - DNA, 15707 bp, Unknown
  16S sequences of unknown bacteria
ggtttttgaaccattttgatatagtctgagcagtcgattatcgcttgctgaactgaggcgcgcgacgagctgctttgagaccgtacttctttctttccttcattctcgggtcacgggtcaggaagccagcggctttcagggtggcgcggaattcagggttgacgctcagcagagcgcgggagataccgtggcggatcgcaccggcctgaccggtcacgccgccgccggagacggtgcagatgatgtcgaccttaccgacggtgtcggtggagaccaggggctgacggacgatcagcttcagcgtttccagaccaaagtagtcgtcgatatcacggccattgatggtgatcgcgccggtgccgttctcatacaggcggactctggcaacggaggacttccgtctgccggtaccatactgatactgctttttgctttcgtacatgttcgttccctccaattagtccagcgtccaggcttccggcttctgggcggcgttcttgtgctcagcgcccttatacagcttcagacgagtcatagaagctctgccgatggtgttcttcggcagcatacccttgacggccagctccattgcaaattcgggacgctcttccatcagcaggcggtacttggtctccttcaggttgccgatccaaccagtgaagtgacggtagtacttctgctcggccttcttgccggtcaggactgctttttcgcagttgatgatgatgacgaaatcaccgcagtcaacattgggggtgaagtcgggcttgtgcttgccgcgcagcagcttggcagcgacgacagcggtgcggcccaggggcttaccggctgcgtccagaacataccacttgcgctctacggtttcttttttggccatagtcgtggacataaatatttcctccattccggaattccggatcaaaatttgatcgagtcatacaaatacgcacgatttctcgcgcgccgcttgatttttataccataaaccggcagcaatgtcaactgaaaaaattaaaatttttattttcctcagaaagaactgcaaaatgctctggatatctctcaaatactcttgatatctcacgttggaatttaaaatttttcccgaatgggggatgacaagtccggctgcttttactataatagaatggcaatatcctatagaacgcgggggtaaaccatgcaaaagatcgtcggactggtgcgcagatgtgtggatgactatcatatgatcgaggcgggggacaagatcgccgtcggtgtctccggcgggaaggattcgctgacgctgctggtcctgctgcgggagctgcagcggtattaccccaagtcgttttcgctggcggccgttacgattgatatggggctgggtgggatggatttttccccggtgcaggctttgtgcgaccggctggaggtgccctttactaagatcaagaccgagatcggcccgatcatttttgagtaccgacaggagaagaacccctgctccatgtgcgccaaaatgcgacgcggcgcgttaaacgaagcgctgctgtcccaaggcatccacaagatcgccctggggcaccaccatgacgacgcggtggagacctttctcatgagcctgctctacgagggccgcatcagctgcttccaaccggtgaccctgctggaccgcacgggcatcacccagatccgacccatgctttatctgccagagcagacggtggtgcgtgtggccgagcagctggacctgccggtggtgcataatacctgcccggtggacaagcacacgaagcgccaggaggtcaaggacctcatccgggacctgcaggcgacgtacccggacctcaaaacaaagctcttcggcgcaatgcagcgcttgccgctgcctgcctgggaggcagatgtctatcaccggcaaaagcagcagaggaaaaagcagcagtctggcggcgtttgatctggctgccgctgcaaaaaaatgacgccagtagaaccgagggactgcggttctgctggcgtcgttcctgttttgcattctggtggttcattggcctgcctcttgggcgtcgcgtttccgggaacggctgcgccatttgcagcggatccggcccagcagtacgccgaaccccagacagagaacgaccaggggcatagggattccttttttgcgcttcatatcaatgacctccaaacgagtgaaacgattgctcccttagtatattggatttgcgcggaaaattccagtgatttttccttaagaaatcttgaagatcgctgacaatttcgtcactttccaggataaggatgcaagcttttgcgtgctggggtaaaaatatagttgacctctcgcgcggcagagcaaggcacgaaaacgccagccaggtgggacaaaattttcgcagtttcgacagttgacggagaaaacttacctgatataatgaatggcagtacctgtgaaagagaaagaagcgatagaatgaaagttttagatttccactgccatgtctacccagataagattgccgagaaggcggcctgcgccaccgggacattttacggcgtcggcctgccccgatcgacggggacggtggcggagctgcgacggatggaggatgcggctggcatttccatgcagctcatccattccgtggcgacgaagcccgcccaggtcccggctatcaacaagtttattgctgcctgtcaggcagaagacccggcgcgcttgatcggcttcggggccctgcatccggacagcgagaatatggaagcggatgtccagcagatcctggatctggggctgcacggggtcaagctgcacccggatattcagtgctttgcgctgaacgagccccggagcatgcggatgttcgaagtgctggcagggcggctgccggtgctgctgcatactggcgatgcccggtatcaatattccaacccggaccagcttatcccagtgctggaggccttcccggagacggtgttcgtcggcgcgcatatgtgcggctataccatctgggatgaggcagagcgggccctgtacggcaaatacgagaatctgtgggccgactgctcttcgacgctctatgccatgccgccggagcgggcagtggcgctgctgcggcatttcggcacgggtcggattatgttcgggacggactttcccctgtgggacccgaagacggagctggcacgctttttggccttgccactgacaggggcggagcagcgggccatcctatttgagaacgccgcacgctttctgcagctgccggtacgcaccgaggcaggcagaccagcatagaatgcgatgccgccgggcgcgggcagctgaacggggcaaaaatcgtcataccaatcgtattttttcctgaatttttcttaaaaaccctgaaaaatcgagaattattttgtttttttgttgccaagcggcgcagctattgctataatattacataactttagggcctgtctgcccagttcggcagataatcgggcggcttttgttcgtattgcaggcaagacgctgcgcacttttttgcccgcgcccgaaagtgcatataaaaaaatggaggtcatgatttgtatgatggagcaggcaatttatgcattctgcattgatgcagcccctatttcctgtgcgccccacggcggcggacatatcaaccacacattcaaggtcgttacggaaagtggcatggaatatattctgcagcgggtgaaccaatatgtgttccacgacccgaagagcctgatggaaaacgtcggcgcggtgaccgcctacctgaaggagcgggtggatgacccccgggcgtatctgcattttatcaaaacgaaggacgatcaatattattatgtagacgaaaaaggggaatactggcgttgctatgaatttgtcggcggcttctgcctggaggccccggagacagatcaagacttttacgagagcgctctggcctttggtcaattccagcagatgctctcggatttcccggcccatacgctgcatgagacgatcccggaattccacaataccatcgaccggtatcggaaattcaaggaggccgtcgcccgcgatgctgccgggcgcgccgccgaggtccagccggagatcgactttatcatggcccgagaggaagaagcggggaccctgcagcgcatgcgggagacgggccaactgcccctgcgcgtgacgcataacgacacgaagctcaacaacgtcctgctggataaaaaaacgcgcaaggccctgtgcgtgctggacctggataccgtcatgcccggcctttccctgtatgatttcggcgattccatccgcttcggcgcggccagcgccccggaagatgagaaggacctatccaagatggagctgaacctgcatctgtttgagatttataccaagggctacctgaaagcctgccccagcctgaccccggaggagattgacatgatgcccatgggcgcgaagatcatcaccttggagctggcgacccgcttcctggccgactatctggacggcgactgttatttcaagaccgcttatcccgagcacaacctggtacgcgcccgggcccagctgaagctggtggcggatatggaggcaaagtgggagcagatgcgcgatattgtcagaacgctgacgaaccgataatcgaaccaatcaccaatcaccggaggtacgaatgaactatttagggatcacatacgacgtgaaaaatctgccgaagctggagccggaatttatccccttcggcccgtggatggacgcctttttgcaggatgcgacgcaggaggtcaaagtcgccgtagagcgcaacgaagggaaaatctccgtctggacaacgtgcatccacggcacgcaggaactggcggaggcggactaccgctatctggagcgctatgtaaaattcctactgtggtccgttggcggcttccgggtctatctgtgtggcgcaggccccctgtgccagcggatgcaggcggaatatgtcttgacggagacggaaaagggtaagcgctggtttgatgtgcagtttatgacggacgtattcgagtccggctttgagatcatcgactgcagccccgaagacttccccaagcagaacgacgcgtctgtccgggtcggcggtcacatggaaggctgccgcatcggctttgacgccggtgggtcggaccgcaaggtctccgcagtcatcgacggcaagacggtctactccgaagaggtcgtctggcatccaaagacccaggcagaccctgcttatcactttgcagaaattgtagacgccttccgcacggcggcatcgaaaatgccccgggtcgacggcatcggcgtcagctcggccggtgtcttcatcggcaatgcgccgatggtctcttcgctctttatcaaggtcccgcgggagaaggagatccgcagccaggtcaagacaatcttcgaccgggcggccaaggagatcggcgatgtgcccatcgttgtggccaatgacggcgacgtgacggccctggcgggggctctgagcatggagaagacctgcgtcatgggccttgccatggggacgagtgaggccgttggttatgtggaccggcagggcaatgtcctggggtggttcaatgaactggcctttgcaccggtggacctgaacgagcaagccatggccgacgaatggtcgactgaccggggcgtcggctgcaaatacttctcgcaggacgctgtcatcaagctggcggaccgggcaggtctgccgctggacacggcggcgactccggcagagaagctcaaggccgtgcaggacctggtcaaggccggtgatgagcgggcgatgcagatcttcacggatatcggctgttatctggcccataccatcgagctgtatgcgcatttttatgacatttcctatctcatcgtgctgggccgcgtgatgtcgggccgcggcggtgagttgatcttggcgcagtgccagcgggtgctgcaggaagaatatccggccctggcggcgtctgtccatgtcatgctgccggatgagaagacaagacgggtcggccagtctgtcgcggcggccagcctgccggagtgcaagcacagctgagcttgccgcacttggaggaatacgatgcagtttacgaatgcgaatatctttacccgtgattttacgttccgctggggcagcttctgcgtggaggacgggaaattcacgcgagtccttgcagaaggcgaggccgcggcggacgctgtcgacctgcagggggcttatgtgattcccggcctgatcgatgtgcataatcacggaaattccaacgccgatttttccgacggcagctatgagggcctcgtcaaaatggcgcgctatcttgccaaaaacggcattacgtcgtttgcaccggcctctatgacgctgccgtatgagacgctggccaaagcatttgccacggcgcggactctagtggatgaagcgcctgcgggctgcgctgccctccggggcatccagatggaggggccgtttttcagcgagaagaaaaagggcgcgcagaacggcgcttacttgaaggacccggattttgcagcgtttcggaagctgcaggagggctgcggcggcctcattaagatcgtggacgtcgcagcggagctgccgggagcggtggagtttgccgcccaggctaaggaactgagtaatgtctccattgcccactcggattcggattatgagcatgcgctggcggtgtttgaggctggcgcccggcacctgacccatctgtacaatgccatgccgccgatccatcacagaaagcccgggatcatcggcgcggccagcgagtgccagtgggtgcaggcggagcttatctgcgatggtatccatgtccaccccagtgcaatccggatggccttccggctcttcccggggcggatggtcctcatctccgatgcgctgcgctgctgcggtatgcctgacggcgaatacgaactgggcggccagcctgtcttcctgcagggcaagacctgtacgctggccgacgggaccctggcgggctctgtgacgaatctctatgactgcatgtgcaacgccatctcctacggcatcgcgccggaggaggcaatccgcgcggcgacgtggaacccggcctgcgcgctgggcgtggaaaacgaggttggcgccattgccgacgggatgcaggcggacttcgtcgtttgcggcgaaaactgggcgcggcaggcagtgtatctggcaggccaagcgctctgatccgtgtgccagcctgcgctgccgcggcgcgccagagcagctgtatgtcaaagaaatatgtatgatcctactattataatgtaagcgataaggtaagcgacccggtgcagcatgctgtgccgggtcctgtctgccgctgtggcgctgggttgcgtcccatgcggtgcaaaggaggacgtatgcgaaaacagaaagaaaaaacggagctgcagttgttttttacgttttttaagccccactggaagctttttgcactggatctgagctgcgcgctgctggtcgcgctggtcgacctggcgttcccgttggtctcccgggcagctatgtatgacctgctgccgaatcagaagtatcacacattttttgtcgtcatggtcatcgtcgttgcggcgtatttggtccggacggtgctgtattacatcctatgctactggggccatacgtttggcgtgcgggtcgaggcggatatccggcagtccctgttccggcacctgcagaccatgggctttgacttcctggaccgcaaccggacaggccagctgatgagccgcctgaccagcgatctatttgaactgacggagcttgcccatcatggcccggaggatatcctgatctctgttgcgacgatcgtcggggcgctgatcgtgatgttccgcatccagtggcggctggcgctggtggtgctggtgatcgtgccgctgatgctggtggtcgtcatcgcccggcggaaggcaatgcaccgggcttcggcggcggtgaagcagaagacggcggagatcaacatcgagatcgagtcgaccctttccggcttccggacggccaaggcctttgccaatgaggcccaggagcggcagaaatttgatgcggccaacgaccgcttccggacatccaaaagtctgtttttccgggagatgggcctgttcctggcggcgatggagctgctgatttcgatgctctctgtggccattatcgcagcaggcggctggctcattatgcgggaccagctggattatcgggatctcattacattttccctctatgtaacgacgtttatcaaccccattcggaagctggcaaatttctctgagctgtttgccaacggctttgccggactgcaccggtttgccgagctgatgcgcaccaagcccagcatcgtcgatgcgccggatgccgccgagacctgcgcgccggaaggggagatctgcctggagcatgtcggcttctcctatgatggggagcttccggtgctgcgggatgtatcgctgcgggtggagccggggcagacggtggctatcgtcggcccttccggcggaggcaagacgacgctgtgccagctgatcccccgcttttacgatgtgaccagcggcgccatcacgatcgatggggtcgatgtgcggcatatcgcccaggacgcgctgcaccgcagcattggtatcgtgcagcaggatgttttcctctttgccgggagcattctggagaatatccgctacgggcgtccgaaggccagccgtgccgaggtggaggaggcggccagaaaggcggaaatctatgacgatatttgcgccatgccccaaggctttgatacttatgtcggcgagcgggggtcgctgctgtccggcgggcagaagcagcgaatctctattgcgcgaatcttcttgaaagacccggggattctgatcctggacgaggcgacctcagcgctggactccgtcacagagcggaaaatccagtccgcgtttgacgccctggcccaggggcgtacgacactgatcattgcacaccgcctctcgacggtcagcggcgcggaccggatcattgtcgtcgaaaatggccgcatcacggaatcgggccgccacgcagagctgatggcacgggacgggacctacagcgcgctgtatcgcacgcagcgtctgctggattaaaatattttggttttgcagcaagaaagcaggggtaaaatcgccgcgggatggggcaggtcgccttcgttccgcggtgattttttcttcacactttttttgtacgcgaacaaggggaagcactaaaaaaacgccaaatattccgcaatgcggaatgtttggcacaaaatgcccggagaatccgtagaaattggtgatgaaattggcttgcacttttgcacaattcacaaaaatttaaaaaataacagttggggattgtatatctttcaaatttcatgtatcataagtttatacaagccatatataaactatatatggactttcgggatgatcccaacaaatttaggaggatgaaagatgaaaagattgtttgcactcttactggtctttgcgatggtcgcctgcctgtttgtaggctgcggctccaatggcagcgacgacaactccatctccaatgcggcgaacgataataacgtgacggctaaagatgatggcggcagtggcacgtccaacgcagatttcaaggctggctttgttctggtcggcgatgaaaacgaaggctatacctatgcacacattgtcgggattgagaaggccatgggtgagcttggcctggataagagcgccaacgctgtctggaaatacagtgtcccggaggatgagtcctgctatgatgccatcgtcgactgcatcgaccagggctgccaggtcgttttcaccaactcctacggtcatcagtcctttgcccagcaggcggcagaggagcatccggaagtccagatcgtctccatgacgggcgacacggccaagagatccggccttccgaacttccataacgcatttacgaaaatcttcgaagcccgctatgtcgcaggcgttgttgccggcatgaagatcaaggagctggctgacggcggcaagctttctgacagcaactatgacgcggacggcaatgtgaagatcggttacgttggtgcgtacccctacgcagaagtcgtctccggctacacggcattcttccagggtgtcaagtccgtttatgaaaaggtctctatggaggtccagtacacgaactcctggttcgatatcaccggcgagaacgaagcggctgttgcgctgattgctgacggttgtgtcattgttggccagcacgcagactccaccggcgcggcctccgcctgcgaagcagctctgtctgccgggacgacggtctacaacgtcggctacaacgtcgatatgctctccgctgcccccaatgcagcgcttgtctcccccaccaacgaatgggatgtctattacaagtacgccatcggcgcaatgctcgacggcaaggaattcgacgtcaactgggccgaaggctttgatcaggacgctgttgcactgacggagctgggctccagctgcgctcccggcacccaggaagcggtcgaccaggccattgccgatatcaaggctggcacggtccatccctttgatgtctccaaattcacctgcctgggctcctatgaggaaggcaagaccactgcgttccagatcgacgcagaaggccatgtcaccgctgcctttgccacggatacggacggcgacttcacgcccgatgccgatgaggcagtcttcgacggctactatcatgagtcctacttccagtccgcgccgtccttctccctgcgaatcgacgggatcaaggagttgaactaaccaaatagtgcaaaccgaaccggcgtagtattggcccacctggggcgctgccgcgcagcgccccggtcggcccggctcagttggctttttcgtcaaacaggagttgctctggcagctcctttttaaaatgaaagagcttttgcctgctgtgccagcaggcgagccggatcggctgcgccggagcacctcattttctcaaagaaagggtgaacccattgagtaatgcatcttacgcgatccaaatgcaggatatcacaaagcgatttggttcgacggtcgccaatgacaagatcaatctggagctgcgccgcggcgaaatcctggcactgctgggggaaaacggctctggcaagacgacgctgatgaacatgctcggcggcatctatttccccgacgaggggcatatcaagatcaacggcgaggaggtcagcatcacctcaccgaaggattcgttccagtatggcatcggcatgattcaccagcattttaagctggtcgatatcttcaccgcggccgagaatatcgtcctgggcctggagggcgacaagggcaagctggataagaacgccatcaagactgttgtccgggatattgccgagcgctatggctttgatattgacccggaccagaaggtctataatatgtctgtctcccagaagcagacggtagagatcgtcaaggtcctctaccggggggcggatatcctgatcctcgacgagccgacggcagtgctgacaccgcaggagacggaaaagctcttcaaggtcatgcgcaatatgcgcgccgacggcaaggcgattattatcatcacccataagctcaacgaagtactggccgtctcggatcgggtcgcggtgctgcggaagggcaagtacatcggcagcgtcgagacgaaggacgcctcgcagcagagcctgtctgatatgatggtgggccatgcagtaacgctgaatctggagcggccagagtgtaaggagcgccatgagcgcctgcgggccgagcatctgaccgtctgcgataaggacggtgtcaaaaagctggacgatgtctcctttgtcgcctacggcggcgagatcctcggggtcgccggggtcgctgggtctggccagaaggagctgctggaggccattgcgggcctgcagaagctggaggcgggcagtgagatccactataccaattctgacggcaacgatatgctgctcaacgggatggacccgctggatattctgcggcagcatattctgctctccttcgtgccggaggaccgcttcggcatgggcctggtgggtggcatgaatatcacggaaaatatcatgctgcgcagctaccgccaaggcaagggtccctttaccgaccggcgcttccccaaggggctggccgagaagatcgcccaggagctggaggtcgtgacgccggacctgaaccatacacccatccgtcgcttgtccggcggtaatgtgcagaaggtcctggtgggccgggagattgccttcgagccgcgggttttgatgatggcctacgccgtccgcggcctggatatcggcacgtcttacacgatctacaacctgctcaatgcgcagaagatgaatgatgtcgctgtgatctacgtcggcgaggacctggacgtgctgctggagctgtgcgaccggatcctggttatgtgcggcggcaagatctccgggattgtggacgcccgcacgacgacaaaggaagaaatcggcctgatgatgacgcagttgggaggtggccagtaagatgcagaaaaacagatttgcgacctatctctccatggcgctgagcctggtggggcttgttctgctgctggcgctgccctttgtcaatatgcagggggtccgctcctttagcttcttcggcctgctgagcggctctggcttcctgaaggcgctggtcatggtgctggcgctggtggcgccggtggcggcgattgtcctgccgcttttgaagaaaaagggcttgggcgcgatcgctgcgctcctcggcgtgatcttggtctgggtggcttatagcctccaggtcgggccttacggccatgcctgcaccatgggcgcaggcggaacactgtatttcctggcgctgctggcggcgctcgtcctgcttgcctgcgaccttgcgcacggcgacgggacggagccatttatccgcatctccaagcgcagcgacatcgcgggcggcaaggcgctgggcattcgcctcatctccgttgtgctggcgatgctggtctgcgcggtcatcatttacgccattgtcaagctcaatccgctgaaggtctatgcttccctgtttgacggggccttcgggacctccaagcgcatctggttcaccctgcgcgacacgatgatcctgacgtgcatcgccatcggcctggcgcctgcattcaaaatgcgattttggaacgtcggcgcggagggccagatgcttatcggcggcattgccacggcgttctttatgatcaatttctccggcaagatgccggtggtcctgctgtttgcctgcatgatcgtcttcgcggtcctgtgcggcggcatctggggcttgatcccgggcttcttcaaagcccgatggaatacgaatgagacgctgttcaccctgatgatgaactatattgccattcagctgacgtccttctgcgtggccaaatgggaaaatccgtacggctccaacgttgtcggcattatcaataagaacagcaagatcggctggatcggcaacatgttctccgacggctacaatggcgactttatgtggacggtgattgtcgtcgttctgctggcggtggccatgtacctctatctgaaatatacgaagcacggcttcgagatctccgtcgtgggcgattcggagaacacggcccggtacgcgggcatccgcgtcaaccgaatctatgtccgtacgatggccctgtccggcgcgatctgcggctttgcaggcttcctggctgtggcggccgtctcacatacgatttcgaccagtacggccaacggccgcggctttaccgcgatcattgtcgcctggctggcgaagatgaatccgtttattatgatcctgatctcggcgctgctgaccttcctggacaaaggcgccatccagatcgcttcgacctatgggctcaacgaatacgcatcgcagatcatcaccggcgtcacgctgttcttcatccttggcagtgaattctttgtcaactacaaggtgaagttccgccgccagaagtaaggaggtaacgaatatgtctggaattctcggttttatcacttcgttccccacgttgctgcactctgcggtgattttcggtacggtcatcatgttcggcgccatgggcgaaattttggcagagaaggccggtaacctgaacctaggcgtgcctggcatcatgtatctgggcggcatcgcgggcttgattgcaacgtttatgtatgagaacgtctattgtgtcaatgccgggatcgagcccaatgtggcgatctgtatcgtcctgggcctggtgagtgccttcgcggcggcagcgctgggcggcctgatcttctcgtttttgacgatcaccctgcggacgaatcagaatgtcaccggcctgacgctgacgatctttggctccggtatcggcaacttctttggcggcagcctgaacaagctggccggcggcgtcggccaggtcactgttacgacgacctctgaggccttccgcgcctattttaacggtctggtcgaaaagctggacgctgtgaccggcagcctgaatctcgggacgctgctattctcttacggctttttgacgtacgtggcgatcatcatggccgtcctgctgtggtatttcctctccaagacccggacgggcctgagcctgcgggccgtgggcgaaaataccggcacggcggacgcagcgggcatcaatgtcacgaagtacaagtacctggccacctgcatcggcggcggtatctcgggcctgggtggctgctattacgtcatggtctatatccgcggcacctgggaaaaccaggggacgatcgaggccctgggctggctggctgtggcgctggtcatctttgccacctggaagccgctgcgcaatatctggggctcgtacctcttcggtgcactttattgggcctatttctatatcccaggcctgacgagaagctcccaggagatcttcaagatgatcccgtatcttgtaacgctgttcgtcctgatcacagtatcgctccggaagaaaaaggaagaccagccgcctgcttcgctgggtatcccgtacttccgcgaggagcggtagcggtcaaatcgcttgtaaaactacgaaacatcaaagccccgggtatgacgctatgcgtcatacccggggcttgtgtctggtgcagagcgcgcaagcggggcgggggtatcagccctgcatcgcggcttcaaaatgcttgttcagctggttggtgaactcaatggcggcgttatagcccagccgcttctggcggttgttcatcgcggcgacctccataatcacggccaggttccgccctggcgtcactgggaccgtcacagaaggcacgttgacgccgagaatatccacatactgcgccttcaggcccagccggtcatagacctcgtgatcgttccagtggacgatattgatgacgaggttgatgaccgtctcctccttgatcgccgccataccgaagagattcgcgacattgatgatgccaatgccccgcagctcaatgtaattgcgaatcagctccggcgctgaccccatcagcttggccgaggagatgcggcggatctcgacggcatcgtccgcgatgaggcgatggccgcgcttgagcagctcgactgccgtctcacttttgccgatgccgctatcacc

SEQ ID NO: 3117 - DNA, 21042 bp, Unknown
  16S sequences of unknown bacteria
ctgcttgtgcgggcccccgtcaattcctttgagtttcaaccttgcggccgtactccccaggcggaatgcttattgtgtttactccggcacagaaggggtcgataccccctacacctagcattcatcgtttacagtgtggactaccagggtatctaatcctgtttgctccccacactttcgcgcctcagcgtcagttacagtccagtaagccgccttcgccactggtgttcctcccgatctctacgcatttcaccgctacaccgggaattccgcttacctctcctgcactcaagccatccagtttccaaagcaattcccaccttaaaagcaggactttcactccagacttagttggccgcctacgcgccctttacgcccaatcattccggacaacgcttgccccctacgtattaccgcggctgctggcacgtagttagccggggcttccttcttggctaccgtcattatcttcaccaaggatagaagtttacgatccgaaaaccttcttccttcacgcggcgttgctgggtcaggctttcgcccattgcccaatattccccactgctgcctcccgtaggagtttggaccgtctctcagttccaatgtggccgatcaccctctcaggtcggctactgatcgtcgccttggtgggccgttacctcaccaactagctaatcagacgcgagcccatcttccaccggattgctcctttgacctcatccccatgtcagaaacgtggtcttatgcggtattagtgcacctttcggtgcgttatccccctgtggagggcaggttgctcacgcgttactcacccgtccgccgctagaacttatcgattccatccgaagacttcctcaacaagtccccgctcgacttgcatgtgttaggcacgccgccagcgttcgtcctgagccaggatcaaactcttatgttcaatccgttatcgctcttgatttatggaagaactcatccctttcggattccgtccttctcaagcacgattcactcaaaattcttgactgttcttgcgttctttccttattctgtatcgttttcaaggttcgttgctctcaagcgagcttgtacataataccacgtgctcacttttctgtcaacactttttttcaaaaattttgagtttttttgactttacgcataaaaccctgttttttcaacgctttcgtccccgcagtttcaaaaaaactgccagtttttgtccaatgtttgcccgctttccgaaaatatgctatactgaaaccgctcttagagccaaacctgatcggagaggtaatatgaaaccaagcattaaaaggctcctgaattttgcatttctgttccttaccttaggaatcgttctttatataggtttgaatggcaatgacctcaatgaactgggtcatgccctcagcaccatcagcccggtgtttcttctattatgtttacttggctgggtgctgtacatccttaccgatgcactggccgtctacttctatctgaagcagcagggccaccccgtcaaactgtggcaaagcatccacgccgccattacgggaatctactattgtaatgtgacccccggcgcttccggcggacagccgctggagatttacaccctccgcaaatacggtgcgcccatcggcatcagcggctcggccatggtggtcaagttcatctgtttccagatgatcctgctgattgccggggtgatcctttgggtcacgcacggtgccttcgtctccgatcatacgcagggttccatctggttcgtcattctggggtatctggtcaactgcttttccatcggtatcgtactaatgatggccatcagccagcgggccgtgcgttggctcatcgccttctgcatcaagatcggcgtgaaacttcacctgtgcaaaaaccccgaagcctccaccgcccgctgggaggatcactgccagacctttttctacagcttccgccagctggtgcgcagcccggtatccctgctgacccaatgcggcgtagcgctcctgcagcttttttcgctgatgctgccgatcatcgccgtctaccacgccttcggcctgtccgaggtcagttccatggagctgatcaccatgggcgtgctcctctacatcggcgccagctacacgcccctgcccggcgcttccggcgcgcaggagggcggcttcgcagttctcttcaagggcatcttcccggatgcgcggctgtttgtcgctttgctcatctggcggttctctacttattatttgaacgtgatcgtgggtgctgtggtcgccacggtctccagcatccgcggtatcaaaaacgcatccgatacgcaagaaggtgtttccaacgaacagtcctgattcttcctctgtttcttctcattcttcttccgccatgctcttttcccgggacgcgctggttcggctgatcgtcccgctggtcattgagcagctgttggccatctgcatcggcatggcggataccatcatggtcacctccgtctccgagtcggccgtgtccgccgtttcgctggtggattccatcaatatcctgctgatccagcttttttccgccatggctaccggcggtgctgtggtcgccgcccaatatctgggccgtagagatcaaaacaacgcctgcaaagccgccaagcagctcatgtattcttccgtcctgatcgcgctggtcatcggcgcgctggccgtggtattctgccgccccctcctgcagctgtgctttggtgcgttggctccttccaccatgacctactgtgagatctactttctgctgtccgccctcagttacccggcgctggcggcctataacgcgggcgcggcgctgctgcgggccatgggcaacagcaaggccagtatgttcacttcccttctgatgaatatgaccaacgtcatcggcaacgcgattctaatctacggcttcaagatggaggttgccggcgcggccactgcttcccttctgtcccgcattctgggagccgtcatcatgctgcggatgatgctcaacgcccatgcccccatccacatcaagcgcatcacccatcccgagttcgacttttccatgatccgcctgatcttccgtcagggcatccccaacggtctggaaaacagtatgttccagatcggcaagctgctggtggcgggcattgtggccctcttcggcgaaagcatcatcgctgccaacgccatcggtaataccttaaccacgttcttccaactgcccggcagcgccattggtctcgccatggtcacggtcgtcggccagtgcatcggcgcaggcgaaaaggaacaggcccgctactataccaaacggctggtttcgctagtctgggttctgctgctgatctgcaatatcttcctttacatctttattcccaatctggcgaccctgttcaatctgagctccgaagccatttccgcctgtgtggagattctccgcctgtactccatcatggcttccctcttctggacgttaagctttaccctgccaaatgccctgcgtgccgccggagactcccgcttcaccatgctggtgtccatgatctccatgtgggccgtccgggtaggcctgagctacttcttcgtttatcagctgaatatgaagctgaccggcgtctggctggccatgtgtctggactgggtcgtccgtgcaatcgctttcgtctggcgctattgcagcggcaaatggctccacaaaaaggtcattgatctgtaaaccccttgcaaattaaagggtggttcctctatgggaaccaccctttgtttttcagaattagcccgcctccattcactcgctgcaaaaactatgcctatcgtcctcgccacctgtgagctactgaccgtccgcaacggttgtgtccaccgagcgggtgtctgtcttggtttaatggttcgcaaggaagccacaatacggattgttcgggggcagtccgcatttggcaaactggttttttccaaaacatttgagaactccaccatccggcagataaaactgccgaaggcagcttgcgcttggctgctgtcattcgaaacaaaattaagtatggccgcgccaaaggcaacattggaagtcgcgaagcagagtttctaacccctatgccgcgtgcgctttccctgcgaacctgccctgcagcccgtcagagcctttcggtcgtctgagatgattttctccacggaaccgtccttcttcctattccaaaagaaacctgcagtcatagtccggctgccccgtttcacggcgcgctagaccaccatctccaatgccggcaccgttcttcgctctttctttttccctgttgaccattttcccgccattcttcctgttttcacaacgccgctttcttcccgcaaaccatccgtctattataagaaaagcgggcgcttccctccttttcgaagacggaaccgcccgctttgtatttccttacttttcccgtaccagcgccgcctgattttcccgcaggtaggcctgtatgctttcactcgttaccgctgccagtttctttcgttcgatcgtcagcaccaaatggccttccccatccagtccgtactgcttcgccttgtgcagcccgtaggacggctgccagccccagcattcctctcccgccagcagtgtcatcacgccgtcggttccaaaacgcttttcgcttttcacgatcacataagggcgataccagcggtcttcctcgacgatatagccgctttcccatactggctccgtctcgtattcgatacgggcgctttcccgcagaagcccgtccgttccgtcaaaggtcatttcccggctctgattataaagtttgccattcccgttctgcaaaatacactgcagcgtcagttccttttcggttttctgcaggcagggattatccctggcaatgccgtccgccaccagccggaatttctgggtggggtctttcagcttggcgcggacgtagaccctgtcccccacctccgccgtctcgaagccttccagctccattttgccgccaatggcatagtccgggcttgccgggtggatgtccgccatctgataggcgtactgcttgccgaacagcgcgtcatagctgagcagatcgtaggtctcatcctccgtcacgccctgctgccgcagccgttccacatagctgaagaacggatcgtcgttcagccccgtcagggtcaaagcgtatgcgcccagctgccacgccatcatgtcttcttccccggccagattctcccggttgctccaaataaagtaaggcgcttcgtgggccgcggcgctgccgatgggcacacccagctccttgtaggtctccatgcccagcggggccagatgatccccgaagaagatcaccgtcaccggctcagggtagctgcgcagctcctcgatccactccgccagcgccgcgtccgtctgggtcagcagatagcaatagttgttggcggcgatcaggctttcctcgctcagttcattggtaaagggaacctccgccccgtaggtcttgcggaagtcgtcgtatccgtacccgccgtggttctgcatcgtcagacaaaagacgaagtcccttcccgacgtttcctccatcttgtccatcaccgcccggaaatgatcccggtcggaaataaacatccccaccttggtaaaatcccgctgggtggtgtcggtagtatagaagctctgaaatccctctttggccagattttcatagcggttgtagtatacgcccgcataccagtgcagggccgtggccgtcattcccttttcccgcagcacgctggccagactgttcatttccggcagacccatcgagtaggggttcaccgtgtactgggatttcagtcccgtcagcacctcgaactctgtctcgctggtgccgccgcccaccttgggcacatagattttcccatgacggctttcctgctgcaatcggttgtagtacggggtcaattctctggtaaagttcagatactgcccaagaattttctgatcggtgaaggactcgctcagcaccagaataacgttggagatttcgtccccctgcacggtctgtttcagtgcttccgctttcagcgtccgataggcttcttccgtcttttccttcgaataatccacccgcatggcgtggcggtagttttccgccgcgaaggccgtgtacagacatccgtcatgctgggcctgatccaccatatcatagcggtttccacccccggccagttcgtaggtgcacaggaagggcgtacccaccgccagcatcagccccgccaacggcagaacgaaccaccgccgctcccgcttctgtttcagaagaaggaccgccgccgccatcagcgccgccgtaccgatcacccacgcccacagccgcgccatatcgaaatggaagtccatcccgcccatggtctccagtgcctcgtgaatttgggtcacatccgtcagaaggatcggctccagccggtagatcagcttatagtaattcgccatgcccagcacggcgcacaacagattcaatcccagccacaggcagacccgaacccgcatcgaccgaaaatgggagatcagcagacacagccccagcaaaaacagatagttcagcaccgccatcagcggttcgcccgtcatccagcgaaagacggcgttcaggtctccccgcgccatgccttccagcacgatcaggcacagcagcggctcgatcagaatgcccgcaatctccgcccagcgttttttcatgcgataacctccaaaacatcggtctcttttttcaacccgggcattttaccacatcaggcgcttccccacaaccggaattctccgccgcaaggcagcgcgtccaggcggccctgcggtattttttgggcgtaacgcccgttttttcccgaaaacgcttgatgaaataggcggcgcttccgtagccgcaaagctccgcgatgccgtcgatgctctgatctgtggattccagcaggaatctggcttttttcacgcgcgccgtcccaatataatcgctgggcgtaatgccgatctcctgccggaacagccgcgtcagataatcggcgcttaccccggcccgccgggccagctcttccaccctcagttcttccccgcaatgggtgctgacatagcggcaaatttcaaaaacagcgccgttcagcggttggggagcctccgcccggctgtggactgcgtccgcgcagatcaacagcagcagctccagcagggcgtcgtccagctgcgtctgcatttccgtccgtcccccgtccatctgaagagaaaagatttcgatccgcttgaaccgttcgttcagctcttcaaaatggcctggcaaaaataccggcggcacccggtccagcagaggcgtttcccccaccggctgcaccggcgtggtacgcagtctgtgctgcctgccataacgggccgtcacctcgccggaaaggtcgaaggtgatcatgcggcaatggtaatctccgtcgctgtaggacaactgccccgggcggcggaacaccagcgtgccgcgtcccgccggataatcctttccatccagcgtctgtaccgccttcccgccatagtacagatccagctcataatcccgcacgatccttggccgggggctgcagtagcacgccatgcattcatatgacagaaagctcagtctggaaaattcgttcacaggtttttctccttcccgatcgcatcggaaacgttatattttccatcgggttttcgccttgatttttcccgcgtttccttttttaataaaagacggaagttcggattgcagcgtaaaaatcataaagcctttccgtcagattgtcaaacccctccgcctcctgttccgttttcaactctctactttttagaaaggaattcaaaacgcatggcaagaatctccgtgacaaaaccaaaatacgcccccctcttcggcggcgtcggatttcataacagcgaggccggcatgtaccgtcttctctcccgccggtcctttgaggaaaagatcgccaagtgcaaccgggagctttctccgggtttcatgcgctgctttgccggctattccgactggacccgtcaggcgatggacgattttgccgactattacgagcagatgcagaaggtaaccgatacgcccatctacctgacgcccggccgcggaaagctccatttcagcgaagaagatatgcgcaggtacgccgaggacgtggccgtgcggctggaatacctcgtccggaagcgcaatgtaaagcacctggcctattactgcttttccaacgaattgtcccagctgaccaacggagcgctgcaaaaccgcctgaccacctttcagcgctatcacgagctgctctacgacgcattccagcgccacaggctgcccctgggcctgctggccaccgacgcggccatggactggagctccatcgactgggccatggagcatatggaccccatcacctgcgattactgcggccactggtacgaacggggcgacgcctgtgacctttccttttaccagcgtttttacgagcgctgcgcagaatatgccgtcaaggccgcgcgaaaggaaaagcattttcttctcggcgagtttggcgtctccaaggaaaacaccgcgcttcaaggcaccgccgtcaaggacgtatgcacctattttgactccggcgattacaagggcctttccctcatgctggcggaagcggtggcggcggcagtcaacgccggcgtttttgccctcatgagctggacgttctgcgattatcccgaccccatggtcggccctgcttatgccgatgaacgctccgccagctacaccctctgcgagccattcttaggcgggggcgtccgcatccgctacaacaaatggggcctcctgaaatgggaggaggacggctcttttactccgcgccctcattactttgcctttggcccgatcgtccgctacctgaagcggaattccaagatcctgcaaaccgtttcggatgatcctttcctccgcggctgcgccgtcctgacccgcaggggaagactctcccttctgctggtcaaccgttcccgggaggaaaagccgctggagcttcagcttccgcaagcctcgggcctgccgcttcgggtatttctccaccggaccgacgtcccggactggaaccccttcgccgaccttcccgcctttcaggccgaggttgccccctcctctcctcgctggatcatgccgcccgaatccatcgccgttctcaccgatgattacacccccgctccgcgccatgtggaagcggagatcctcggcacggacggccagctcgtctggaagcccgtccgggatgagcggcattgctactaccgggtctttgacggtgaagagcagattgcttcgacggtcgcggagcattgcacggtttccggcggcggaagctatcgcgtcgtatccgtggattgggacggcaatcagtaatttctccgggaagagcagctgctcttcccttcttttctatttctcattctgcccgtcgaacttttggcaaaattttccctctttcttcggcgatcccaccaaagcattgacttttcttccttcatctatcataatgaagcgaaatccctccggccttttcaaagccgccggttttccatttcgatcattcgacaggagagatactcatgattcgtaccgatcgccgcgcccccatggaaacccgtccctgcgtcattcagcccggttttgtggagaccgccgccggaagctgcctcatttccaccggcaagacccgcgtcatctgcaccgccagcgtggaagaatccgttcctccctttcttcgagacaaaggacagggctgggtcacggcggaatacgccatgctgcccgcctccaccgggcggcgcaagacccgggacggcatcaagaaggacggccgcagtgtggagattcagcggctcatcggccgctcgctgcgtcaggcggtggacatgaccaaactgggcgaacgcaccatcaccttggactgcgatgtgctcaccgccgacggcggcacccgcaccgccagcatcaccggcgcgtatgtggcgctggtcatggccgtggacaagctcatgaaggacggccttttgtccgaaaatcccatcgtttctcaggtagccgccgtcagcgcgggcatcgtggaggacgagcccctgctggatctctgctacgtggaggattcccgtgcccagacggacatgaattttgtcatgaaccaccggggagaatttattgagctgcagggcaccggcgaaggccgcgccttcaccaaccgggagcttcactgcctgctggatgcgggccgcgccggggtgcgccgtctgatgaaagcccagcgggaggccttacgcggcatcggcggccatctgctgcccctgcccatggtggtggtcgccagcgggaatgctcacaagctgcaggagctcaccgccatgttccgtggcgtgtgtcagccagtctccatgaaagccgtaggcttcgagggcgacattgacgaaaacggctccacctttgaggaaaacgcccgcatcaaagcagaatgcgtcatgaaggccaccggcctgcccgttctggcggacgacagcggcctttccgtggacgcgctgggcggcgcgccgggcatctacagcgcccgctatgccggggagcacggcaacgaccgggccaacaacgagctgcttctgaaaaacatggacggcgtttccgaccgcacctgccgtttcgtctgcgccatggcgctggcgctgccggggcaggagacccgcatcgtccggggcgaatgcgaaggaacgctgctcaccgcgctggagggcgagggcggcttcggctacgatcccctgttcctctacgagagcggcaaaaccttcgcccagatgtcccccgaggaaaaaaaccgggtcagccaccgcttccacgccgtcgaaaaaatgcgggaagttctccgggagctgttctgatcttctccgtctttcccatttcatcccgaaaggaagcgctgcttttttcttatgaagcgtgtcattgcggtttccgactctcacggcatggaggctcgtctgcgtcaggttcttcagcaggcgttttccttgggcccggtggacgtgcttgtctttctgggggacggcctgtccgagtgggagcgggtctcgcaggaatttctctatggccgtccgtctctgcggctctacgccgtcaagggcaacaacgattacggctgggacgcgccccttacgcaggtgatcgccgtcggcaaggcgaagctcctgctctgccacggccacaccttccacgtgaagaacggcctctatcatctggagtttgaagccgccgatcaggacgttcaggccgccttattcggccacacccacttaggccatctggaatatgccaacggctgtctattcctgaacccgggcgcagtctgcaactacggccccaatcttcccgtctatgccgagcttctcgtctccgacgacggttcagtccatgcatctctacagcagggctaaagccctgcacccacttctgcgcgcatagcgcgcaggttgctcgcggacatgcggcttggccggggttttaccgccgtggcacaacaggtgccacggctcgccagtctggcagggcgagttgccgcttgacccccggcagccgccccatgttttacaaaacgctgccacattttcccgttctcgcgcgtcttataaaggagcgcagttgtcctttcccttcagcccttcatcagaatcgaggtttttgctcatgagtccctttatttatctggacaacgccgccaccacggcggtcaggccggaagttctttccaaaatgctacccttcttcacggaaaaggcgggcaatcccagttccatccactccgccgggcgggagactcgcaaagcggtggagaacgcccggcggcaggtggccgcggcgcttcatgccgaggcccgggaaatttacttcaccgccgggggcagcgaaagcgacaactgggccatccgctgcgctgtagcagagacgggcaaaaagcacgtcattacctccgccgtcgagcatcacgcagtgctgcacagctgccgcgcgctggaacgggacggctttcgcgtcacctatctgccggtggacgaaaacggtctggtttcctcggacgacgtccgccgggcgctgacggacgatacagccctgatctccatcatggccgccaataacgaggtcggcacgctggaacccgttcgagagatcggtcagatcgcccggaaggcgggcgtgctgttccacaccgacgcagtgcaggccgccgggaccgttcccatcgacgtgaacgactggaacgcagacctgctttccctctccggccacaagttccacggtcccaagggcgtgggcgcgctgtacatccgcaaagggacgcgcatacacaatctcatcgagggcggcgcgcaggaacgggggcttcgggcaggaacggaaaacgtgcccggcatcgtgggcatgggcgaggccctttcgctggccgccgccgagctatctgaatacacggcccatgttaccgcgcttcgcgaccggctgattcacggagtactgtccgccgtgcctgacgcacggctgaacggccatcccaccttccgtcttcccggaaatgcgaatttttccttccccggggtggagggcgaaagtctgctcatgcggctggacttggccggcatcgcctgttccagcggttccgcctgcaccagcggtagcctggagcccagccacgtgctgtccgccatgggcctttcgcccgatacggcccgcagcagcgtgcgcttctctctgggccgggacaataccgccgaggagatcgaccgggtgctggccgtcctgccccccattgtcgaagacctgcgggcgcgcctgcgctcctgaccctatcccttccgtttgttaaagaaaggaatctctatgccggatattcatggaaacattgagggcatccgcaaaagcgttctggacgaaatgaagaccctatacgacctccagctggagccggacgtttttctcccacaggaagtgctgtccgccctgtgcggctggtcggcctccttcaaccgggaggtggccctgtacgtcacccgctacggtgagatcgccggtattttcatcggccgggcggacgccatcgacctgcccgacctgcgcctgcgccgcagccagcggcgcttgagcatgatccgctgcatccacacccaccccagcgccacgggccagctcagcgacgttgacctgagcgcccttctgtccatgcgttttgacgccatgtgcgccgtgggcgtgaacgcggagggacagcccaccagcacccagtgcgcgtttctggatcagcatgcctccgccgggtatgtgctgacggagctgctgcccacccgccgtctgccccagcaggactggctggatcatatccaacaggccgacgcggcctatctggccgaggaggaaaaactgcaaaaagttcatgagcgggcgatcctggtaggcattgaaagcgaggaatcgctggacgaactggaggaactggccaagaccgccggagccgaaaccgtgctgcgggtgctgcagaagcgcccctcccccgataccgccttctgcatcggcaagggcaaggccgaggagctttcccttcgctgtcaggccgttcaggccgatctggtcatctttgacgaagtcctctccggggtcatgcagaaaaatctggaagaagtgcttcacatcaaagtggtggatcgcaccgcgctgatcctggatatcttcgccgcccgggcttccacccgggagggcaagctgcaggtggaaatggcccagctgaaataccgcagccagcgtttgctggggcaggggctggtgctgagccgtctggccggcggcatcggcacccggggccccggcgaaagcaagctggaggtcaaccgccgccgcattcgggaacggctcactgacctgcgccgggagctggacgaaatggagaagcagcgcaccctccgccgccagagtcgggaaaagggaggcgtgccggtggtggcgctggtgggctacaccaacgcgggcaaatccaccctgttcaaccgtctcaccggcgcggacgtatacgtgcaggatcagctgttcgccacgctggacagcgtcagccgccccgtgaacctccctcatggcaccaaagccctgctggtggataccgttggctttatccgcaagctgccccacgaagtggtggaggccttccatgccacgctggaagaagcccggctggccgacgtgctggtgctggtgtccgacggagccgacccccagctgctggcccgccgccataccgtgggtcaggtgctggacagtctgggcgctacggaggccccccgtatcgacgccctgaacaaatgcgacctgctctctccctccgccgacgtgctgcccggcgcgctgcccatcagcgccgctacgggccaggggctggacgagctgctgaccgccgtcgaggacgcgctggacgcgggcacggaggaagtctccctgctggtccccttcgcccgttatgccctgacggacaagctgcgccgccttggcagcgtcctttcgcaggaacacaccgccgagggcgtggtgctgcgctggcgggccgaaaaggcaaatgtggattacgccctccgggaaggggctgtactccttgaaacagaaagaaaatagttgctatattattacaaaaatgatacaataattatagtgtgtccctgtttcccggtggctctttcccggggctgccgaagaaagcacagacaaaattttcgtttccagttggaaagggtgtgaggaatcgtggtgctgggaaaaatgctttccatcgtcctgaccggcgcagcgctgctttccggaagcaaaaatgccgccctgcctgaaaaagatatcggcggcaccatttttctggtcaatcgccagcacgtcatcagtgagcagtacgtccctgaacccctgcgcaaaacgcaggtctacggcatgtcccagagtatgcgggaagacgcggccacggcgctggaggagctgtttcaggcggcgcagtccgagggcgtcaagctgtccagcgtgtccggctaccgcagctattccaaacagtctctgctttatgaccgcaagaccaaacgcaccggcagcgaaacggaggccgacaaactggtggcccgtccgggggccagcgagcaccagctgggtctggccatggatctggccacccgcaacagctcgaccctgtccgaaaaattcggctccactcccgaaggccaatgggtgtacgccaactgccagcggttcgggttcatcgtccgctatctgaagggctacgaggacgtgaccggctacagcttcgagccgtggcacatccgctacgtaggcccggagcacgccgaggccatcgccgcctccggccttccctttgaaacgtatctttccggctggaagctggaactttatgattatctgcttcatcatgctacgaactgaggtgctcccatgaggaatttccgacgcgttttgctggtctgtctcctgtgcctgatgctgctccccgtttccgccctctgtgaagacggcgtagccatgggcggctcggaggtgaaagagccggaggtccgctggacctacggcgtttcgctgacggctctgcagtccccctatctcattctggtcaacgagcagaacccgctggataagaccttcgagccctctcccctggtgaagatgaccagcgtcaagcgggccacctccgccaccatctacctgcaggaagcctgcgccaaggcgatcgagaagatgttcgccgccgctctggaggtgcaggaatacacctacaccaccgtcaattccaagggtgaggaaacagagcacaccgccagctatccaaacggcatggtgctcatgctcaagagcggctaccgcaagtacggcacgcaggccaccatctaccagaactatctggcccgcaataacggcgtagacgacggctatgtcaacaagcccggcgccagcgagcaccagagcggcctgtgctgcgacatcctcaaccgggactacgccacccgggaatatatgacgcaggatttcaaatacacccccgaagcccagtggatgaaggaaaactgcgcccagttcggcctgatcctccgctacactgaggacggcgaagcagccaccggcatcaaattcgagccttggcacttccgctatgtggggcgggaagccgccggttacatcagctccaccggcatgtcgctggaggccttcaccgaggaatggcaggcggcgctggcggatttcgaggcccgggggggcgacgtgaaggcccagctggcctacgaagagagcaccaagaacgccccgcccgccagctatgtgctggacgagaccggcgaggacggcgacgcggagatttctctggttttctgatgaacaaaggacgcgagggaacttgaaatgggcaaaatgattgcgatcaccaaccaaaagggaggcgtgggcaaaaccaccaccgccatcaacctgaccgcctgtctggcagatgccggcaaaaaggtccttctggtggatctggaccctcagggcaactccaccagcggtctgggtctgcaggcaggttccacctcgatctatgaggtgctgatgggtcgtgcgccggtcaacgcctgcctgaagcacaccgccgtcaagggattggacatgctgcctgccgacatccgtctggccggtgccgagctggagctggtggatctggatcagcgggaatatcggctcaagagcgtcctcatggggctggaacgcaattacgatttcgtctttgtggactgcccgccgtccctaagtctccttaccctcaacgccctcaccgcctgccagcgggtgctcatccccatccagtgcgagtattacgcgctggaaggcgtatccagcctgatgaacaccatcagccgggtaaagcataccttcaatccctccctggagatcgagggcgtgcttttgaccatgctggacgggcgcaccaatttgagcctgcaggtggtggaatccgtcaagaagcatttccgggataaggtcttttccgtggccatcccccgcaacgtgcgtctgggcgaagcccccagccacggcgttcccattcatctttacgatccccgcagtcagggcgcggaaagctaccgccagctggcgcaggagatcatccgccgcaatcggtaaggattgccggccgcaaaggagtcagtgaaaaccatgaagcgttccggattgggacggggactggacgtcctgctgccccagaatgacgagcttttccaaaccgtggtgcaggagatcgccattgacgacatcgaccccaacaccgcccagccccgtaaggatttcgataaggaagcgctggaacagctggcggaaagcatccgctcggcgggcgttctctcccccattctggtggtgcaggacggaatgcgctaccgcatcgtagccggcgaacgccgttaccgggcttcccggctggcggggctttccaccgttccctgcatcgtccgcgacctgaccaacgagcagcagatggaggccgccctgatcgaaaaccttcagcggcaggatctgaaccccatcgaagaagcctccgccattcgttccctgatggacgaatgcggctacacgcaggagcaggccgcccaaaagctgggcaagagccgtcccgccatcgcaaacaccctgcgccttctcaccctgcccaagcaggtgctgacgctggtgcagtccggcgaactcagtgcgggccacgcccgggtactggcggggctggactccgccgagcagcagatcgcgttggcccggcgctgcgtatcagaatccctttccgtgcgcaaactggaagagcttgccagggaagaacccgcggccccggcggtgaagaaatccgccgctccccgccccctgacccccgagcttcacaccctgcaggataccatgcggcaggcgttggggctcaagactgtgctgaccggcaacgagaaaaagggcaagatcaccctttcctataacagctccgaagaattggagcatctctacgaggtcgtcggacggctgaccgagtaaggcaaattgccagcgaggtgaatgcaaatgcgtatcaatcccaacaagaaggttcacaagatcaagcgcgatccctacaaggtgctggcgaagctggccctgatccttgccgtatgcgtggtggcaggcgtggggatattctacctgtgctccaaggccgtggaacgggattacgtggccaagcgcgaccagatcgaccagatgaacgaggaaaacgaggtggagttcaacacccggctcaacgagcttcgggcgggcgccaacagcgctttcagcgatcccatctccggcgataccgtcgacgagaacctcccctcgtgggaaaagacgctggacggcaaggtctggcgcgtggaggacgagggcaagaccgggctggaaaacgtctccaccgtcaccatgagtcgctccgagctgctgcagggcgggctggcgctgatcaacccgtggcacagcgtgccatccgactacagctatgaagggctgatcagcgtcggctccaccagcggctacaagatccccgtcaccgacaacacggtgcagctcttccccgccgcctacgaggggcttctgtccctcatcaaccgctgcaccgaagcaggctacgacagctacatcgtccgtcagggctaccgcagcaacgaagaacagaccaagcttttcgaggacgccatgcagcgtctcagcagccagtattccggcgacatcctgattgagcagactaagaaggacgtcaactaccccggcaccagcgagtaccagtccggctttgcgttccagatgggcctttataaccgggatgcggccatcgccaacacgctgggcaaattctccgaggacaagcgcggccagtatttcattgaaaactgctggaaggacggcatcgtcttccgcttcccggtggacggcttcccccgttccgactgggaaagcaagacctacaagaccggcatcagcgccaagctgctgctcttccgctatgtgggcaacgctcatgccgccgttatgcgcaccatggactactgtctggaagaatatctggagtttctgatcgcccatcctcacatcaccgtgtatgaggacggcgcgctgcggtacgagatctaccgtatctccggcgcggacggcgactccttcaccctgccggtgcccaacccggccagcagctatcaggccagtctggacaatctgggcggcgtggtgctggcctacacctacaactgagcattttttgcaacgcgaaagctgatccatggaattaacagaatcccttaaaaaatggtttggccacgactcctttcgggagggccaggaagacctgattcgggcgctgatgagcggacgggacattctcggggtgatgcccacgggagcgggcaaatccgtctgctatcagctgcccgctttgctgtttccgggtatcacgctggtggtatcgcccctgatcgccctgatgaaggatcaggtcatggcgctgaagcaaagcggcgtggcggcggcctacatcaattccagcctgacccccggccagcagcaggaggccatccgccgggcgaaaaacggtgcgtacaagatcatctacgtggctcccgagcgcctgcagactcctgcttttctggattttgccgtccatgcgcccatttctctgctagcggtggacgaagcccactgcgtttcccagtgggggcaggactttcgccccagctatctcaaggtgccggatttcgtccgtgctctgccccatcggcccccggtggcggcctttacagccaccgctacccagcaggtacgccgggacatgatccgccttttggagctggaagagccctacacgctggtgacgggctacaaccgccccaacctgcgctttctctcggtcaagcccaccagcaagcccggctatctgttgcgctatctggaagaggccgacccggacgcctgcggcatcatttactgctccacccgcaaaaacgtggaggacgtatgcgaacgtctccggcagggcggtttttccgccacccgttatcacgccgggctgacggacgaggagcgccgccgcaatcaggacgatttcaagtttgaccgggcccgcatcatggtggccaccaacgccttcggcatgggcatcgacaaggcggacgtgcgcttcgtcatccactacaacatgccccgggatctggaaagctactatcaggaggcgggccgtgccgggcgggacggcgacccggcggactgtctgctgctctacagcgggcaggacgtgatcaccgcccgctggatgatcgagcattccgacgacaacccggagctggacgcggacgagcgggccgagctgcagcgccgggatctggaacggctgaagcagatgaccttctacgccaccagcaagcgctgtctgcgggcctttcttctgcgctattttggggaggaagcgccggacgactgcggcagctgttccgtctgcgaggagctgcccttcgaggtagacacgggcaggggccgtctctacggcgtgcccgccaaagaagcccggcaggagcgcaagcgccgtcaggagtcgatccccttcaccggctgggaggccgcccaatacgagaacctacgcaccctccgcgccctattggccgcccacttccatctgcccgtctacatgatcttctccgacgcttccctccgagacatggtgcagaagcgccccaagaccgaggacgaatttctggaggtctccggcgttggtcaggccaagctggagcgctacggctcctacttcctcgccgtcctccgcgacggcaaagagccaaactccctcctgcaggggggctgagcccctttcggactgcgcgctatgcgcgcaggggcgtaggggggtatgcggcttggccggggttttaccgccgtggcacgacaggtgccacggctcgcgc

SEQ ID NO: 3118 - DNA, 10789 bp, Unknown
  16S sequences of unknown bacteria
ggctggaggcgcgaggacacgcccaaagggcgtccgcagcgccggaacaccgcgccgccgaaggcgagagcggtgcgaagacacggaacaccgcgcaagcgtcagcgcagggcggtgcgaagatgcggaacgaccattgcgaattgagggggtggcagtggcgagggagcaaactctcccgccacccgcttgtcaaaaagacttttttgacaagcggatttttcccagccctcgcagctgttactccggatcgatccaggcgagggcgatgctgcccgcgcccaggtggatgcccagcaccgggccgatgtggcggatttccgccttgcggccgcgctcgcggaagtaggcggccagcttttccgcgcgctcttcggcggcgaagtgctggatgatcacgtttgtggcctcaggcggcacggccttgatcagcgcgcgcaattgttcgttttgcccgcgcaccacggcgtaggattgaatgctgccgttttcgcagcggagcatgggccggatgttgagaatggtggaaaccgaaagcttcacgctgcccaagcggccgctgcggcgcaggggctccatatcatccaccgaaaaggtgatctgcacccggtggcgcatggcgttgatggcctcggcggtgtccgccagattcatgccggaagcgatcatgcggcgcgcctcgcgcaacaacagggtcagcccgccgccggtggaaagcgagtccaccacgcggatgccgtcgccgggcagttcgcgcgcggcgttaaaggcgttgccataggtgccgctcaggcgcgaagagatggtcatgcacagaatttggtgccctgccgcgcgcagttcctcaaacgcgctctggaagcgcacgaaagaaacctgcgaagtgcgcagcgtggtgggattttcgcggatcaggcgctcgaaatcgccgttgtcgtccacatagcgctcgtttacgggcgcctgcgcgtccacgctgtaggtcatcggaagcaccattacgcccagcgcggcggcttccgcggcggagatgtaagcggtggaatcggttactaaaacgatcataactggcctccgatgcaacgaaatttttggtagcgctgcttaagcagcgcagccgtatccatggccgcgtagcgatccagcgtttcgatcagcgcgccctgaatgcgcggatacagcgcgtcgaacccatcgctttccgggaacacgcgctcgatcacgcccagttccagcagatcctcggcggtgagcttgagggattgcgcggcttcacgcgtgcggctggcgtctttccagatgatgctggccgcgccttcgggggaaagcacggaatagacggcgttttccagcatccacacttcgttggacgcggccagggccagcgcgccgccgctgccgccctcgccgatgatgagggaaatttccggcactttcaggcccatcatggcggtgatgcactgcgcgatggcgtgtccctcgccgcgctcttccgcgccgatgccgcaatacgcgccggacgtgtccaccagcgtgatgacgggccggccaaacttttcggccagctgcaaatggcgcagcgccttgcgatagccttccggatgcgcgcagccgaagttgcgcgccaccttatcgagcgtgtcgtcgcccttttcgatgccaatgacggttacgggcttgccgcccagcagggcgacgccgcccacgatcgcgccgtcgtcgccgaagagccggtcgccgtgcaactcaaagaaatcctcaaaaatcgccccgatgaacttgagcgccgtgggccgccccttggcgcgggcaatgcttactcggtcgtatgcctgcatgcggccgcctcctttcccgcccgcgggccgtagccgtgcaggcgcagcagctggatcagcgtgtcgcgttggccgcggcggtcgcagatcgcgtcgataaatccgcgttccagctggaattccgcgcgctggaagccctcgggcagcttttgccggatggtctgttcgatcacgcgcggcccggcaaagccgatcagcgcgcgcggctcggccagcgcgatatccgcctccatggcaaaagaagccaccacgccgccggtcgtgggatcggtgagcactacgacgtacaaattgcccgcctcgctgtgccggcgcaccgcgccgctggttttggccatttgcatcagcgagaggatgccttcctgcacgcgcgcgccgccggaaaccgtgaagccgatcaccggcagggaatgctccagcgcgtattcgaacaggcgcgtgattttctcgcccacggcggtgcccatggaacccatcatgaaatagggattcatcacgaacagcgccacttcgatgccgccaatgcgcgcgacgccggtctttacgccctccacatcgccggaaaccttgcgcgctttttgcaccttttccgggtattccgggaaatgcaggggatcgtccgagcgcagatccgcgtccatttcggaaaaggaatccgcgtcgcagatcaaccggatgcgctttctggcgttcatgcgcatgtggtggccgcagcgggggcagacgtaggcggatgcttccaggtcgctcgccagcagcatggccttgcagccggggcaggaaacgtacattttgtccggcgcggaaggcgcgtccgcgttggggttcatggcgtcttccagcgtgattttgggcttgcgaaacaaatattttggcagcatgggctactccttcccattcaaatacgcggtggtatagcttccgttcacgaaagcttcctcgccaatcaggtcggcctggaaaaagcccgtgtgttccacgccctcgattaccaattcgcacagggcggcctgcattttgcggatggcctcttcgcggctggaagcgtgcacgatcatcttgccaaccatggaatcgtaatagggcgggatgaaatagccctgataaagcgcggtatcaaagcgcacccacggcccgccgggcacgtgcaaaagcgtcacgcggcccacgctggggcggaacccctccgccgggttttccgcgttgatgcggcactcgatggcgtgcccgcgcaaaacgacgtctttttgtgaaaagggcaactccatgcccgcggccacgcggatctgccacttgacgaggtcgaagcccgtgaccatctccgtcacggggtgctccacctgcaggcgcgtgttcatttccataaaatagaattcgccctcgcgggtgagcaggtattccacggtgcccacgccctcgtagcccacggcctgcacggcgcgcagggtggcggcgtagagcttttcgcgcagcgcgctgtccacggcggtggaagggctttcttccacgagcttttggtttttgcgctgcatggagcattcgcgctcgcccaggcacacgcagtgccccttggcgtcgcaaagcacctgcacttcgatgtgcttcacgttttccagcagcttttccatgtacaccgcgccgtcgccgaacgcgctctgcgcctcggcggaagcggttaagaacgcgctttccacatcttccagccggtcgacccggcgaatgccgcggccgccgccgccgctgcgcgccttgatgagcaggggaaagccgatggtttgcgcggcctgtacggcttcggcggcgctatggatcacgtccgtgcccggaatgaccggcacgcccgcctcgcgcatggtgcgccgggcctcgtccttatcgcccatgcggcgaatcaccggcgcgctcgcgccgatgaatttgatgtggcagcgctcgcacagctcggaaaactcggcgttttccgacaaaagcccgtagcccgggtggatggcctgcgcgccggtgatgatggccgccgaaaggatggaggccatgttcaaatagctcttggccgccggggccgggccgatgcagatgctctcgtccgccagggaaacgtgcagcgcgtcgcggtcggcctcggagaacacggcgaccgtacttacgcccatttccttgcacgcgcggatcacgcgcagggcgatttcgccccggttggcgattagaattttgggaaacaagggcaggccctccttatggcttggcggtgagcataaacgagaattcgcccgacgcgcacaagcggtcgcccacccaggcttcgccgctgatcacgtgcagccccagcttggcgcgcagcagtttcgccttcagcgtgagcacgtcgcccggccgcacgatgccgcgaaagcgcgccttgtcgatgcccgcgtagagcgccagcgcgccctgcatttctttttcaaacagcacgcaggcggtctgcgcgatgatttcgcacaaaatcacgcccggcacaatggggttgccggggaaatgcccgcgcaggaaaaattcgtcgccccgaatggtgtaatgcccgacgaccgagccgtcctccaggcgctgggcgtcgtccaccagcaacatatcgtcgcggtgggggaggatgttcatgatttccgttcgattcatagtcagcgctcccaatatagcatgaaatggccggtgaacagacgccgccggccttgcaaaattaccgctcgtagagcttgaacagcgtttgcccaaattccacaacgtccccgtcgtgcgcgcaaatgtcgacgatttcgccgtcgcgctccgcctgaatctcgttcatgagcttcatggcctcgacgatgcacagcacatcgccctttttcacgcgcgagcccacgcgcacaaacggttccgcgcccggcgaaggcgcggcgtagaacacgccgaccaggggggacttggcctcgaaaacgtcgttgaaatccacgccgggatcctccacgggcgcgctcgcgggcgcttcctgcgcgctctgcgcggccgccgccggcatgggcggcgcgaccaataccgcgccggcttgcgccgcgggctgcgcgaccgtccgttccaggcggatgtgcgtttccccttcgttgatttccagcgcgctcaggtcgttttgcgccagaatctgcgccagcgccttgatttgtttgatgttcatcgaattcttatatcctcctgatggcgattgcggcgttgtgaccgccaaagcccagcgaaagcgaaaccgccatctccgcctgcgcgcgcagcgccgtgtgcggcagatagttgaggtcgcattccgggtcgggctcgtccaggtgaatggtggggggcaaaacgccctcttccagcgccatcacgctggcaatggcttccacgccgccagcggcgcccagcatgtgcccggtcatggatttggtggagctgatcagcgcttcgcgcgcgcgcgcctcgcccagcgcatttttgatggcgagcgtttccagcttgtcgttcatgggcgtgccggtgccgtgcgcgttgatgtacagcgcgccatggggctcgcccgcctcctgcatggccaggcgcagcgcctgcgcgccgcccacggcctgcggatgcggcgcggtgatgtgataggcgtcgcaggtgttgccgtagcccacgatttcggcgtggatgtgcgcgccgcgcgccttcgcgtgctcgtattcttccagcgcgaggatgcctgcgccctcgcccagcacaaagcccttgcggcgcgcgtcgaagggcagggacgccttttcgggatccgtttcctcgctgagcgccttcaaattggtgaacccagccacggccaggggcaggatggtggcctccgcgccgcccgccagaatggcgtcggcatagccgtgctgaatggcgtggaacgcttcgccaatcgtgtgcgaggacgtggcgcaggcggtgaccaccggcaggcacggcccctgcgcgccatagcggatggcgatgttgccagcggcaatgttgctgatcatcatgggcacgaagaacggcgacacgcgcgacgggccgcgggtgagcagcttttcggtttcgttcacaaaggtctgcatgccgccgatgccgctgcccacgtacacgccgaagcgctcgggcgcgaccgcgccgctcaggccgctttggcgcatggcctgctcggcggcggccagcgcgtagagcgtgaaggtatcgcagcggcgggccagtcccttatcgatgccgaaggcctctgggtcgaaatccttcacttcgcccgcgagcttcaccttgtaatccgtggtatcgaagcgcgtgatcgggccgatgccggacacgccgtttacgagattttgaaagaacgattctgtggaatttcccaccgggctgatgacgcccatgccggttacgactacgcgatgcatgctttccacctcacatgttcagtccgccgtcgatcgaaaggaccgcgccggtgatataagcggcgtcgtcgctcgccaggaaggcggcggccgccgcgatttcttcgggtttgcccatgcgcttgagcggcaccgcgttcatggcggcttccagcgcgctctggttcatttcgcgggtcatatcggtttccacaaagcccggcgcgatggcgttgcacgtcacgccgcggctggccagttccttggccacggttttggtcaggccaatcagccccgccttggccgaggcgtagttcgcctggccggggttgcccatcagcccggcgacggaagcgatgttgatgatccgccccgcgcgctggcgcacaaagtccggcgtgagcacgcggatggtgtggaacgcgcccatcaggttcacgcgcaccacggcggcaaaatcctcgctggacatgcgcataatcagcttatcgcgcgcgatgcccgcgttgtttacaagaatgtggatggggccgagcgcttctttcgccgcgtggatggcggattccacctgggcatattcgcccacgtccgcgcgcgcgcaaaaagcttgcgcgcccaacgcgcgcgccgcttcgacggtttcctgcgcggcggcctcgttgcccgcgtataggatggcgacatttgcgccctcacgcgccatgcgcagggcaatggcgcggccaatgccgcgcgaaccgcccgtgatgagcgccgtttttccctgtagcatactttcctccggtcagttggatagatttgccgctgcgcgccgcacgtggcgcgcagcggatttgcgttataaaagtgcctgcgccgccgcctggatgccggccatgtcttccgcgttcaggaaggcgtggtccggagcgatgcgcttgcccagtccggcaagcgtggcgccggggccgagttccaggaacgattccgcgcccgcggcgatgaggttttcaatggtctgctgccagcgcaccgggtgcgccacctggcccgccaggcattcgcgcgcggtttccagggaatagggcagcgcggtctggttggcgtatagcgggatgcgcggcgcggcgaggggcgcgctctttagcgcctccaccaggccggcctgcgcgttttgcataaagggggaatggaagccgccgctcaccttcaggcgcatggcgcggccgccctccgcctgcacgcggctggcaaaggcgtccgcctcttcgctggcgcaggcgaccacggtctgccccgggctgttgtaattcaccgggtagacctgcgagaattcccgggccagcgcttccacgcgggccgcatcgagcttgagcaccgcgagcatcgcgcccgggtgcgccttggcgcattcgtccatcagttcggcgcgccggatcaccaggcggaacgcgtcctccacgggcagcatgccgctgagggcgacgccggccagctcgcccagcgagaagcccgccaggaacgcgggaaccagccccgcttcctgggcggcggcggcgcaggccatatccacggcgaacacgcagggttgggtgttcgccgtttggctgagctcctgcgcgctgccggaaaagcacatttccagcgtgccgggacggatggcctccagcgtatcgaaaagcgcgcgcgccgcgggcgaatgttcatagagggagcggcccatgccgggcttttgcgcgccctgcccggccaacaaaaacgctacgcgagccattttggggcctccgcgagcagcttttccgcctccgcgaacatttcctggatgatttccgcggcgggctgctcctttttcaccagcgcggcgatctggcccgccatgaacgtgccggtttccaaatcgccctcgatggcggcgcggcgcagcgcgcccgcgccatagcgctcgatttcctcgttggttttgctggaatcgtattccatatcgtgcatggcgcgcatcatggggtttttcagcccgcgcacggggtggccgagccggcggcccgtgacctgcgtgtcgatatcgcgcgcggccagcactttctttttatagttctcgtggatctggcactcattggcgcacaaaaaccgcgtgccgcactgcacgccttccgcgcccagcatgaacgaagccgcgatgccgcgtccgtccgcgatgccgcccgccgccaacacggggatgtccaccgcgtccaccacctggggcaccagcgccatggtggtcagttcgccgatgtggccgccggattcgcagccctcggcaatgaccgccgtcgcgcccgcgcgcgccacgcgcttggcgatggcggtggagggcaccaccggcgcgactttgatgcccgcgggcacccactgcttcatgtacttttcgggcaggcccgcgcccgtggtcaccacgggcacatgctcgtccatcaccaactgggcgacctcttccacgtgcgggctcatcagcatgatgttcacgccgaagggcttgtccgtggcttcgcggcaggcgcgaatctggccgcgcaggtagtccgcgtccaggttcatggcggaaatgatgcccagcccgcccgcgttggaaaccgccgcggcgagctttgcctcggaaacccaggccatgccaccctggaagatggggtattcgatgccgaaagcttcggtgattcgggttttcatcattgcgccgccttcgcctcttcgatgcgcttgaccatatccgccacggtcttcacggcctcgtccagctcgatggagatgccgaactcgtcctcaaaattcatcaccagttccgccacgtccagcgagtccacctgcagctcggcaaaggtggaatccatggtgatcgtgttcacgtcgatgcctttgtggtcggcgagcatctgagcaaccttattgaacgtatccattgttgatatcctcctaaaatgatggttgatttatatcgcaaaggaggccggaagagaagcccggcgcgtccttttgccgcgaaaaagttatgcccagcgcaatagggccgcgcccgaggtgagtcccgcgccaaacgcgctcatggcgatgagcatgccgggtttcagcgcgccggagcggttcaactcgtccagcaaaatgggcacgctggccgaggaggtgttgcccgtgcgcgcgatgttcgaggggaacttttccttcggctggcccagccgcgtgcgcacggcttccaggatgcgcatgttggcctggtggagcacgaaacagtcgatgtcttctagccccacgccagccgcttccgccacggcgcgcagatccgcgctggaggtggaaaccgcgaatttgaacacttcctggcccgccatatgcaggtaagaagcgggatgcttgtgctcctggaaggggttgttgccgggatcgtgataagcgttcagcgcgcccacgttgggcgtggaagtcagccgcgtggccaacagcccttcgccctctcctacgacggccgcgcccgcgccatcgccaaagagcacgcaggtggagcggtccgtccagtcgcacaggcgggaaatcgcctccgcgcaggtgatgagaatccgcttcgccttgccggaatcgatataggcctgcgccaggtcgagcgcgtagagaaagccggaacaggcggcgttcacgtcgaacgccgggcagtgcgcgccgatttcgccctgcaaaaggctggcggtggaaggcgtaatggtttcccccttcgtggtggaaacgatgagcatatcgatatcgtccgcgtttaggcccgcgttttccagcgcgcgcagggaagcttcgcgcgcgagcgacagcacgctttcttcgttgagcacgcggcgctcggcaatgcccgtgcgcgtgcggatccattcgtcgctggtgtccagaaacgccgtcagttcttcgttcgtaacccggcgctcgggctgcgcgctgccggttcccaaaattctcatggctgcattcctccgttttgatcggcctggccagaaagctgcgaaacagccttgtcaaaaaattcgttcagcgaccgtatcgcgcccagcagcacgggtttttcctcctcccgcacgccctggcacacggccttgagcatttgccggtgaaaataccggtgggccacttccgcgcggcggccggtttccgtgagttgcacatacacccggcgcccgtcttccgcgccgcgcgatttgagcacaaagccctttttttccagctttttcacggcgaccgtggccgagggcagggaaatctccatgtcctgcgcgatggcggtgatgctcgcgccattgttcccgccgcgcccgatgcattcgatgatgtgcatttcgccgatgctcaggctgccattgctcagcgatttgagcatggcctcctccacgttgtggatggagcggtaggtgtgcataaatagcagattgagttcggtggcaaagggatccatgtgtctgccccttcatttagttttacaaaccaatcagactgtcaaaaaccccaggagagcgcgagagggacggagcttcgccgccgccagtggcggaaacaggcgaa

SEQ ID NO: 3119 - DNA, 32759 bp, Unknown
  16S sequences of unknown bacteria
tttttttcaagcagaagacggcatacgagatttcaaatctcggctcggagcacatcaccgccggaatgatctgtgcgattcacggaagcctttcaaagaaggattatcggtatttccgcataaaaggactttcggctcccgacgattacgagtcgatgagagaaacactccgtcggcgtatgtcgcatctgtcggatgagaacggatcgttttcggaataccccgaccttattctgcttgacggcggagcgggtcatgtgagcgttgtcaccgaagagcttgagcgtctcgggatcgacgtgccggtgttcggcatggtcaaggattcgcaccataagacgagaacggtggtcggagcgggcggcgaggtcaatatcgcacgcgacaacgaaatattcactttcatataccgccttcaggaagaggttcaccgctttactgtgtcgaagatgacggacgcaaagcgaaagacgctgaagcgttcgactcttcaggatatagacggaatcggagaaaagaaagcgaaggcgcttcttgcgcatttcagatcgctttccgcgataaagtcggcggatgtcggcgagcttgccgcggtgaagggaatctcgcagagcgatgccgaacgggtcgcctcacattttgcggataaggcggcacgggaaaacgagaaagaaaactgattgtccgaaaggacgtattacttttgccgcagcgcggcagaacggagatagtatgagaattataacgggaaaagcaagaaatattccgctcaaaactcttgagggagacgacacgcgccctacgtccgagagggtgaaggaagcggtgttttccatgcttcagtttgaaatcgagggacggcgcgtgctcgatctgttcgccggaagcggtcagctcggacttgaagccctgagccgcggcgcgtctcacgcgacgtttatcgacaactcaagagcggcaagcgatataataatcgaaaacgcgaaaaaagcggggctgtttgagctgtgccgagtgtcggcgtcggattacgcatctgcgctcaggggaaacgcgggcagggaaagctacgatatcgtgttcatcgatccgccgtatgattcaatgctcgttccggatgcgctgagactgcttgtctcgggaaaaatgcttgcgcctcattccgtggtcgtctgcgagagccggtgcgcaagcgctccgaagagaaaaaagcggagtgaggaaagcgaacaggcggagatttacaacggcgttttcggcgcggacgactcccttgcttcggctttcgatatccgcaagtcgaacgcatacggcataacgagaattaccctgctcgagcccaaaacgcagaacggctgatttgcgccgtgtgcggcgcaatgccaaatgaaaggagaccgcttcctttcggatgcgggaaaacggaaatggaattttcggcaaaaaacgcgctgatcccgggaagctttgacccgataacgctcggacaccttgacgtgataatacgcgcatccggcatattcgaccgcgtgacggtggcggttcttgccaacgcggaaaagcatacgatgtttacggcagacgaacgccttgccatggtctctcttgcgatcgaggatgaagggctgaagaatgtcggcgcggtttcgtgggacggactcacatcggatgcggcgagcgctttcggtgccgcaaccttggtgaaaggcgcacggggatgtgtcgatttcgactatgagcttatgctcgcatccgtgatgcgcgatttcgatgcgcggctcgacagcgttatctttcccgcacgccccgagtttgcgcatatatcctcgacatacgcgcgcgaggtcatccgatacggcggtgagctctcgcgtgcgctgcctgcgtcggtcgcttcgttcgtcgaaaagctgcatcggaaatgacgctttcgtggagctgcccggcgcggagtgatgcggatgcggtgaagcgccccgtgaaattgccacgcaaaattgccttccaaatcacttaccgcgatgcgcggatttgatgcgcggaatcgccgtaaaacagcgttcggcagcttttgactgccgggatatcgagcggaatagcagcacggctgcgatctgcttctcatggtgaaagaaaaacaaacaacgaaatccctcctacggcatattgaacgccggggagggattttttgcgttgcatgcccatgcatgcgacggtgactttcgcacggtatgatgtgcacgcaaatacatgaacgctcagcggcgctcacgggcatacaaaatcgccacgcggcgctctgtgcgatatttgctccgcgcaggcactgcgggcataaaaacggaaaatgatttcagggcttgccgatcgcatttcggcatccgaataatttgtttacgcaattgtcgacagcatttgcatatttttttgcgttcgtcgaaacgggtcgcttcacgcggtattttacgcaaacgaataaaagattatcgaacaaaaaatgtaaaattatgtctgatacagagagaatgcgcgggggaaaagacgggaaaaagcgggaaatgcgcgaaacaagtgaataaaatcgcgcaaaagataaaaaaattttgcgaaagcccttgctatttatggctcggtgtattataatgaaaacacataaagtggtggaaagtggtgtgaagtgtcacttataatccacagaaagggggaaaacggataatgctgaccgaccgttttgagcattcacttgacggaaaaaacagactgataattcccgcaaagcaccgtgagcagctcggccccgtatttatgataacacaaagcatagacaattgtctacaggtttattccatggaggaatggaaaaaatacagcgacaaattagacgcattgcctaataagaagcttgctgcggtcagacgtttcatttattcaaacgcatccgaagtcacccccgactcacagggacgtgtcgttatctcccccgcgctgaagagatttgcggggatcgaaaagaatgtcgttatcgtaggctgcggaaatatcgcggagatatgggctgccgagaagtgggaagagatcaacagcgaggacaatcttgcatcggttgccgagcttatggatgagtatggtctctgatatggaaaagatcgaattcgaacatattccggtaatgctttccgaatgcatggaagcgctcaatataagagacggaaaaacatacgtggactgcaccgcgggcggcggcggtcattcggcggcaattgccgaaagaatgggcagcggcagactgataagccttgaccgcgacgatgaggcgatcgccgcgtgccgtgcgcgtgtttcggcggtttccccgaacgcggcagttgtaaaatgtacatttgacgaaattgcgtcggctctcgattccgtcggggtcggaagtatagacggggtgctttgggatctcggcgtgtcgtctcaccagctcgatacccccgaacgaggcttttcctacatgacggacgcgcctctcgatatgagaatggacacgggcgcggcattctgcgccgcagatgtcgtgaacacctatcccgagaaggagctttcacgcgtaatctcggaatacggcgaggaaaagttcgcgcagagaattgccgcagctatcgccgccgcaagggaaaaagcccccgtccgcaccacgcttgagcttgcggacatagtgaaaaacgcaattcccgcagctgcgcgccgtgcggaggcgcagcatccggcaaagcgtacctttcaggcgatacgtatcgaggtgaacggcgaacttgcgcagattgaaccgtcgatccgcgcggcggtcgagcgcctgaatccgggcggaagagcggctgtgataacctttcattcgcttgaggacaggatcgtcaaacgaacgttccgcgatcttgaatctccgtgcacctgcccgcctgatttcccggtatgcgtgtgcggaaagaagccgatcgtgaaggcgatatcgaaaaagccgataacggcatctgccgaagaacttgagaagaatccgagagcgcgcagcgcaaagctcagagtcgtcgagaagctctgaaaaaatgcactcgaaaaagaccgcctcgtgcggaaataataaaatataaaggggacggaaaaaatgacatacggcgttcaaagaatgacttttaccggaaataccctttgcgatagacttaaagctgaattcggcgaaagaaccgccgttgcaataaacagaagtcgcaatgatgaggcagcgcgcagacgcgatcgccgcagggcatctcccaccgcgggacgctcgcgcaccgtgggacaggttatgtccgcggcacacacggaaggagcacgggcacaggcgcttccgcgccatccggaggcataccgtgattcacgtccgctccgccgtccgggaacagatgcctaccgcagcgcacaggcacagcgagcacaggcagcacgccgcagttctgcgaatacggcaggacgtcctcacaatctcatgagagatacggtagtgcaccgtatgcctaagcccgacacgggcaagaccgcgcttcagagcagcgtcgaggtgttcggcagagcgtatgcccgcggtgagcgaatccgtgagcacgccgcagccgaacgcaaagctccccgccgcagaagcgccccccgtgtaagcacaaagaaaaccgtttccgtcacaaagatactcgaaaacgtcagaaccttttttctcggcgcgaagccgaagcatgtcgaggtaaagcagaagaaagcgccgttcccgctcggtatggtggcacttcttgcggtttgcaccatgatggttatggtcatgatgaactcgtttgctcagctttacgagtacaggcgcgagatctccgacctgagaacaaagcaggagcagcttgatgccgaagcggtaaggctcaacggacttctcgaagcgcgcgacgatatacgcaccgtggaacagatcgcaaccgaaaagatcggaatggtcagctccgatctcgtggaatcgcgtttcgtttcgcttgccgattccgacagagttgaactcaaggataccggagattcggaaaataccggcgcattttcgacactgctttccgcgataggtgataatctcgggaaaatatcggagtatttcaactgaatatccgcatatcggatgacattatatcgtggcgtgcaagaatgtacgccacgattttgaatataatataaagacctttgcgaaatccgaacggacatgaaatccgaaacggctgcgccgtttttatggagggatatattttgcccgaagaaaacaagaacagaaaaaacgatgacgcatactccgcgctccccggaaagaggatcgagcggcggacggtacggcgcgcaatagcgattatggcgtgctttgccgtatgcgccttatccgtggtcgccgtacttttcaaaatgcaggtgatcgactatgaaaattaccagaagagggtgctcgatcagcttacggtcgagactgaggtgaacccggcacgcggtgagatatacgacagaaacggcaacatccttgcgaccaacgtgtcgaactacatggttataatctctcccaaggatatagtcgatgcgatggaggatgatgacaatgccgttcaggcgttctcatggaccgacggcgacggaaagacgcttgacgggctcaagatgaacgagcttatcgcgcaccgcctctcggaattgcccgatgtcgattacgatactgttatcgaaaaggcatcaaagcgcaacagaaaatacgaaaagataaccgagggactgaacgaagaggaagcggatgagatccgcagattcatctccgaatacgatctcaccgatcagatatacctccgtgcgacgtcggtgaggtattacccctactccgatctgtgctcccacgtcctcggattcacaaaccgcgacggagtcggcatatacggtcttgagagctattacaacaacctgctcgagggaacgagcggcagatacataaccgcgcaggacgcgcattcaaacgatatgccgttcacatacgaaagctacatagaagcttcaaacggctataatattgagacgaccatcgacgtatatatacagtatgaacttgaaaatcagcttgaggatacctacaaggacaacggagcggacgaacgcgcctgcggcattgtcatggacgtgaacacgggcgcgatacttgccatggcgacgtatcctccgttcgatctgaacgatccgtatacactcgatcagtattcaaaggaaaagcttgcggcgtcgggacttgaggagggaagcgatgcatatcgtaaaagctattatgagatgctctacaatatgtggtcgaacaaggcggttacggtactctatgagccgggttcaaccttcaaggcggtcaccgcaacgataggatttgaagagaatgtcctgaaggaaagcgacaccttctattgctcgggaagctataaggttgacggttaccctcgtccgatctcgtgccataagcatgagggtcacggacttgttgacttcgtacacggacttcagcagtcctgcaaccccacgatgatgatgctcggcgagcgcatcggagccgaaaagttctataagaatttccgagcgttcgggtataccgagaaaacggggatcgaccttcccgcagaatcatcgtccatagtctccgatgagaagaatttcaacggagtatcgcttgcggtttacacattcggtcagacgttcaaggtcactccgattcagcagatcgacgctatagcggcgatcgcaaacggcggaaatctcgtcacaccgcacctgatatcacgcattttagacgatgacggaaatacggtgtacgaatacaagaccgatgtaaagcgtcaggtcgcaagcgaaagcagctgcgaaagggtcacgacgatacttgaagcgggcgtttccggcgacggcggcgcgaagaacgcatatgtccgcggatacaaggtcgccgcgaaaaccggtacctccgagaagaaggataaatacgacgaaaacggaaatacgccgtaccgcgtcggctcgactgtcgcctatgctccggcggaggaccccgagatcgccgccataatcatagtcgatgagccgacgaacgagcgaatctacggaagcgtggtcgcggcgccgtacatatcgaatcttctttcgtttacactgccttacctcggatacgagccgcagtacagcgcagaggagcttgaagccgtcgaagtgacggtcggaacatacgtcggatcggaaaaggcgacggctgtcgcgtacatcgaagcggcgggactgaaatacgagatcatcggaagcggcgataccgtcaccgcacagattcccgaggcgggaagcttggtacttaaatcagccggaaagatccttctctataccggaggcgagagcgcgacacaaagcgttcaggttccggatctcaagggcaagaccgcagcggcggcaaatcagatactcaccaacatgggactgaacgtaagctttaccggaacgcagagcctccgcgacggcgcgcttgtcacctctcagtcgatcgaggcggggacggaggttccgcccggaactgttgtcacgcttgatataaagcaccttgacggaacagactgacaaataaaggcgccccgcgcctgcttatacaaaaaaatcggacgaaaaatataaaggaataacgaaagatatgctgccgcgcttcggcgctgataccgaagccgaatgaataatcttgccgcatcggcggcggaacggagacggtcatgaagctttcgctgtttctttcgggggtgagcgtgctctcctccaacttcgatcccgattcacttgacgcaaacggaatttcgacggattcgcgcaccgttcgtccgggagagcttttcatctgccttgacggaacgagctttgacggtgcggactatatatccgaagcgtcggcggcgggtgcgtgcgcggtcgtcgtgcggcgcggcaagcgcgtgccggacggtgtccgttatctcgaagtcgcatcgacacgttactgcgccgcgcagatatggaacaacttctgttcccgccccgcagacggcatgaatataatcgccgttacggggacgaacggcaagaccacgacctcgttcatccttgaggcactgctgcgcagtgtgggcgtgcgtacggggcttatcggaacggtcggtgcgaagatcgacggaaagccggtcgatataggacacggaagcgagatcgattcggcagcctgcgcgatgacgacacccgatccgaagtatctctacggagcgcttcgcatgatgagggacgcgggatgcaagtatgtcgttattgaggcatcgagccacgcgcttcatcagcgcaagcttgatccgctccgaccgaagctgtcccttttcacgaatctgtcgccggagcatctcgactaccactttaccatggaggcatacgcaaaggcaaaggctcacctgtttgaactaagcgaggcgggaataatgaacggcgatgatccgtattcgcggcacatcgcgtcgcttgcgccgaagtgcccgatgaaatttctttcgaaaaaacagcgcgcggattttacggttgaatctcccgtgctccgcggactttcgggagtctcgtttgatcttttgtcggaattcgggaaagtacatgccgatgtcgcccttccggggtatttcaatataaccgattccgcccttgcggcatcggcggcgctgagcctcggcgcggaatgcggcgacgttgaaaaggcgcttgggctcgtcggtcagatcgacggcagaatggagaggctgtacgacggggaatttaccgtgatcagggatttcgcccataccgctttagctctcgaaggagcgctttccgttgtgaagaaatgtactcggggaagggtgatatgcgttttcggctgcggaggcgaccgcgataaaagcaagagagcgccgatgggcgaatgcgcaacgagacttgcggatatttccgttgtgacttcggataatccgagaacggagaatccgatatcgataatcgaggatatactacgcggcgttcaccgtgacagcgattatacggtagttccgaacaggcgggaggcgatcgcctgcgcgctttcgattgcgcgcgagggcgatacggtgatgctgtgcggcaagggacacgaaaattacgagatagattcttcgggaaagcatccatttgacgagcggtcggtggtggcggagtttaccgagaaaaataaacggcaaaattaaagtccaaaaattaaatcacgccttgaaaaacatgaggtttttgtgtataatgtaaagtagatatttatactgcaaggagtcgaaaatgagcgttgaacttaaaataaaaaatctgactgcggaagagattgcgaaggtctgccgcgctgagctcataaagatcggttctccggcttccgaaatcgtcgaaagaatatctcacgattcgcgcgagggcggggataaaacacttttttgcgccattgtgggtgaaaaatacgacggtcacgattttattgcggatgcggtttcgacgggaagtcaggtggtgcttctttcgtcgctgcccgaaaataccgatgggcttgatttttacgcgattcgcgttgaggataccgtgaaggcgctcggaactcttgccgcgtactataaagatttttccgatgctacgtttgtggcggtcacgggttccgtcggaaaaacgaccacgaaggagtttatctccgccgtggcatcggcgtcgttcaagacgcataagacgaaaggcaactacaataacgagataggtctgccgctgacgctgttcgatctttctcccgacgataaggtttccgttatcgagatgggaatgtccgcgcgcggcgagatagagtatatgtcaaagctcgtgcgtcccgacattgcggtcataacaaacatcggtacatctcaccttgccgcgctcggaacgcgggagaacatatgcgcagccaaattggagatcgtcagcggacttaaaaaggacggttcgcttatgcttaacgccgacgagccgcttttgttcgctacccgcggtcatgtcgagcccgaacccgaattcgtcagcgtgtacaaccgcttcggcgattaccgcgcggtcaatatacgctatcttgaaaacgggattatgtacgatctcatttacaacaacaaagcagtcaccaatgtcgagattcccgcgctcggcagacataacgtatacaattcgcttatcgcatatgcggtcggcgtcaagctcggcatgaccgacgacatgatccgccgcggacttcttacgtttgtaagcaccgacaagcgtcagaacatatacgacgtcggcggaataacggttatcgacgactgctataacgcaagccccgagtccatgcgtgcggcgatagacgtgcttacgtcgatcgcgtcgagaagaggcgttaagccctgtgcgcttctcggagacatgcttgagctcggagagtattcgaggctcatgcacgatcagctcggtcagtacgctgcgcagatgaaggtgcagaagctctactgctacggagcaatggcggatatcgttgcggaagcggcgataaagaagggcgtgcgtgcggacaatgtatatgtcagtctcgattccgacaatccgacggagatggcgaagatgataaattcatcgatgcagtcgggcgacgtgcttcttgtaaaagcgagccgtgcggtttcggcggagcgggtcatcgaagccttgaagaagatacgaaaaaaatgatccggacggcggcgtgccaaatgccgcgggatccgggagcgacagaaatcgccgctttgcgaatcatatttcccgaatgaaaggaagccttccgaaggctgatgatactttatgagtcagagaatactttttgccgtttgccttgtctttacctttgcggtgacggtgatgattctgagaaagcttatcccgttcctgaaaagcaaaaagatgggacagcatattctcgatatcggtccgagatggcaccgcagtaaagagggaacgcctaccatgggcggactctcgtttatcatagcttcggcggcggcgggactttgcgcgttcgtttatctcgggatacgcgacggattttcgaataatcttgcgcttctgtttacgcttctctttgctgcagccaacggactaatcggcatgatcgacgattcggcgaagtttcgcaaagcgcagaacgaggggcttaccgctccgcagaagtatctgctccagcttgccgcatccggtgcataccttgccgcgatgatggcatcgggtaatttgacgacggagctttatattccgttcatcggggcgacgcttgaactcggagtgctttactatgcgtttgcgctcatcctccttacgggagtggtcaatgcggtaaaccttaccgacgggatcgacgggcttgtaagctcggtcacgcttgtcgtcggcgtgttcttcgccctctgcgcgtttatccttccggatatgtgcgagctgactgtgccgtcggcgcttattatcgcatcatctgcgggatttcttatctacaacttctatcccgcaagagtgttcatgggcgataccggttcgctttatctcggcgcttttacggtcggatgtgcatttatggcgggaaatccgctcataattgtcgtatgcggcatcatatacataattgaggcgttctccgttatgcttcaggtcgggtatttcaagatcacccacggaaagcggctcttcaaaatggctccgatccaccaccatttcgaaaaatgcggatggagcgagctgaaaatagtcggagttttcacatttataacagcgctgttctgcgcgattgcgtggctcggcgtaaaataacacggtatgcatcgggtaaagccgctttccgcggctgtgtgaccgatttcataccgaacgttcgaaagggggactttatctttggcagacgatcttgatatgagatacggccgggggcagagtccccgttttactgcaaatacgcagggcggaggcggcgagcctcgttcgcatggcggtgaaccgcatcgccgaggaaataccgtgagttcgggaaacgtgcgccggaaatcttctggatattcggcagctcggcgagtttcgcgcccgcaggagcgtcccggcggcagcgttaattccgacggaagaggggacgttcgcgtaagacgtgcatcctcggatgctcgcagacaggcacagcgacgcgttccggcagaacgtccggcgcacacttcgcccggcacggtgcgttcgtcatcttcgcttccctcgacgaatgtgcgcgaagcaaagcgccgtctgaaaacagagaagtataaaaaatcgcttgcgaaggaagcggaagccgagaaaaagcgtaatatcggcatcgtgcgcgtgcgcctcggcgtggatcatgtcatgcttgcgctgatacttacgcttttgtgcctcggcaccgtgatggtcttcagtgcaagctatccgtcggcgctcgcgcaggaggacgacagcctttactatattaagcgtcaggcggtctttgccgttctcggcgtgatcgttatgatggcggcgtccgccgtcccgtacagcttctaccgacggatcgcggtacccgcgtatatagtttccgtggtgcttcttcttcttgttcttgtggtcggaaaaagcgaaggtgaagcaaagcggtggctcggaataccgaacacatcattttcgattcagccgtcggagctcatgaaaacggcgcttgtgctcatacttgcatggtatcttgaaaagaaccggaaatatgcaatcgacaggcttcacacgggtccgatgctcatacgcggcgttctgatccccgcttcgtttgttggatgcgcatgtatcctcgtgcttcttgaaaagcacctttccggcactatcataatcggggcgatcggtcttatcgtaatgcttatcggcggtgtacacatgggatatacactcggcggcttcggcgttgcgggtgcgggagcggcgggactgttcctgtggaaaaatccgtacgctcttcagcgaattacgaccaaaatgaacgaaaatgccgacgtcctacgtgaaaagtggcagacgacgcagggaatgtacgcgatcggatcgggcggtccgctcggcgtcggaatcggcgcaagccgtcagaaattcagttatgtttcagccgcgcagaacgactttatcttcacgatatggtgtgaggagatgggctttgtcggtgcggtgatacttatcgcgctgtatcttatcttcatatggcgcggcttcaaaatagcgatgcacgcgccggacacattctccgcgctcactgttttcggaataatttcaaaggtcggattacaggcgtttctgaatatcgccgtcgtttgcgacattattccgaataccggagtttcactgccgtttttctcatatggcggatcgtcgctgatcattcttatggcggaaatgggtatcgtgctgtcgatatcgaagcactcataccagaaaaaatagaaaaacgaaaaggatttcaagatgagagtacttatgacgggcggcggaacgggcggccatgtaaatcccgcacttgccatcgccgggacgataaaacaaaacgaccccgaaagcacgatcgcatatgtcggaacaccacgcggaatagaaaataagcttgtccccgcggcgggctacaagctttaccatgttgatatacggggactgaaaaggagtctgtccccggagaatattaagacccttttcatgacggtcagctcgacgctgaaggcgcggaggctaatccgtgaattcaagcccgatatagttatcggaacgggcgggtacgtttgctttcccatcgttaaagcggcggctgatcttcatgtgccgaccgcgcttcatgagtcgaatgcggttcccggtgtcgcggtgaaaatgctcgctccgtatgtcgatcggatatatctgaactttgaggagactgcgcactgtctttccaagtattcctccaagcttatgcgtgtgggaaatccgctgatgagcgcattttcgccgagggaccccgccgaggcaaagaaaaagctcggtcttcccgagggaacgaaaaacgtgcttctgacctacggaggaagcatgggcgccgagcgcgtgaacgatgctgttctcgaacttatgcagaagtacacgtcgcagcatcccgaaacgtaccatatccatgcgacgggctcgatcgagtatgaggcggcttcgcgtcaatttcatgagctcgggcttgataaatgcccgaatattgatttccgcgaatatatctacaatatgcccgacgttatggcggcagcggatcttatcgtgtgccgcgccggtgcgatgaccgtgtcggagcttgcaatgtcggggaaagcggcggtgtttatcccgtctcccaacgtgacgaacaatcatcagtacaagaacgccaaggtcctctgcgatgccgatgctgcggaaatcgtcgaggaatgctcacttgacgcgggcgcgctcaacggaatcgtggaaaagcttctctcggacgagggcgaaaaaatgagggaaagcatgggcgagaggatccgcgcatttgccgttcccgatgcaaataagctgatctacagggatgttctcagccttatcgggagataattcactcccggtgggacaggcataataccttatttcggaagggggagaacgtcccgtgaaacggaaaaataaaaaagacgcctctaccggactgtatgagagaatctacgaggagcgactcagtcagcgcgttgccgacgccgaggatgaggcgcgccgcatggaggcgtatgagcggaccgtgcataacaggcagagccgaagggcactgcgcgccttcgccgcgttcgttcttatttttgtgctgtttgcggcggcggcatttattgcgtataagcttctgtttgttataagcgatatttccgtcgagggaaacacgacctataccgcagacgagataatcgcggcatccggtgtgaaaagcggggacaacctctattccttcagctcgcgtaccgccgaacgtctgatgaagaaaaagtgtccgtatgtgaaatctctgaaggtggaacgcgctattccgaacaggataaggttcaccgtggaggaagaaaaggcggaatttgccgcgcagatatacgggagatatttcatcctttcgggggagctttgcgtgcttgagaaggacgcgccgccggagaagatcgaaaatctctgtatgctgaaactacctgcggtatcctccgccgtgtgcggagagactgttgaatttcgtgattcctttgcgtcggatcaggtatcagcgacggcttcggcgcttctttcgtcgtcgcttgccgaaagaatacgttcggtcgatcttgcggatctttattctctgaaaatgaattgcgatggtaaataccttctcgatttcggagggtattccgatacggcgctgaagctgaaggtcgcatcgaaggtcctcgaggacgaaatgttcaacggggaaaacaaggcgaaaatcgacctgagcaatacctcgaaaaccacggtcaccgtggataacacgctgaagctcgattagttttatgcatttgcaaaatatatttagacaaacgtgaaaaatgcaagtacgccgctgaaataggaaaaatacgacaaaaatcagccgaaacggaagaaaaatgcgaaaaaaatcgcactttttttgataaagctattgcaaaacctttcaaataagtatattatattataaaaggcaattgccgttggcagccttgcgtaaaaacagacagataaaaaagcacggaagaactgcatatcactgggtgtgccgcgtgcggaaaaaattaaaatacggaaaattcggaggacatagcgatgccatttgaacttgatgagaatttcgaaagcggcgtaaacattaaagtaacaggagtcggcggcggcggaaacaatgccgtcaaccgtatgataacttcgaacgtccgcggggtcgatttcatcgcgatcaacacggacaagcaggttcttgttcattccaatgcaactcataagatcccgatcggagagaaaataacgaagggacacggagccggaagtaatcccgagatcggcggacgcgcggcggaggagagtcttgaggagatcaagaacgcaataagcggcgccgatatggtattcatcaccgccggaatgggaggcggaaccggaacgggtgcggctcccgtggttgcgcgtgtcgcaagagagatggggattctcacggtaggtatcgttaccaagccgttcgcattcgaaggaaagcgccgaatggatcaggctgaactcggtatttccgcactcagcgaatttgtcgattctctcgttattattccgaacgagagactgaaacaggtttccgaatcgagaataacccttctcaatgcatttgagatttccgatgatgtgctccgtcacggtgtacagagcatttccgagcttatcaacgtacccgggttcgtaaaccttgacttcgcggatgttaccgccgtcatgaaggacgcgggatacgctcacatgggcgtcggtgagggaacaggcaaggacaaggcggagatcgcggcaaaagcggcgatttcgagtccgcttctcgagacctcgatttccggtgcaaacggaatccttataaacataaccgcatctcccgatatcggacttgaggatatcgatcttgcttcgaccatgataaccaacgaagcttccgacaacgctaccgttatctggggtgcgtcgttcgatcccgagcttgaggacaagatgaagatcacgatcattgcgacgggatttgcaaacgataaggagaagcttccgaagatggatgcgaaggcagccgctcccgctcccgcgcaggaggagaagaaagccgaggtcactgccgaggaaaacgaattcgctccgaccgaggaggaaaagaacggagagcttcccgaggttgagccttccgcaatctccgaggatgatttcaacgaacttatgggaatgctcaaaaagcagaaaaatcccggaaacggcggattctgagaaataattttgaaatacgcggtgccgcagaatgaggctttcgttctgcggcacctttttttgccgcgcggatgatgggttttttcggggatatcgcgcgctgcgcggcgaggcggaacttttccggaaacggcggagctttcgattttttcggatgcatgagaaaatttgccttgctttctctttgcggatagattataatcttgatagatgtgcttttggcagaggtgcgccgaagcgttttttcgaaatacggaggtataacgaaatgaagacaatcaaccgttccgaacgttccgcaatgctttatacacagataaacgggcggatcttcacgcaggaagaacgcgaggggacttatacacctttcgataaagaatgcaaaacgccgtttcttgacgcattcgaaaaacattccgatacagagccgtatgtcgtgtgccttgcacatgcaatcgttgattcgtggctctgcaccgaacccgtgatacatgacggtgagataatcatcggcgaaccgagaccgagacggcttttctgggagcactttgcatgggggatcgagccgcatgccgacatatccgaatacgaggcaaacggatatgagtccgtggaagatctgaagaaacgcatggagaagctcagcgaaaagatgtctcccatgagatacagtcatgtcagaaactgcgaaagggaatttttcggtgaagaaaacctcgacaaggtcggtatgctttggggagcgggcgcatatcagggacacaccgtgccgaattaccgccgcctcctttcggacggaataggcaaaactcttcgctatgtgaaagaatgcgcggcgcagacggacgacagtgacaagacggacttttaccgtgcgcttgagatcattctcaaaggcttttcttcgtgggtgagaatatacgcggattacgcggagaaagcggcagcggcggagaaggacagcgtgcgcgccgacgagctttcgaagatcgccgcaaactgccgcgccgttgccgaggatgcgcccgtgacgttcttccaggctgcgcagcttatgtggttctactgcctgtgggactgcgtggactgcgtcggaagacttgatcagtatatgttcccgtttgttctcagctcccgccgcagcggcgacgtatttgacgaggacgatataatctttgccctgatgtacaagatgtgggaattcggtgttcacaacatcacggtttccggctcgtctcccgacgggaaggatgagacgaacgatcttacatacaagctgctacaggcgcttcaccatatccacagcacgcatccgagaatgtcggtgcgcatacataagaagacttcaaaggagctttggaagcagatcacgtcaatgtgggcgtccggtatgtccgatcccacggtcgtgtcggatacggtcgtgccgcccgcactcatcggatacggcgtaactccggaggatgcatacgattatacgatgctcggctgtcaggagatcgaaattcccggaaagagcaacttcggatgcgaggacggcagcttcaatatcgccaaggttcttgagtacacgctcaacaacggaaagtgcaggaaaaccggcgcgcagatgtcgattgagactggatatcttcacaatttcaagtcattcgccgagctttgggatgcctatacgaaacagctcagctatctcgtgaagccttatctcgagttctgcggacgcggtgtcgatataagaaacggaaacttcgccaagctcgtaaagagcgcgtttaccgacgactgcataaagaagggacacaatctcgacgacggcggcgcggtctataacttcggcgttatcgagacggtcggagcggcagcggcggcggattcgcttactgcgataaagaaactcgtctttgaagaaaagaaggtagacgcgcgtgagcttgaagccgcgcttgaagcgaatttcgaaggctatgaaaatctccgccgtatgctcgcagatgttccgaaattcggaaataacgatgacgaggtcgatgaaatggcgtgccgcgtcctcgactttttctggagggagatacgcaagtacaaatccggacgcggggacgtctacatgggcgcctgctcgatgcttatgggaggtatcttctacggatcgaacatggcggcgtgtgcggacggaacgctcgcgggtgctccgctcggcaatacgatcggcgcacgcaccggaaacgcaaagagcggtcttacctcacacctcgcctctgttgccaagcttccgcttgagcttggcacgggaggaacgacctgtaatattcaggtcatgagatcgcttcttcagggaagtgaggcgagagagaaggttgcttctcttctggcggcgttccttgaaaacggcggacagatggcgcaggtcactaccgcagagcttgaagagctgaaagcagcgaaagaatcccccgagctttatcccgacctcctcgtgcgcgtcggcggatacagtgcgccgttcgtcgagcttcccgatttcgcgcaggatgagataatactccgctattccgaggacgaagcgctctgacgcaccgaacggaatgcggcgcggcaagctctgctttccgatattctacgaagtacccgatcaaaagaaaatcctccgtatgattttatcatacggaggattttttgctttaccgcagtacccgattcaccgttcgggtgcgattattcttcgagatcacggtacgcttggtcgaacagcgcccgcagccgctcatgctctccttttagccaaaggtagccgaatacgcactccattccggtcgcgcgcctgtattcggcggcgcttgcgcttttcgggatcccggagtgaacgcagtttctgccgcggcggaacacatcgctttcctcttcggtgaacatcggaattatgttgtcgagcgccttgctctgagctaccgcagtcacaaatgcgagagaacgctttgaagatgcctgcggggaaggggtgagcacgagacgctcacgcacgagaacttctataacgctgtcgccgaggtaagcaagctcggctgacggaatcagatcgggattttccactgctgattctccttccttaaaactgtagctggctgtcatcggggtcagatcattctgcggatgtaccgccagtagaatttcttcagcggcgcaagtcccgaatataccgacggagcgagtctgtttgcaaagtctgcaatgatgtgcagctcatcggcggtcagcgtggtgccgaactctgccttcatgatgcaggcgaatatgtccgcgatcgggctttcgcatattcctccgtaaaattcctcaagccgtgaggcaaactctccggcgccctcgccctcctcgggaactattcccgcgattcgcagcgtggtcattatcatgtcgtctatctcgagcgcgagaaggcggttttcttcggaatccggactgctgcactccagcccctcgtttatcttcgcattccgcttgtcgatctcctttttcgcacgctttccgagccatgaccgtatgaggcggaatattacgataactgcggcgacggcggcggcacagaggagaatgaacttcatcacgcgggcatatgcgcggttcttgcgctccgttatctgctcttccgtcggttcgtccgtttccgcttcggtttcggtcgtctcgggttcgaccttcggcttgtcttcgtttggcttgttttccgtgggagtttcgacaggtgccggcgggatatattcgtagctcggactgtatacggtctcggcatatttcggtgtcgtttcgtattgcgtccagccgaagtacggcagatagacctcgatccacgaatgtgcgtcctcatcgagagcataggatttgtaggacgacggtgcattggttgagtagtcgcgcgagaagtcgtttgcaacatagccctcgcagtatcggacggggtatccgaattcgcgtacaagtgcggcggcagccgttgcgaagtgtgtgcagtatccttcctttacgtcaaacaggaatgacgagagcacgctgcccgtgtcgctctcgggcgcggcgggagtaagagtgtagctgtagttttccgtgagataatcgacggcgaggcggataacggtattgtcggggacgctctgtccctcggcgtcggtgtatccgacgatctctccggcgtgattgcggcgcgcggtgtatccggcgtcggagagaagcttctgcgcaagcgcggagatgtcgtccccgccgattttttcggagtaagtctcttttgcgtactgacggtacgcaagctcgctctcgagaaacgcttcgaaattttcgcgctcttcctgcgatgcgtcaagccatgtcttgaccaccgagccgtcgataagcgatatgccccggcgggatatctcagcttcaaactgagcgtttatgtccgaaagatcgtccggacttacgttgaagctcatctcggtgcctccgacccttgccttgaccgtgccgtatccttcaagctcgagataacgtattgagtccgtgcaggattttgcagcgtcgatgtagtcgagagcaaggtcgaaatattcgatcttgtctgcgatattgtcgccgagcgcgggatcgttcatccgagttacaaatgacgcggtcgaatacgttatgtctctgtcaaaaaatctcgaggaatatattccgtcaaagaaatacgagtatttcgtcttgatcttttcgagagagccgtaatccattatggcgtaatcggtgttcatcgatgccggaatgaatatgagcttcgatgcggaattcacgcggcgtacgttgacatgctcgacgatgaagccgtatttcgagaagttcatgtagcagtcctgcgcggtcatctttaccgaggtgggaaaaacatatgagaagaatttcgtcttgagtgcgtcggacgtgaaatctcgaccgaaacgggaacggaaatcgacgaccgcatctgtggaggcgccgttccatgtgcccgtttcgttgttgaagtccccggagacccatgaacgcagatagacgggacttgcctcatgcgtgctcagatagaatatctgcgttccttcgaatttgagaggatcgaacgaaagagttcgcggcgcaagctccgaaagacttccgtacatcgcaagatcgttcaggtctacgtcgtcgcctgtgagatacgccgaaacgtatgtgctggcggtggacatcggatcgtagatcgcctttatttccggaaactttccggttacgatcagcgcggggagccataccgcgccgagcgcgattatcacggcgcaaagtcccgcaaatccgccggcggcgcaggtgcggcggcgcagatcgttctgttcgtggatttttgcgcgccgttcggcggcggcctttttctttccctgaatctgttttctcttatcgtcgcgcagctttttcgcaagcgcgggatcgcgctttgatgatattttgtcgcgccgtgcttcgctcttcttttttgctttttcctgctttttaaggcgccgcgcggctttcctcgctttcttttcttcggtcttcagctttttttcttcgacccgggcgtccttctttaccttgcgttttttctttttttcgagagcgaaaacggctctttttgccgcagcggcggactttctgtcgtccgaaaggcagagcgcactttcgtatgcgagttcggcttttctgcggaggatcgcgcgatcgttcttcctcgcaagcttcttttcctttttagctttgcgcgcgttttcttttttctcgcgtttcgctatgaacgaaaattcccgcccgctgtatcgcctgtcgtagtaacacatcgcaagggatgcggttatgaatacaaccgcggcggttatgccggaatttgttcttgtgaggttgtatgtgaacaccggaacgagaaggactatgcagatcacggcgcacgggagcatccgtgctttctttatgatgcatgtgccgaagattattccgaatacggcggcgatgatcgcggttccgacattcaggcaaagggaaatgtcaaatgagtatccctggccggaggcatatgaggaaaacgaaacgtatcccgactccgccatgcggtacatggcggtatcccaaacgcagcgaagcgagtcggagatgagcgcaaacggattcccccatacgcataggaatgcgcagaacagggctgctgacgcaggaggaacgcagagaagcgcggtcctgttgaacgatgcaagagaagcggctgccgaaataaagaggcaggctgcggcgaggactgcgattttcgcatgcggagcctcgggggaggacggagaggttatgccgaaagcatcggcgataaacagggacgagccgaaggtgcaggcaaagtgaacggcggcgcggcttatccagccgatgatgtagagcacaaagctcattccgtcgcgcccgtcgcagattatcggagccttcctatacattttgcgcttgcccatgctcacacctccccacggacgaacgaaacagttccgtcctgcattgcgctttcctcaaataccgatacctttaccgcggatgcggcaagctcgctgcacatcgcggaaacatatacaccgcgctcagtcggatcggtgtaggcgtatgtgtcatcgacgaagtaaagctccacattggtgtcggagcctccgccgccgcaggcggcggaaaatgcggaatattcggaaactgccttcggggaaagattcgacgttattatgcggacgttgagattctgcgtgccctcgacggcggagaagagcggagcgagtccgcgtccgccgaacgatacgggcgcacaggcaaagtcaagacattccgcggcgaaggactgcgtgtcggggtacgatctcgacacaacccccgatttttcgcgcatatcgttgtaaagcagcgtaacgctgcttcccgaacgaagctcgcgcagtgcggcggctatcgcaagctcgaccacgcggtcgcagttcagctccgaaatctcatccgcaagctcgggacgaatctccgggtaaagcctctttttcggcgcaagcttcagatcgacagcgtttgccgccgattcggcgatctccttggcaaattcctttttctctgacgaaaagctcttttccgcggattccgtaagaagcttttttgcgtcttctgaaataacggcggcaggtaatactgcgacctttcgtgcctttttcttcgaacgctttttcttttttgcgccggacttttcgaccttcggcttcgcggcggactgctccttcgccgctcccgtgtcaagtgcgttgagatcggcgattatgaaagtattgcgcgtatcgttcgtgttgtaatcgcgcacgagaagctcttccatcttcgatgaaagcttccaatggatatccttgagtgagtctccgccgacgtatgcgcggatgttcgcctgctcgcttctttccgaggatatggcgcgccgggtgaggtcggtcggcagctccgtggtcgagttttcgatcggtgaggagaggttcatcatgcgcgggtaaacgataacagtcctgcatacgctctgctcaaggctgacggagaaaagcccgagtgggtcctttatcctcatgtcgagcacgccaatctcgtattctccgcggtagtggaagcggacgctgtgctttacggttctgacaccaaacgggacgagcggtatcatcatgcgctgctcaacacatcgcactccgctttcggaaggcacgattatgtgggcttcgacgaaaggataagggatgaaggaatcgttgattatccgtatctcgtaggacacgtccgtgtccttttcgacccgtgtgttgtcggaatccacatagaccttgaccgcgctttttccgataagcgtgataatgaacgatattatcggaagtatcagaaggaatatgaagagcaccgcagacgcggacgagcgcaaggcctgagtgaatacaagggcaagcaccagaagaaatatgtagaatacgaaccttccggttatccaagttttcttttccatattattattacccttcggggatttactttttccggacagcgccggcggtcgccgacggtcggatatgtacggctgacgtattcggcatgcaggcgtttatctctgtcccttgaagggaacatccgtgctgcggagaatgccgcggaggatgtcgtcggtcttttcggagttcatgcgtgcttcctttgaaagggagatcctgtgcgcgatgacaggaagatatacggcagatacgtcctcgggaatgacgtagtcgcgtccgagaacgaaggcatatgcctgagttaccttcatgagcgcgagagacgcacggggacttgctccgaggctgatcttatcgctgcttcgcgtcgcacgcacgagagatactatgtattttgtgatctcgggatcgatcttcacggcggcgcagtcctttatcatctgcgcaacatcatctgcactgcatgccgcggagatcgtgttgagcgggttctgcgtccttcttcccgcgaggatcgcaagctcttcttcctcgttgggatatcccatcgacatcctgatcgaaaaacggtcgagctgtgcttcgggcaggggatacgttccgacatatcccgtggggttctgtgtcgcaatgacgaagaaaggatcggggagacggtacgttattccgtcaacggtcacgctgttctcctccatcgcttcgagaaggctcgactgtgttttaggtgaggcgcggttgatctcgtccgcgagaagaatgttggtcataacgagaccctctcggaattcgaaacgctcggcactgcggttgtacatattgaatccggttatgtcggatgccatgacgtcgggagtaaactgtgcgcgcttgaaatcaagtccggcagaacgtgcgagagcggatgcgagggtcgtttttcccactccggggacatcctctatgagaatgtgtccgcccgaaagcattgccgaaagaagaagctcgagttcatgacgctttcctacgacaaccttttcgacctccgagattacggcggaaattttagcgtgtgactgcctgccggtgttggatgtgatttcgctcatgggggactccttttatatatagtatattaaaatcatcaatcgaatgataatcatagtatattttaccattaaaaacgctcatgcacaattacaattttgtgaattatcgatgaatacttttgcccgcgcgcctgcctaaacagatacgccgtctgcggatgggcggcagttttgaaaaaaacgaaataatttcgaatttcctattgacaaaagcgaaaaatatgatataataatctcaagaatgataatcattcttaatattaaaaagggacacataagatgaccaggcaacgaagaataattcatgattatcttctctcgaccaaatcccacccgacggcggaggagatatacatgaatgtaaagaagaatatgccatcgatcgccgtggggaccgtgtaccgcaatctttcgcttatgacggatgcgggagaggtcagaaggatcacggtgcccgagcatccggacagatacgacggggatgtcagtcctcacgaccatctgctctgtatgaagtgtaaaaagctttttgatatcggctcggtcggagtggacctgaagaaatcggatatcccgacgggcacccttgtcctcggatatgaggttacggtaaaaacgatttgccctgcgtgcgcgggcgcggaatcgaaataaatttataaagacaggaaaggtgtttgaaaatgaaatttgtatgttctgtttgcggttacgttcatgagggagacagcgctcccgaagtatgtcctatatgcaaggctcccgccgataaattcattgcacagaaggatgacggagtatgggcagccgagcacgttgtcggtgttgcgaagggcgttcccgaggatattctgaaggatttgcgcgcgaatttcgaaggcgagtgcaccgaggtcggcatgtatctcgcaatgagccgcgttgctcaccgcgagggatatcccgaaatcggactttattgggaaaaggcggctctcgaagaggctgagcatgccgcaaagtttgcggagctcctcggcgaggtcgtgaccgacagcacgaagaagaatctcgaaatgcgcgttgacgccgagcgcggcgcgaccgagggcaagactcttcttgcgaagagagcgaaggaagaaggacttgacgcgatccacgataccgtacatgagatggcacgtgacgaagcccgccacggtaaggctttcgaggggctgctcaagagatatttcagctgaagcggttcgggcattgacgatgcggcggattatccggactttgcggtaaatgccgtccggtgagcgcactcgtcaaaacggcttgaaaatcggatataaacgaccgggtatcccaatgaggctgcccggttgtttttcccgaacgaaaccagaagagctgccgcgcaggaggcgcgaagccgcagtaaattcaaaaacatatttccgtaagccgcgaaggatgggaagcacatgacagccgaagaaagaaaagcgcggatgaaaccgtatttcgaaaaaacggctgataaaaaacgaccgttctgccgaatatgtacatgaaaaggacggcgatgaggacaggctgatcgcttctttgtcggcgtgaatttcaccgaatacatgatacgccgttcagctggcgctctccgacgattctgtatttcacctgcgctttgcgctctccgacgagcttacggaaatacatgtcacctgtatatccgagacgtaatgcgaagcggattgcggcacggctgaatccttgccgtgccgatatccgaaaaggacgtgacgatataaaaagccgaggtgttttgcctcggctttttatgttattttccgcggttgtcggaatgcgcgtgcttttacgatgctcttgacttgtcccatgcgatgtttaccgtgtagctgcttttgcctttgtacattccgtttttgtcgaaatcgctgtcggatgagtagaggaaagccgtcagctttatatcggacacctcggcgatctttgcacccgcggtcagcttgaacgatgtgacgagagtttcgttggtgatctcactgtcgagcagatgcgaatgccatgcgttgacgtcctggtttacgtcgtcgtaaatgtatatttcgaggtaatcccaaaatttatccgtgatgtccgacggacgaaggataacgttttcgtattttccttcgggtgtggagtactcgagaaaatacccgatcttcattcccgcggcatcgggatttttgcttatcgcatcctgccagatgtagagaaaatactgccccgagagaatattttcgtttgacggaaataccgccattacgcacaggtcgcgcccgagcgcgccgtcatcctgaaaatccttctgcaaagtgtaatcctcgcggactccgaaatcgcagtaggtcatatcgtatatgccgatcggcagcgctttttcgccgtcctcggcgggggcttcggtttccgcgggctgtgtgatctcgggagcggcagcagtttgtatgtcggttttcggctcagtgacggcggagctgtctttacctgcctcgggctcgcttatccgcctgaccgagcatgacgcaagcatcacacctgctgcggcaatgcataaaagacgtgtaaaatggcttttcataccgattccttttctgcgtggatttgattacatattataatagcaccgtttttcgcttcgcgcaataaaaatgttgaaaaaagtgcatatgtatgatagaatggaaacaagatatccgactgacgggaggaaacgtatgtacgtccttgcatgggagtttctcgctttttcctttatcggctggtgcgccgaggttctgtataccgcatttacggaaaaaagattcgtgaactgcggctttctctgcggaattgcctgcccgatttacggcattattgcgatctttatgatcgtcgcctcgtcattcggctcgcaggatatgttcaatctctttctcctttccgccgtggtgggcgcagcgtcggagcttgtctgcggatttgtgcttgaaaagctttccgggtacaggtggagagattattccgaaagtaaatacaatatcggcggatacacatcgctgttttccgcttttttctgcgggctttgcggggttgccgcggtcaaagtgctccgcccgctgatacatacggcgcttgcggcattgccggagaatgcgggacgcaccctgcttttcgtccttgtcggggtcatggcgctcgattttgtactttccgtggttaccgccgttcgcataagcaggagaacggagcgcttctgcgccgagatacgaatgtccgatcctaccgaaaagcacgattgcggaagcgttccggaacttaaaaagaaatacgacgaggcgatcgccgacggcagctttttctgccgacggatgatttccgcattccccgaaatgaccgagtcaaagtatatttcccgatttgattccttccgcagatacgccgaacacgaaaaggagatcaaagcggaaagggcggaacagcgccgccgcctctcacggtcgttttacgaggaaaaagcgctgtcggatgaggaaaagccgtttgcatacgggctcggacttacaaaaatgatgtggctgttctttatcggctcggtgctcggcagcgtgatagagacgatctgggtcgtgtccgtcacgggcggattcgaaaagcgcaccggcgtggtatacggatacttcatacccgtatacggtgtcggcgcggtggttatggcgttcgttctgtgccggatgtataaaaagagggatttctttatcttcgtcggaagcgccgtgataggggctgcgacggagtatttctgcagcgtttttcaggagttcgtcctcggaacgagatcgtgggattattcaggctcgtttctgaatatcggcggaaggacgaatcttctttatgcgttcatgtggggcgttctcggagttctgtgggtcagagaggcatacccgtttatttcatccaagatcgagaagatcccgaaaagggcgggacgggtgctcaccgttatccttgccgttgctttttccgcggatatgcttatttccgccgccgcggtataccgccagaacgagcgccgcgagggagttgaagcgcgcggagcggttggagcttatctcgattacagattcgacgacgaatctctcgccgacgtgtacccggagatgaaaaaagcgtcgaaggactgatctttactttgcagcctccgtcgaggcgagccattccgcagcggcggcggacaccgtgaccgcaagccccgttctgtatccgctgtccgcaagctttgcggcttctccgggatttgagagaaatccgcattcaacgagcactgcgggaatttccgtatgcttcataatatatatagcggaggtcgcccgctttatttcgcgttcgttttccggctgaatgtaaatttcggcgtattcctgaattttggcggcgagcggctcggattcggcattgttcggggaataatacacctgaagcccgctgtattgcggctgatggaatttgttcatgtggatgcttatcagcgcgccggcgttcgcttcctttgcaaagcggagcctgttcttcaggtcgtatgttttcttctttccgcggtaatcgttcagctcgccgtacatatcgtaaagcatacggtcatctgtgcgtgtcatttcggcatcgactccgcagatatcgagaagtgtttttatccgcgcggaaatatcgagattgatgtctttttcgagaagcccgttttcgccggacgcgccgccgtcctcaccgccgtgccctgcgtcaatcaccaccacgcgtgcgcactcgtctgtccctgcggatacggtgtatatatccgagactctttccggaagacatccgaagccgagcgcgatcagcgcgaacattgccgatacggcgataaattcgcatacggttctgcaatatctgttttttgcggaagtgttcatgttttcaaaaggctttcctttcatgttcattgacgctgccgtcttgtccaattatatttgaaaatcaccgcctttattacaaagcatatgccgtgcggaaaaatatccgtaaaagcgaggtctgaagatgaaatcaccgaaaaaaatatacgaatgtacaaaatgcggctaccaaagccccggattcctcggacgctgccccgaatgcggcagcttcggaactctcgaggagcagctcagtgcgccgcctccgtcggcttcgccgaagatacagcgcaggcagaacgtaccggagcgtgcgcgtgtattttcggatgacgattcggcggagatcgaacgtatcaaaagcggcatcgccgagcttgaccgcgtgctcggcggaggcatcgtcgaaggatcggtgatccttcttgcgggcgaaccgggaatcggaaaatcaacgctcctcatgcagctttgcgcccacctcggtgtatcggtcatgtatgtgtcgggcgaggaatcccgcggtcagcttaagatgcgcgccgaccgcctcggcgcggggggatcggacacgcttgtcctgtgcgagaccgatatggaatcggtgctctcggagtacgacagggtatccccgaagataatgatcgtggactcggtgcagacgatgtattcgtcctcggcgacgggggcacccggcagcgtcggtcaggtccgcgaatgcacatccgagctgatcgcgcgggcgaagcaggataactgcgccgtgatcatcgtcggtcatgtgaataaggaaggcggcatcgctggaccgaaggtgctcgagcatatggtcgatgccgtgctctatttcgaaggcgaccgcagtcacacctaccgcattgtgcgcgcggtgaagaaccgcttcggctcgacgaatgagatcggcgttttcgatatgacggaggacggactgcgcgaggtgccgaatccgtcggagcttttccttgcgtcgagaccgaacggcgtttccggctcctgcgcgacctgcgtgatcgagggaaatcgaccgatcatcgcggaggttcaggcgctcgtcgtgccgacggcgttcccgtcgccgcgcagaaccgccgacgggcttgactataaccggatgtgcctgcttctcgccgtactcgaaaagcggctcggactccgcttttccggaagcgacgtctacttgaacgtggtaggcgggttccgcctcgacgaacccgcgatcgacgcggctatcgcgattgcgctgatatcgagcatccgcgacattcccgtgccgcaggacgtgatcgcggtcggcgagatcggacttgccggagagatacgctcggtcagaaccgccaagctgcgcgccgccgaggccgcgcgtctcggttttgcgaagatcgcactcccgtcgtattcggcaaaggaagtcgggaatatcgaatgcacaccgctgcgcagcgtctttgatcttgtacgtctccttccgaaaaaggaaggctgaatctaatcaataattatgaaaggaagctttccctcgaaagcac

SEQ ID NO: 3120 - DNA, 8669 bp, Unknown
  16S sequences of unknown bacteria
ggcaaagggaaacttcttgggaaatcgctccgcgatttccttcaggcacgctccaagtattctcccgttctggtatcgatcttgatcttggtaccgatatcgatgaagagcggaaccttgatggtcgcgccggtctcgagggtcgcgggcttggtggtaccggtagcggtatcgcccttgaagcccggctcagtgtcggtcacttcgagaacgacgaacatcggcggctcgactgcgaagacgttgcccttgtaggacacgatcttgcacatctcattctccttgacaaacttgaaggagtcgccgagcttgtccttgtttatcggaagctgctcgaaggtctccatgtccatgaaataatagagatctccgtcgttgtagaggtactgcatttcctttctctcgacgatagcgttctcgaacttatcggtcgggttgaaggtgcgctcagtgacggctcctgtgatgacgttcttcagcttggttctgacgaaagccgcgcccttgcccggcttgacgtgctggaactcgatgacctgaagaacctgaccgtccatatcgaaagttataccgtttttgaaatctccggctactaccataaaaattattcctccaaaatttatgccttgattgaaccccgcgaaacgcagagatacagcatgagtattaatattttacaccattccggcgattttttcaaggggtttcaagaaaaaaatccgatgtttcacaaaaaattcacttttagcagtccgccgcgcaggttcccgagcaagggaaacactgatttaaggttgttttcgcggaaaaaagcccataaatccggggccttttttccgcaaaaactcgatttattcagtgtatcccaagaatttacattataatcttgcaaaatccgatcggatgtggtataataatatgctgaaccaaattttcgcttattttattgaaaggaaccccgatgagaaccctccgcccgctcgacgccgccgccgtcgccgccgtactcgtgatgtcgctcctgtccgccgtgccgctgctcgcgcgtccggaaaacgcgaccgtcgtcgtgaagaccgacgatgagttccgcctgccgctcgacgaggacacggtgcgcgagatatcctcgaacggtcacaatctgacgcttgagataagggacggcgaggcgcgggtgatctccgccgactgccccgatcacctctgtatgcgcggaaaggcggacagaaacggcggaacgctgatctgcgtgccctcaagggtcatgatatctgtagaggggggcgcggatgaaatcgacgcgagcgcgggctgaccacgcaaaggcttccgcggtgaaacgcggtttcacgaaacgcagtttcgacacaaagcgtctcacaaccgacgctgttcttctcgccgcggcgctgattattgcccgtctcgaggcgcttctgccggcgtttttagtgatgccggggttcaagccggggctcgcgaatatcgcgacgctgctgacggtcaggctctgcggcaggcgggacggcttcgcgctgacgcttctcagggtgacgataacctcggtgctgttcgggtcggtgacgtcgtttctgttctcgctctgcggcggggtgctgtcgttcgtcgtgacggcggcgctcgtgggacttaccgagaaagaggacgcaaagatgtcgcttgtcggcgtctcggtgctcgcctcggcggcgcacaatctcgggcagaccggcgcggcttgccttgttttcggcagtctctcgccgctcgggatgctctggtggctgttcctgctctcggcgccgaccgggctcgtgaccgggattccggctgagataataacacgacggctgaagcctgtaatcagaccgaaaggaaaagaatgagaacaaaaaccgcaataaccgcgataattatactgctcatatccgcgctcgtctcctgcgggagcgcgacgcgggacagcttcacgctcttctcgatggacacgttcctcgacataacgctctggaacccgaaaaacgccgaagagtcgaaaaccgcctgcgagaccgaggcaaaccggctcgaaaatctcctctccgcgacgatagccggaagcgacgtctcggcgataaataccgtcgggctctcactgacagctgtctcgcgcgagacagccgtctgcgtctcgaccgcgacaaagataaacgagctgacctccggcgcgtacgacgtgacggtcgccccgctcgtgaacctgtgggacatagcgcacccgtctgaaaactgggcgcctccggcggatgacgagatagcgtccgcgatggcactgtgcggcggaaagctcgcggtgtcctcgtcggacggcggatatactgtgacgaaatcggatgaaaacacaaaaatagacctcggcggcgtcggaaagggctatgcctgcggcgcgctctctgagcttttcgcgtcgcgtggggagaacggttttctctcctacggcgggaacgtcgcggtgttcggaaaaaagccggacggaagcgcgttctcggtcggcgtgaaggatccgttcgacccgtcctcgctcaccggaaagctctcgatacgctccggaatcgtcgcggtcagcggcgggtatgagcggtatgtcgactataacggcttggaaacgtgcagaaagattttgaccacgcggccaccacataatcgaccccgcgaccggatatccgagcgaatccgacctcgcgagcgccggaatatgggtcagcgtctcttccccggaagcgggagcggctgcggacgcgctctcaaccgcgtgcttcgttctcggcgcggagaaatctatggaactctacgattcggaagagttcaagaactacgcaaaatctctcggctgtgagttcggcttcctgttcataaaagcagacggaacgctcgtcatgaccgacaatatatcggaaatatataccacttttgaaaaatgaaaaaatggcttaaaataacgctcatcgcgctgatttccgccgcggtgatcgcgctctgcgtgtggctcatcccgctcgtctggtcgcttagggagccggagaatcaggcggcgttcgagaattttgtcggctcgctcggcttcctcggaatactcctgatgctcgggatacaggtcctgcaaatcgtggtcgcggtcatccccggagagccgatcgagctcatcatggggctgatgtacggcacttggggcgggctcgcgctgacgctcaccggcatactcatcggctcggcgatcatctatttctgcatgaagcggttcgggaccggcttcgcgtcgaagttcgtcgacacgaacggctttaagaagttcaggttcctgaacgacccggcgaagcgcgattcctttattttcctgctcttcttcatccccggcacgccgaaggatgttctgacctacttcgcgccgctgacaggaataccgttcggcagattcatcactatcgcgacgctcgcgcggataccctcggtcgtcacgtcgacgcttgtcggctcgtcggtgtcgaatggcgaatttctgaaatcgctgatagtcttcgcgataaccggagtcgtcggaatcgcgggaatcctgataaacaacaaattcaccgccgcgcaggagaagaagctcgccgaaaaagcggcggaaaaccagaacgcaaaggataacgacaaatgaaactcatcccaaaggaagacatatccgcccagtacgacgcgatgcgccgtcttcgcggtatctgctccggaaaaaaatattacatccgcactttcggatgtcagcagaacgaggctgacagcgagcgtctcgccggaatggcgtgcgagatgggtatgacgccgaccgacgagccgtcagaggcgtcgctcatcatcgtcaacacctgcgccgtccgcgagcacgcggagctccgcgccctctcgatcaccggcggtttcaagaagctcaaggagaaagacccgtcgctcgtcatctgcgtctgcggctgcatggtcactcaggagcaccgcgtcgacgcgatgaagaagagctacccttacgtcgacattcttatcggcgcggggatgtacttcgactttccttccctgctgctcgagcatatcgagaagaagaagcgcatattcgcgtctctcgacccggacggcgcgatagccgagggtctgccggtcaggcgcgagtcgaagaccaaggcatgggtcagcgtcatgtacggctgcaacaatttctgcacctactgcgtcgtcccctacgtccgcgggcgagagcgcagccgtgagccggacgcgatactcgaagaggtgaaaggtctcgtcgccgacggctgccgcgagataaccctgctcggtcagaacgtcaactcctacggaaaagacctcataaaggacggcaggggctgcgacttcgccgatcttgtcgaaaaaatatgcgaaatcgacggcgacttcatcctcagattcatgacgagccacccgaaggacgcgaaccggaagctcatcgacgtgatggcgaaatccgggaaatgcggacgcccgaagtgcgcgcgccagttccacctcccgctccagagcggctccgcgcgggtgctgaaggcgatgaaccgccactacacgccggaggaatacctcgagcttatcggctatatgcgcgagaagatgcccggaatcgcgatctcgtccgacataatggtcggcttccccggagagaccgaggaggagttcgaggagacgatctcgatgctcgaaaaggtacgcttcgacatgatttactcgttcatctactccccgcgcgagctgacgccggcggcgaagatggactgtcagatacccgacgccgagaagtcaaggcgaatgaaccgcctgctcgaggtgcagaataagatatcctacgagataaacctcgccgccgtcgggagccgccagcgcgtccttctcgagggcgtgagccagaaatcggaggatatgctgaccggcagggcggactcgaacaagctcgtccacatcccgagaacgccggagagcgagaagctgatcggcggcttcgtcgatgtgaggataaccggagccgagccgttcgcgctgttcggcgagccgatgaattaacgataatagcgataataaatcgtctataaataaatttataaggagaacaaaaaccatggaagttatggaacttgccgcagagctcggaaagctcatcaagaaggacccccgcgtcgtcgaaatgacccgcgcagaggaagcatatgaaaaggacacgaagcttcagggcgccatccaggagtacaacactcagtctgaggctctcagtgccgagtacaagaagccggttcaggacaacgagttcataaagatcatcgagaaccgcatccacgacctctacaacgagatcatgtcgaacccgaacatgcttgcctacacgaaggctcaggacgccgtcaacgagttcatgaacgaggtcaacggcgagatcacctatcagatcaccggcgagagaccctgcgctcacgactgctcctgctgtgagggcggctgccaccactgatttttccgaccgtggacagagcaatggtcgctctgtccaccggacgggtctgcctgtccggttgctttcacttgaaaatgaatccacagaacagttgaaaacgcatggagctgtggaaaatctggtcgcggttctgttcagatacccatgtcgcgcgacgcggttgtctgaatgtatccgcgaaattcttaacgcggaggttttactcatatgacaccaatgatggaacaatatctcgaggtcaagcggaaatacgaggggtattttctcttctaccgcatcggcgatttctatgagatgttcttcgacgacgcgaagagggcgtccgcgctgctcgacctgacactcaccgggcgggactgcggagaggcggagcgcgcgcccatgtgcggcgttccctaccacgccgccgaggcttatatcggaaagctcgtctcgatgggctacaagatagcgatctgcgagcagaccgaggacccggcgaaggcggtcgggctcgtgaggcgcgaggtcatccgcgtcgtcacgccgggaaccgtcgtcgagaacacgctgctgtccgaggggaaaaataactatctcgcgtcggtggcgtcggtcgacgatgtggtcggcgtcgcgttctgcgacatttcgaccggtgagttcagcgcgacgatgttcatgggtccgagcaggtttgacaggctggtctccgaggtcgcgacttatcagccgagcgagatcatagcgggtccgatgctctccgaactcggcgcgctcgagaattatgttaagcgcgtcgggataatgacgacctccggcgaaaccaaaagattctcgaaaaaggaatgcgaacagctcgtgcgcgcgaggttccgcgactacacgccggacgactcaaacatagcggcgacgaccgcggcgggcgccctgctctcctatatcgccgagacgcagaagctcgaattgtcgtatatttcgaagctcgatttctacgccgagagccaatatctcgtgatggacgcggcgacgagacgcaatctcgagctctgcgagacgatgcgcgcgaaggagaagcgcggttcgcttctcggcgtgctcgaccacacgaagacgccgatgggcgcgaggttcatgcgccgctcggtcgagctgccgctcgtgaattccttcgcgctgaaccgcaggcttgacgccgtcggcgagctgaaggacgacatgatgctccgcgaggagtgcttcgtcaggctctcgaacgtgagggacatcgagagacttctgacaaagctcgtctacgggaacgcgaacgcgcgcgacctgctggcgatcggaaactctatcgcggtgataccggagctgctcacgctgctctcggacgtgaagagcgacgagctgcgcgagatacgctctgacctcgacccgctcgacgacctgagaaccctcattgagagcgcgatagagccggagtgcccgctgctcgtcagagagggcggcatgatacgcgcggagtacaacgacgaggtgaagcggctccgccatatcgtcaacgactcgaacgacatcctcgactcgattctcgagcgcgagaaggcggaaaccggcatcaagacgatgaagcgcggctataaccgtgtgttcggctattacctcgaggtgacgcgctcgcagtcgtctctcgtgccggacaggtatatcagaaagcagacgctgaccggcgcggagaggtacataaccgaggagctgaaaaataccgaggcggagatactcggcgcgtcggagaagctgaataacctcgagtatgatattttcaagtcgatatgcacgacgctgaccgacaattcggcgagaatccagaagagcgcgtcggggatagcgcggctcgattttctcctgtcgctcgcggagacggcggcgaagcagaattatgtcagacctgaggtcgattacggggatgagacgtcgatacacggcggacggcatccggtcgtcgagcagtttgtcgagggcgggacgttcgtgccgaacgatacgcttctcgataccgggcataacaggctgatgctgattaccggtccgaatatggcgggaaagtcgacttatatgcgtcaggtggcgctgattaccgttatggcgcagacagggtcgtttgttccggcggatgaggcgcgggtgagtatctgcgataaggtgttcacgcgcgtgggcgcttcggatgatctcgcgagcgggcagtctacgtttatgcttgagatgatggagtgcgcgaatattctgaagagcgctactgagcggtcgctgataatttatgatgagatagggcgcgggacgtcgacttatgacgggatggctatagctaaggcgatagcggagtatacggcgaagagtatccgggcgaagacgttgttcgcgacgcattatcatgagctgtgcgggcttgagggagagcttgagggcgcggttaattataatataacggcgaagaaggtcggggacggggtgatatttctccggaagattgtgcggggcggcgcggatgacagttatggcattgaggtcgcggggctcgcgggtgttccttctgaggtcgtgaagcgtgcgaaggcgatactccgagagcttgtgaagggcggaaaaaagttcgcgaaatccgcgccggagccggttcagccgtcgctcgacgaggttctgaacgccgccgtggcggatgagcttcgccgcctcgatccgaattcattgaccccgatcgaagctctgaataaattgtgtgagctgaagaaaatcttggcaccgctttcctgatccattgtatgaagtttgagaaagagagggggggcggggggagaggaaggacttttcaaagtccttcttctccccccgcaaactaacgacttgggaattataaataaattagacttccagacggcgaatctgattgctgccggagaggttgttgagcgtcctgcgtcggcttgtaaggagcttgttgagaatgcgcttgattctggggctgataagataactgttgagataaagaatggcggggtgtcgttcatgcgggtgacggataatgggtgcgggatggcgcgggaggacgtgccggtggctgttatgcgtcatgctacgagtaagatacggacggcgg

SEQ ID NO: 3121 - DNA, 11784 bp, Unknown
  16S sequences of unknown bacteria
agagtacaggcgatacatctgtccacccggccggattatataaatgaagagattctggatcagctgacttttttcggtaccgatgtagtggaactgggcgtacagtccttcgatgaagaggttttgctgcagtctggccgggggcatggaagagaggcggtctatcgaagcgcggaaatgataaaggagcggggaatcgacttgggcatccagctgatggtggggcttccgggagattcttacgaaaaatccatcgcgtcggcaagggaagccgtagctctgaacccggctgtggcgcggatttaccctgccgttgtgctgaaagacacagcgctttacaagatgtatctcaaaggacagtaccagcctctgacggaagcggatgctgtgcgtaccgtcaaagatatgctccggattttttatagagcggacatcgatgtgatacgggtgggactcaagagcagcgataatctcgcctccagcggaacggtcggcggcggaacgtatcacccggcgtttcggcaggtggccgagtcggctctggcaagggaggatctggaagagatgctggcggagcagctgaaaagaatcccggagagtaatcagaccgatctgagaacgacgttctatgccgcgccggagagtttttccaatatgatcggaatgaagaagtccaataaattgtactttgctgaaaaatatccccgattaaatcagaaatttgccgtagattgtgctttgccgcggaataaataccgcgtttatgttgaattcaacggcaaattatagtaatatgtgtaggaattaaattttgagtacagatctcagaaataataatgaaggaatgaagaaaggcggaaagttatgaaaagcatgaagaagtttttagctgtggcgatgattctgctcatgacagtagcattggcagcatgcggcggcgataccaaggacagcggttcctcagatagttctgcagatgcaccgaaagcgtccggcgacgttttaatcgtaggtacggaacctacgttcccaccgtttgatactacggatgacaacggtgacatcgtaggttttgatatggatctcatcaaagcgatcggcaaggatcagggatttgaagtggaattcagaaatctcgaattcgacggtctcattccggctctcacatccggtacgatcgatatcgtagctgcgggcatggatgccagtccggaaagagcggagcaggtagacttcagcgactcttattatgaagccagtctcatcgttgcggtagcggcggataacgatacgatcacgggcgtggattctctcactccggatatgaaagtagcggcacagaccggtacgacaggtgcgagactcgttcaggagctcaaggaacagggcaaaatcggtgaagcggttatcttaaacggtctggatacggcgatgcttcagctgatcaacggcgatgttcaggcggttatcaacgatactccggtaactcaggcgtacatttcgaagcaggaaggcaagatcaagatcgtaggcgacaagatcgaagcggacgctccttatgcattcgcggtacagaagggcaattcggaacttctcgagaagatcaacgcgggtctgaagaaagttcaggaagacggaacttatgaagaactgctgacgaaatggttctctcaggctgtggaagagtaataactgtaaaagcgaaatattgccggcgagcaccggcagcgaggccgcggacagattgtccgcggctctttttcgtatgcggccggcctatagagatgaaaagacagacgcgtgcttataccgatcaagggtagtttttcaaagacagtttgtcttaaatccgcgtaggaggctatattgcagcagaatgttataaaaaggaaacggaggcgaagagatgcaggaaagcgagattcagtttcatatcaaatgcggcccggaagatgtgggcggctattgtattctgccgggagatcccggaagatgtgcggcgatcgcacggcatatggaaaatccggtctttgtgggctccaatcgggaatatatgatctatacgggaactctggagggcgagaaagtcagtgttgtttccaccggtatcggcggaccgtccgcggcgatcgctatggaagaactggccaatctgggcgttcacactttcatccgcgtagggacttgcggagggatcgatctggacgtgctctgcggagatctggtagtggcatcgggggctgtgagaatggacggaaccagcagggaatatgcgccgacggagtatccggcggttcccgattttcaggtactctctgcgctggtaaaagcggcacagtcttcccggcggcagtaccacgtcggcgtggttcagtgtaaggattctttttacggtcagcattctccggaacgaatgccggtatccgatgagttggaaagcaaatggaaagcatggaagaggttgggagttctggcgtctgagatggaatcggcggctctttttaccgtagccgcctgccgcagagtccgctgcggttccgcattctgtgtcatctggaatcaggaaagggaaaaagaattgggtgatgaccgccagtctttcgatatcgagcctgcgatcctgacggggatcgaagccatgcgcctgctgattcttgaggatcggaaacaaaattcataaatattcatagaaatgaatgatatttaaaaagagacgaagctgttttctattcgtctcttttttctgtatcagataaatcctttataaatatgaggttttggagagacgcgccggcgctataaatacagcgccggcccgcaaatagtatttgtattattcatgctatgcatgtataataaatgtgttatttttgaatcatccgagcagtacatggtacagagctttatcatcagtcatcacagggagaaatttttatggacggattttttgatactcttgcactttacggcaaaggcgtctctatcgcattcggcggcatcggaatgacgctgggcgtcacagcgggtgcgatcgtcatcggcatggtcatcggtctgatcatggcgctgggaaagatgtcgaagcataaaatcgcccgctggccggcatcgatttatgtggaaatcattcggggaacgcctctgttcgttcagatcctcatcctggcatacggagtgccgtatctcgtaaatacgctttccgacggggcgatgcgttttaactggaatcctattttcatggtgggtattttggcctgcggattcaacagcggcgcttatctggcggaaatcatccgaagcggcattcaggcggtggacaacggtcagacggaagcggcgaggtctctgggaatgaccaacggtcagaacatgcggtttatcgttctgccgcaggctctcaagattattcttcccgcaatggccaacgaatttgtcacgctgatcaaggagacatcgattctctcttatgtcggaatcgtcgaaatcacccgttccggcgtgttgtgggcgtccagagaatttcagactttcccggcatatatcggcgtcgctatcatctatctctgtatgacgattccgctttcaaggctggtggcttatcttgaaaaacgcatgggaacttctgctcccgcgaagaagagaaaggcaggtatgtagccgtgataaaagtaaaaaatcttacaaaatctttcggagagaatgtcgtgcttcgggatatctccgaggagatcaagccgaatgaagtcgtctgcgtcatcggtccgtcgggatccggaaaaagcacgtttctccggtgtctcaaccgccttgaggcgccgacagaaggggagatttatctggacgatgttctcatcgaagagagcaatataaatgaagtccgcaccaagatgggaatggtctttcagaatttcaatctcttccctcacaagagtgtgctggaaaatatcacgttagctcctgtcaaagtaaaaaaggaagatccgaaaacagctgcggaagaagcggtagagctcctgaaaaaagtcggactggcggataagaaggattcctatccggacgaactgtccggcgggcagaaacagcgcgtggctatcgccagagcactggcgatgaaaccggaggtcatgcttttcgacgagccgacttccgctctcgatccggagatggtcggcgaagttctggaagtaatgaaagagcttgccgagggcggcatgactatggttatcgtcactcatgagatggggtttgcgagagaagcggcggaccgggttttctttatggatcagggatatgtgatggaacaggggacaccggatcagattttcggaaatccccagaacgagaggacgaaaagttttctcagcaaagtgctttaaaataaaaatccggccttgtaagaggccggtattttttaataattttctgctttctgttcaaaataagcctgtgggacgccgcatacgggacatctttccggcgcatccgttccttcgaaagagaatccgcagtgcttgcagatccagcggatcgtctcaggtttggaaaagacctgatgattttccacattctgaatcagtttattgtaacgttcctcatgttctttttcgatgcgggcgatctgttcgaattttaaggcgagatccgcgaacccctccctgcgggccgtctctgcaaatcccgcgtacatatcgttccattcatagcgctctccggctgcggctgcgtagagattatctctcgtattgctgataccgttgagctgtttgaaccagatttccgcatgttcccgttcattatctgcagtttcctgaaagatatcggcgatctgctgatatccttcgttacgggctgcctgcgcgtaaaaagaatatttcatagccgcttcggattctccggagaaggcgtttcgaagatttttgtctgtttccgttccggttaaattgatcatttaaaacctcctgtaaatttttgtaaattatttttttatgtccgacgttgcgtctcatgatgatagtatgtccgctgcaccgttgaattattacggttttgcttgtaaataaaaaatcgatatggtacaatgtcacgtaaatgctctatcggaggcgaggaaaagatctatttaggagtgttttatggaaatcgaacttaaatatctgatcgaggatgaggaaacgcagaaaaaactttgggatccgtcggtgttcggaaaatacggcgaggtggatcttcacgcggagacgaacatgagagctgtctattacgacaccgaggacggcctgctgagaagcgtcgacgcagctttccgcatcagaaaagaaaacgaccgatatgtagcaacgctcaaatggggaggtacaagtgacgaagcgcttcacgagcgtgaggaactcaacctgccgctctgcgaaaaatcggatgctgaagagccttctctgaaagtttttgcggaaagtgaaaaaggaagagagttaatagaactggccggagaacggaaactcattccgacggtggagaccagttttacccgcaggaccatgcggatcgatacgggaaagaccatctgtgaagcggctctggatacgggaaaaattattacctcaggcggcaacgcggatatcagagaactggagctggagctcttttccggagatgtggaggatatcgaagcgatcgggcgggatttggcagataaattttctcttcgtccgggaatcgtatcgaaatacgcaagggggatcgaactgtatcagaaaaactcgtaagggcgcataaaaccgcggataatggcgatcgacacccttggggagactttacaacaggtcaaaatcagggtataattttaaatactatgaaaaaattgcgggaggataaataaggatatgaaagcaactttcatcaacagagaaatcaatacggtcagcatgacgatggaaattacggcagaagaatttacaaaggcgatcaataagtcttatcaggcgaaaaagcatctcttctctgtaaacggtttcagaaaaggcaaagctcctagaaagcttatcgaatccatatacggcaaggacgttttctatgaggacgcgctcacagaagcgtttaacgataattatccggcggctctcgaagagatcggttatgagccggtagatcaccctgagatcgatctgggggatcaggtccttgaggacggtaaaggcatcgttttcaatatcaagtttatcacagaacctgaagtgaagatcgacaattataaaggcgtgcgcgtagaggtcccgaagcctgaagtgacagaggacgatatcgccacgcagctcagaagctatgcacacagaaacgcgagactgatcaccgtggagcgggaggctctcgaaggagacaccgtagtaatcgactataccggttacgacaaagacggcgtcgcttttgaaggcggcgcggcggagggtcacaagctgaagctgggttctcacgagttcattccgggatttgaagaacagttagtcggcgtgaaggcaggcgacgaaaaggagctggaagttactttcccgatcgattatccgggcgataagctggcaggacagatcgtaacattcaaatgcaaagttcacgaggttatggaagaggaacttccggagatcgacgatgatctcgcgaaagaatgcagcgaattcgacaccctcgaagaatggaaagaagacatccgcaggagagtggaggacaataaaaagcagcagaacgaaaacagggctcagaatgaaatcctgaagactttatatgaagagacggtgatcgacattcctgaagtgatggtggaacatcagatcgacgaacttctcagaaacttcgaccagcagctgagctacaacggcatgaatctgaagagttacctggaagcgactcatacagagatggaggagttcagagaacaggtgagaatggaagcggagaagaaggtcaagactcgtctcatcatcgaagccattgcgaagcaggaagggttcgaagccacagaggaagaagttcaggaagaatttaaaaagatgtctgtacagtacggtgtaacgccggagaagatggctgaaatcgtaggagaggacgtcaaatatatcaggaaagagatctgcgcgaaaaaggcagtggatatgctcactgaaaatgcggtgatcgaagaggtcgatccggaagaaatcgacgatacgccgaaattccctgcagaatagtcgggaaaaattccgcttcgggcagcattcgctttcaaaaagccggtatcggcggcagttagagaaagaaaataattttttatcgttattttcacggctgtgccggtcagacggcggcaaaaagtattattcagaaagtcaggaaataggatctgtctcgtatagatcctatttcatcttgtcatgaggaggatttttaatggcattgatacctatggtcgtagagcagaccgccaaaggcgaacgctcctacgatatttattccagacttctcaaggaccgcatcatattccttggagaagaggtaaacgatcatacggcgagtctggtcatcgcccagcttctgtttttggaatccgaggatcccgatgcggatatcagtttctatatcaacagcccgggcggttcggtgacagccggtatggcgatttacgatacgatgcagtatatcaagccggacgtatccaccatctgtgtgggaatggctgccagcatgggggcctttcttctctcctccggagcgaaagggaagagatttgctcttccgaacgctgagattatgatccatcagcctctgggcggtatgcagggacaggcggaggatatgaaaatccatgcggagaggatcatcaaggtcagagacagactcaacaggattctggcggtgaataccggtcagcgtctgtctgtgatcgaaaaggacacggaccgcgataatttcctcgatgcggacgaagctgcggcttatggtctgatcgacaaggtagtgacatacagataagaagattttgattgacttgccatttgacaagaggaggcaaaatgacgaaatttgacgattccaggcagcttacgtgctctttctgcggaaagccgcaggatcaggtacgccgtctcgttgcgggaccgggcgtctatatctgtgatgagtgtatcgctttgtgcgaggatatcatccgggaagagtttgcggcagacgagcgcgctgaggaatatgaactggccgaactgcccaagccgaaagaaattgccgagactctggcgcagtatgtcatcggtcaggattctgcaaaaaaaaatctggctgtagcggtatacaatcactataagagaatcaacaacgcggatatgacggatgacgacgtggaaatccaaaagagcaatatcatcatgatcggaccgacaggttccggaaagactctgctggcacagacactggcgaaaattctggatgttccctttgctattgcggacgctacggcgctcacggaagccggctacgtaggcgaggatgtggaaaatattcttttaaaattaattcaggcggcggattttgatatagaacgggctcagaagggtataatatatatcgatgaaatcgacaagatcgcgagaaagtctgaaaatgtctctattacaagggatgtgagcggtgaaggtgttcagcaggcgctcctgaaaattctggagggcacggtggcgaatgttccgccgcagggcggcaggaaacatccgcatcaggaattccttcagatcgatacgacaaatattctgttcatctgcggcggcgcttttgacggcatggatcaggtgatcagcaggcgtatcggcaaaaagacgatcgggtttaattcagagatcaaatcagtcaaggagaccagcggagaactgctgaagaagattcagcccgaggatctgctgaagttcggacttattcctgaattcgtgggaagacttcctgtgatggtaacgcttgatgagcttgatactgaaacacttgtgagaatcatcatcgaaccgaagaatgctcttttgaagcagtacaagaagcttttctcaatggacaatgtagagctggaaattgaggacgacgcgatggtcaagatcgcggaaaaagcaatagagagaaaaaccggagcaagaggactcagaagtattatggaaggtctcatgaccgacgtgatgtttgagatcccgtcccgtcaggatgtcagaaagtgcgtcatcacaaaagacaccgtggacggtgcagcacagccggcgcttgtactgaacggggacgaaacggaaacagattcgaaaggggcatagctttatgcccctttatttgcaggcaaaataaggaggtggacaaatatgtcagaccatgatccaaaagatatgctgaaaacggcttccgaagctgagaatatcggcgagatggacgaagaaaacggagatgagattttcgataagatgatcgaggatctcgtacacgtggagagcagaccgtctgatgagatgccggtgattcctctgagaggcatctctatttttccgacgatggttatacattttgacgtaggcagagagaagtccgtcagcgcgctggaatacgccatgctgtcggatcagacggtctttctggtcacgcagaaaaattccgagaccgacctgccgacgccggacgatttctatcagttcggtacggtggcacgcattaaacagatgctccgcctgccggggaatgccatccgcgtattggtagagggaatttcaaggggagaaatcctcaagatgctgcaggatgtgccttatttcagagcgaagatcaaatatgtgccggaacctgaaaatcagcaggacgatcctgaggcggaagcgctcagaagagctgtcttcagccagtttgtggattacgtggaagtgtcgcagaaactgacggcggagatccttcccggaattgaagccatcgcgtctcccggacgtctggcggatatcatcacttccaacctggaactcaagacagatgagaagcagcagatcctggaagcggtagacgtagcgaagcgtctcgagatggtcagcgaatttctgaggagagaaaatgaagttctcaagatcgaacaggagatctctcagaaggtcaaaaaccgcatcaacgaaaatcagagagaatattatctgagagagcagatgcgtacaattcagggcgaactgggccaggaggattccatcgaggaagaagtggagggctggctggcacagctggaaaaactgaacctcgaagaaaagacacacgataaaatcgaaaaggaaatcaagcgcatgctgcggctgcagccggcttccgccgacgcttccgtgctgcgcagctatatcgagtgcgtcctggagcttccgtggaatacagcgacgaaggatgtcatcgatctgaaaaagacgaaaaagattctggacgaagatcactacgggctggaaaaggtaaaagaccgaattctggagtatctggcggtcatgagcctgtcaaaggattttaaaggacctatcatctgtctggcggggcctccgggcgtgggcaagacttcgatcgcccgttcgatcgcccgttccatcggaagagaattcgtcagaatgtctctgggcggcgtccacgacgaagctgaaatcagaggacacagaaggacgtacgtaggagcgattccgggcagaatcatcacttccatccgggatatcggcgtaaacaatccggtctttcttctggacgaaatcgacaaggtggcgtccgattacagaggcgatcctgcggcggctctgctggaggttctcgatccggaacagaataaggatttcaaggatcactatctggatctgccgttcgatctgtccagagttttatttatcactacggcgaattccaccgacacgattcctcgtccgctgctggaccgtatggaagtcatttctctgacaggctataccgaggaggaaaaggtgaaaatcgcacagcggcatctgattccgaagcagattaaggagaacggattaaagcagaaaacgcggtgcgcagcgtgatcaattactacacgagagaatccggggttcgtaatctcgaaagagagatcgggggcatctgcagaaaagcggcgcgcaaagtggtggagaataaaggcaagaaaaatgcgtctttccgaatcactgcgggaaatctcgaatcatatctggggaagaagaagaccagttacgatattatagaaggcggcagcgaagtgggtgtgaccacaggtatggcatggactgcggtagggggcgatacgctttttatcgagaccacagtcatgaagggtaccggcaaactggttctgacaggccagctgggcgacgtcatgcaggagtctgcgaaagcagggctgagcgtgatccgtgcgcgcagcgaaaaactgggaattgatgaagaattctataaaaataaggatattcacgtccacatcccggagggagcgacgccgaaagacggcccttccgcaggcgtgacaatgtgtacttctatgatttccgcgcttacgagtacgccggtgagaaaagatctggctatgacaggagagatcacgctgcggggaaaggttcttccggtaggcggtatcaaagaaaaagtcatcgccgcccacagagccggcgtcaaaaaagtccttctgccgaaggataatatgaaagatatcgacgaactgcctcagaacgtgagaaaagagctggaattccgttcgatcgaaacgatcgatgaggtcttagaggaggccctcgtgaagga

SEQ ID NO: 3122 - DNA, 2189 bp, Unknown
  16S sequences of unknown bacteria
ctttcaatatattatatatattattatacattattttcgaaaaccgttgcaacgaataatatccgaactttttttgtataccgtcaaaaacggaaaaacggttaaattcttgtgtatcataagaaaactctattgacacacacaaaaatcaactgtataattattgtaatattatgtaaaaagaggcatatttatgttcggaccaccgatgggacctccgcccattcattcaaagacggaagcgccgaaaatgccaaaaggcttcaaaaacaaagtttcgtttatcggcagatcattcaaagaaacgttccgcagactgttctacattttcacgctcgtttataaatcccagcccatcataataattcttatggcgtttatggcgctgttcaacggtgttcagtccataatcggcgcatacatcacaaaatggcttatggacgggcttcaaaaagccgtcgaaggaacgctcggggacttctggcaactcggtggactgcttttgttgcagatagtgttccaactttttgtactcgttatcagttctgtcaacagaatgataacacgcctttcaaacgaactgttcgtttacagcattaaaatcaaaataatgaaaaaggcgaaaacgatcgacctcgcaaagttcgatcttcccgaattctattcgcagctcgaaaacgcgacgcaggaagcaggcagcagaccgttgcaggtcatcgaggcggctttcagcataatcagcacactgataacgcttatcagtttcataacggttcttgccggaacgatgttctgggcaccgatcgctgttatacttatgactgttccgtccgcgataatcacatataaatacagaaaaaagatgttcggttatatgcgttttcactcaaaggaacgcagacaacttgaatactattcacagttgcttacggacaaagaccttgtaaaagaagtcaaactttttgatctcggcgacacgtttatagacaaatattcgggaacattcaaaacatatttcaaaggtatgaaacgtctcatcgttcaagagggcggctggggcataggaatagcgacggcgcaatctgtgctgaacggcggaatttttcttcgaatagcatatcttgtatattcgggtctgctgaccataggtgactattcactctacacaaatgcgcttttctccatttcaaacagcgtatcttcgctgataacgacgacaggcagtatttacgagggaacgctttacatcgacaacctcataacatttatgaatgttgaacccacggtcgtttccattctgccaacgccgagaaaagtcaatcatcatgtgccgcacacaatagagttcaaaaacgtatcattctcctaccccgcgacaaacagaaaagttcttcaaaacatcaatatgacgttttcgacgggagaaacgatagttctcgtcggattgaacggtgcgggaaaaacaacgcttctcaaactgctgacacgtctttacgacccgaccgagggcgttataatgcttgacggatacgatatcagagaatatgatgtaaaagacctgtattcgatgtacggaatgatattccaggatttcggcaaatacgcattttccgtaaaagaaaacattgggttcggagaccttaacagaaaagatgatacaacgctcatacacgacgcggcggaaaagagcaacgccgatgaattcatcagaaaactgcccgatggatacgatactccgcttatgagagtctttgagcagacgggacttgaactttccgtaggtcaatggcaaaagatcgccgtcgcgagagcatttttgagagattcggactttgttattctcgacgagccgacagcgtcactcgacccgatggcggaacaggagatattctcacagtttgacaggcttagatacggaaaaggaacgattttcgtatcgcacagactttcaagcgcaacgattgcgtccaaaataatcgttctcgaaggcggaaagattgtcgaaacgggaaatcacgaaacgctgatgaaactcggcggcaaatatgcggaactgttcacgacacaggcaaagcattatatagaaaacacgccgcaggagcagaacgaaagaccgcctatgccgtttccgaaagaaataccagacaaaatctgattaaaattttattgcataaaactgccgcccgacg

SEQ ID NO: 3123 - DNA, 4899 bp, Unknown
  16S sequences of unknown bacteria
tacacctctctattcgtcggcagcgtcagatgtgtataagagacaggtcttttgcccgtgggaaagaggaaaaggccgcaagcgcgtcgatggtctttgtgggcaacatcaatcagagcgtggatgtgcttctgaaaacatccagcctctttgatccttttcctcctgagatgggtactgatacggcctttctcgaccggattcactgctatctgcccggttgggaaatcccgaaattccgtccggagcattttacggatgactatggctttattacagattatttggcagagttcatccgggagctgcgtaaggagcagtacggcgatgcgctggacaagtatttccgcttaggcaccaacctcaaccagcgcgataccattgccgttcggaagatggttggcgggcttttgaagctcgtatatcctgacggcgagttctcaaaagaacaactggaagaaattttgaagcttgcccttgagatgcgccgccgcgtcaaggaacagctgaaaaagctgggcggcatggagttctacgatgtgaatttctcctacatcgacaaagacagttttgaggaatactatgtatccgttcctgagcaaggcggcggtaagctgattcccgaaggaatgtgcaatcccggccaggtctatacagtatcacagggaaaatccggtatgattggcgtattccggctggaatctcagatgcttcccggcaacggcaagtttgaacgcacaggtattggctcggaacgcgaggcaagagaggctacaaatactgctttcaacttcctcaaagcaaatgccggacacatcagcgggacaatcagcactacgacaaaggactatatcgtcaattatcaggacttgcagggcatcggcatgaccagtaagcttgcccttccgacgctgatcgcactggcttccattgccctgaacaagcccactgtcagcagcttggctgtactgggagaaataagcatcgccggtacgatgatcaaagtagatgaactggcaaacgccctgcaagtgtgtcttgacagcggggcaaagaaagtattactgcccattacatcagccgcagaccttggcactgtcccctcagagttgatcggatgcttcaatctcatcttctatcagagcgcagaggacgcagtattcaaagcgctaggcgtcgagtaactgaacggtagttgaactttcttccgttatttgagcaagccatatagctgtgatgagacagtaaaaagcgcacgaaatgaggatgagcatgagctattatttcggatttaacacacccgaagaacaaaagaaaaaaagaaagtctgacctaacagcaatcggcgaaaaagtcacttcattcttttgggatattgcaccggccaacggttttgagatgagagaaggccaacaggatatgtcttttgagattgtggatgcccttattcatgatcagcattttgcggtagaagccggagtcggaatcggaaaatcatttgggtacttggtaccggtcttgctgtataacaagagaatgaaaaagcccgttattgtggctacatcaactatcgcgctacaagaacagctttgggatgatattcacattgtgatgaagcttctcaatctacaaccggaagttatccttgcgaaaggacaaactcattatctctgtcataagcgggctgatgagcacataaatacagcggatgcagtaattcctgatgaactgcaaatcggtcttgaaagtggatttcaggaaagaaagcagttttcacaaactttaccgcagaatatctgggataaagtcaatgtacaacggttcagtatgcgaaattgtggtggctgtgaaaagaaatgcctttatcatgccattcgctcgaaaataaaatataccgatggaattatcctgtgcaaccaggacttcctgactgcacatcttcaacaagtacgaggctggcaggatggccttattaaccgtgaggccgatcttattgttgtggatgaagcacacaacttagatgataaagtgcgaagcgccaccacaaaacgcatcaatcaaggaatgctattaggacttattaaaagcgcaaccaatgaagtcaaggcggctgataggcagaacatctatggagatgtcgaggacgcgaagaagtcaattagcgtgttttttgaccgccttaaagcacagatgcaggaacagatcgacctttcgcggcaagatatgagatacgcggatcggtttttctttgatggtggtgaagactccatagcccttcttaaagcgatgatagaaagcattaaaagtgttgctctcagcattcagatttacaccagctttgattacggcagtcgaacaactgctgcatcggacgaattggacagcctaagcgaaagccttgcagaaatgatcgaacaaattgatagcaaccttctctggattgagcgaaaagggaaaaatgcagagcttgtttattgcccaaagaataccagccaaattaccaatcgactgtatttcagcgggaaagaaagagtaatcttgacctccgcaaccatgaccaatgcaagtaatggagaattcgtagatcaatactcctattttatcggtaatacaggatttccgacggatgaacgcggttgcttatccgaaccgaagccttctccctatccatacgatgagcattccatgatttattattgtgacgatctgccccatcccactcaggaacatgaagcttttatcgaacaaggcgtacaacgcttgcttgaagttctcgaaatttcaggtgggaaggctcttgtattgtttactgcgaaaacagatatggaggaagtttataccatcctcagtaaactaaacttgccttacaaggtcctaatgcagcaacccggttcatcacaagataaaattcttaatgaatttagagaagataccaactctgttctgctcgggacaggcgcttactgggaaggcataagcattgaaggcaaaagtctctctaatgtcgtgattttccgccttccatttcctgtacctgatccgattatagaatacaaagcatccattgctaaggacgctttgatggatgtccgtgttcctgaaatgataattaaactcaaacaagggataggcagactgatccgtaattttagcgatacaggaatcgtatgtatcattgacccacgacttcgagatgaccctcctgccaaatatcacgacattgtatgggaatccctccccataaagaataaaacaaacagcctcgataaactaaaaaggttctttgacagcctttccagtttgaatgaccattgagtcttctttacatcctatatctcataaacattttccaagaaaaaagagcctcagccgacaaccagaaggttattgactgaggctcttcacttttgattaaaaatcaacttttatccttacatttcaggttatgaaggcacggacaggaaaacatacggggcacctttcaagcgccgcttacagggcagaaaagccacgattttcaacccttatcacgacatattttccgccctatctgtccagttgtaagtgacagctttttcattcttttggtttgttttcttctccccataagcataactgatccagcactttcatcaatgattttccccgctcactcaagctgtattctacctttggagggatttggggatattctgttcttatgatcaaattgtcggcttccagttctttaaggtttgtactgagggttttgtctgatatgttttttagataccttttcagctcattaaaccgtaccaccctatactccatcaggcaatataaaattaccatcttatgcttgccggaaatgagggagagtgcgtaatgaaaaccggtatcttcaaaattggcgttctcaatgtagttctgtatcatagcatcacttacctcatagaaagtacctgtcttaattgccagtacttgaatttgtttctcttctggatataattataaataaggcatacggtcatgtcaataatgcaaatcagaaggagagatagttatgagaaccaagttgaatatcaccgaaggtattttcccgatgccggtgctgatggttgcgacctataatgaggatggcagcgtcaatgttatgaacgctgcatggggaactatgcaggaaagagatactgtcgctctcaaccttaccgagagtcataagactgtaaaaagcattaaggctcggggtgcttttaccgtcagcatcgcggatgctgctcatgtgacggaggcggattactttggtgtggaatccggcaatcgagtatcggataaacttgctgcaagtggcctgactgccagcaaggccgaaaaagtggatgcacctgtgatcaacgagttcccgctttgtctggaatgtgagttcatcgagtatcaagacggaaaatacggttgtggcgttatcggtagagttgtgaatgttactgccgatgaaagcgtaatggtggacggaaagcttgatatgtccttggtgaatgctattgcatttgatccatacactcacgggtattacaaagtgacggagcgcgtcggcgaagcatttaaggacggtttgaaactcaaaaatgagcgtcctgttcaaggagacgaaccggcaaagtaaaatgaaaaaagagcctcagccgacacccgcaagggcatcgaccgaggctcttcgcttttgatagaaaatcgacctttattctgacattttgggcattacggacttcgacgggaaaacatacggggctacgcttcatctctgctcagagggcaggaaaccagcgattttcaacctttatcccgacagattttggctttgtcctgagcgcttggaaaagtaatgcggacaggcgatgataacggcgcggaagctctgct

SEQ ID NO: 3124 - DNA, 18216 bp, Unknown
  16S sequences of unknown bacteria
tgccaaacaaacgaaaaaatgctattatatatatcacacaatcaatttatcgaatcggataagcatatttttaaggagaatatagtatgacttacgtagaaaaggttttgacacaactcaaagaaagcaatccaggcgaaacggaatttcatcaggcggcgacggaaatcctgcttactctcgaacccgtatttgcccgtcatcccgaatacgaaaaagcaggactcctcgaacgttttgtcgaaccggagcgcgccgtcattttccgcgttccttggatcgacgacaagggacgggtacatatcaataagggctaccgcgtacaattcaacagcgccatcggtccttataagggcgggcttcgcttccatccctccgtcaatctgtccgtcgtcaaatttttggggcttgaacaaatccttaaaaacagtcttacggggcttcccatcggcggagccaaaggcggctccgacttcgatcccaaaggcaaatccgaccgcgaagtgatggctttttgccaaagcttcatgaccgaactctatcggcatatcggcgcggataccgacgttcccgcaggcgatatcggggtgggcgcgcgcgaaataggctatctttacggtcaatataagcgcatccgcgacgagcatacgggcgttttgacgggacgcggactctcttacggcggctccctcatccgaaaagaggcgacgggctatggacttgtctatatcaccgaagaagccatgcgtcttcgcggcgacagcctcgacggaaaaacggtagtcatttccggcagcggcaacgtggcgatttatgcctgcgaaaaggcgcaggtactgggcgccaaagttgtggcgatgtacgattccgacggctacatttacgacgcaaacggcatcgatctggaagtcgtgcggcggatcaaggaagaagagcgcggacgcatcaaagaatatgccgcccgcgtatcgggcgccgtgtatactcccggctgtaaaggcatctggactattccctgcgacgtggcattgccctgcgcgacgcaaaacgaaatcgacgccgaaagcgcggcaatcctcgtgaagaacggcgtcaaatacgtcgcggagggcgcgaatatgccctctaccctggaagccgtcgacatcttcaaacgcgcgggcgtcgtgtttcttcccgcgaaggcggcaaatgctggcggcgtcgccacctccgctttggaaatggcgcagtcttcggggagaatgttttggagcggtgaaaaagtagaccacaaactcagagatattatggtaaatatctaccgcaatatcgacgatgccgcgaagaaatacggctttgacggcgattacgtgatgggcgccaatatcgcgggctttgaaaaagtggcggatgccatgatggcgcaaggcatcgtataatttcgcctttccccgtcccttttccgcgttttcccggcagaagaatcaggcataaattattttataatagcgaccaaaaagagtcggatacgttcggttatcgccgaatttacccgactcttttttattccgatttcgcaaaaaagttcagcgattgcgtttggcaatttcactcaacgcaaccttgggtgccctgtccgctttcaaaagaccgtttacctcctgttccacgtccgtgatctgcgtatagcaatagccgttgatgtgcatccgctctatggcgcctatcaacccgccgaatcgagagagaaactcctcgtcgctttttacgccgcagccgtatccccatcccgcatcctcgtcccgcacgtatgcggtgcctccgaattcgctcatgacgatcggctgcccttcataggcgtaaccgtttgcatagggcagatattgggagttacagacgtcccctcttgtcagttttgtgacatcgtcgtaaaaagaatacaatttctccccgtcctgttcgtaatggtgcagggtgagaatatcgctttttgcgtgcatccagccgtcattggaaatgacggggcgcatgggatcgatgctcttggtgagataataaagccctgtggcaagattgctctgcgcttcgtcagtgaaaatgttgcgcacaccccagctctcgttgaatatcacccaagtgacgagagagggatgattgtagttctgccggacgatattcagccattcttccgcaatctcgcaggaagcggaatccagactccaatgattggagggaagttcgcaccagacgacgaatcccaggatgtccgcataatagaagaaacgttcgtcctccactttctgatgctttctgacgccgttaaaacccatctctttggcaagacaaatatcctttatcatcgcctcttcatcgggcggagtgatgcccgaatcgggccagtatccctgatcgagaagcagacgggcataaaaagggatattgtttaagagcagttttccatcccttgccacgaactcccgaagtccgaaatagctgcccgttttatccgtttccctgcccgctttatacacggtgatctccacgtcgtaaagcgcgggactcccgacgctccattgttccacctgataagtgagattggcgctgtccagctttacggaaacgctgttttcgatatccgccgccgaaacgcagacggtgcggataggtctgccgtcgaaagagatcgcaaaccgtatttccacatcctctgcgggcgcactgacgctcgcatcgaatcgaaccgtgtaatcttttaaggaaggcgtaatctttacccctgtaagatagacgtcctctacgtattccatccatacgctcttataaatccccgtcgtctgcacgtaccaacagccgaaattttcttttttccagcgctgcttgccgcgcacttgggcgggatgattctcgtcgtcgcagcgaacggcgaggatatttttttcctcggtgagataatcggtgacgtcgaaggaaaagcgggaataagcgccgcggtgtctgcccaccagccggcgattgatatatacttccgtattgtaatccgcgccgtcgaaatgcagtatcgcgcgcttccccgtttttccctctatcgtgcgggaataccagaccgtggaatgcggcgtttcttcgccgataccgctcgccttgcattcgtaagcgaaaggcacgcggatgacgcgcggcagcttttcttcaaaagcgtcctcggcggacgcttcttcgccgaacgcgaatttccattctccgcaaagatccttccaatccgaccgcaccaactgaggacgcggatatcccgcaatataacatttcgtatgcttcataatttctctccgttccttttacattctattttttgtccgctatcggcatctataacgcccgataggaaaattttgtgatttctatttttcccgccgaggcaaaaacgcccagctgcccgctcatgaacgcgcagtcgtccgaggtttccagacgatatttatcgtctaacacgatcgtgaaacgattgctttcgactcggatgaaaagggtgtgttccccgccgtccgaaagctctccgtccaatctgaacgcatccatggtatcctcgccgtagtcgtaacggctgagagcgacaatgtgctgtccgagttgcagataatagccgcgccaggactgcgtgggctgagaggaaaaataggaatagtcttccgcgcggagcataatgcccagattggaattattttcaagctgacagcggaaagagatctccgcttcaaaatccgcgacgcccggattgccccagagcgccacgctgtgcgtttccgtacccgtgacggcgagaatgccgctttcgaaagtcacgtcgccgcgtacttttttaaaccccgaaagctccgcttcttcgggcgtttccgctccctgatacgtttcaaaggcaacgaaatcggcattgcccgaaagcacctccacccgcatcgcctgtacgccctttttcagcgccgttctgcccaaagaaaccctgacggtttccccctcggcagcagtcgtttcgggaatggtacagaggagctcggcagtcccgacggtgattttcagcttcgcgccgccgctgttcctgccgacgcgggcggctatggaatacacgccgtcttcgggcacgtctacgccgtacttcacccaatcgttttgaccgagcgccaccgcataggcatcgtcctctttcatcttttttacgctctgcttttcgccgacgcggacgcctcccttttccacctttgcgcccgcgatggaaaagcctcggttttcccctttcagataagcggtcgcggggaatttcgcagggaaattcttgaccgcctcaaaatcggaagtgccgaatacgtcgttcgtgaaggcggtgtattccacgccctcttcgagcgcatagcccatcccgcccgcggcggattccgccgcataggaaagaacccgcatcccgttgagatatacgtatccgaccccgtcgccgttttccacgcgcacggtgtttaaaccggaagcgggatattgcgctttcttttccgcgactttcttttcgcccgcggcggcgagcttataaagcccgatccccgatgaagtcaaacggacggcatacccgtcgtcaccgttcagaccgaaatacagagtctgaccgggtaccggcttaaaattatattcggcggtgaaatagccttccgtgcgccccaagatacgtctgccgttctcgacttgcagacaagcgccgtccttcgcctgcgcgctcggcagagaaggcgccaaaacggagcggtgcgtaacgccgttcgccgtcaaaattccgccgctcgtcaaatacctgtctacgttgtagcgccgcgccggaccgtttccgaccaagctgtgatacgccgtgtagacggagtcgagatcggggccgacgacgttgctgctgtgtcccaggccgtagtgttcgtcgtccgtgtcgatgatggcgacgttgtctttcggctgtgtaaatcccgagagatcggtaagattttccgcgtacgagtaggcgatccgataccctttggaaatgacgtggtttcccgtataagtaagatagctgtaatcgccgcggcggaaaatgccgggaccctctatccacccgcgcagattcgcgtcgccgagattgcccgtcctgccgagcgtaaacggacggatgtcctcgacgtccgtgatttcgttgtatttaagccccgcgggcgtggacgtgtgtaaaagatagagttttccatcgtccgaaagatagaaggagccgtcgatccccatgccgagatttccgtaatcgatgccgccttccgtcccctcttccgatttgctgaaaagagtgaagccttccgtcggactttgggagcgatagatatagtgtcctttccccgcgcgcgactgacacatataaaaccagccgttataatagacgacttcgggcgcgtacgcgccgtgggcggtcgcctccgattccgcgacagccaatcccttatacgtccagtgtacgagatcttccgattcgaatactttgatgccgtcgcagggatccgaggtggagggatagagataatatttgccgttgtagcgcatgacgaaaggatcgccgatgccgtattgtccgtcgggtcccgtcgcggcagaggcgccccattgtccctcgatttcgatgcagttttgatagcgctccccttcgacgggtacgtattctatctccttgcctcgctgcgcgtccttgcccgaacagccgccgtttatgatcaaagccatagccatgattgccggaatgataattctccttttcatgttccttttcttttcaattttggatactgcggggaatttactccccgcagcactccggatatttgctgtccgcgctcccgccaaagcgtcaggcggaaactttgagattgcggaatacagccgccgcgccgttggtataaagccctatctttccgttgacgaacgccctcgaatcggtgacgtcgatgagcttcgtttctcccgaccagacgacgatgcgattgccgcgcacctgtattttcagcgggatgaattggtcgctcgtcgcaaacggattgttctgcaccatcgtggcgatattcttggaatcgtccgcgtaattgagcctttcgagaacaatctgattgttattgagagccagatagtacccctgcatactcgtatagctgtcgtgcgaggacgccgcgtaatttttggcgtggaacacgattcccgccgtggaagtgcccgtcttgccttccaatttaacctccacttccatcgtgaagtccgtcatcgtattatcgccgaaatacaccagctgtcgggtgcccgctttggcgtaatgaccgccgtctttaagcttccaaatggtcttgtaatccgctcccttcggcgcgtattgggcaagactctgttcgtaaacgggcgtaacgccgctcacttccacgaaacggaaactgacaaaattcacctctgcgccgagattttcgagtctgagcagccgaatgcccttagcggcgtccacttctccgatcagcgcttttacatacttttcctccgtttctatctgaggcagagtgcagcgccataccgtaccgtcgtccagcttgacgcctatttttttgccgccgtccgccgcgcgataaacgagttccagaccgtatctgcccgtttccttgaagttgacgagataggaaacgtaatccttttccgcgccgagcgtcaaagatttgacgccttcgaagggtttgtctgcgatgacggaaattccgctcttatcgctcagcttatagggctcgttataagtgttttcgtaaagatattcggacgcccccgtgatgccgagcgcctgcttggcttcccgctgatcgctcatgcccatcgctacgttgctgtaagcggtgtatcccacctgcgcgccgtcgctcagggatttatagccgattttacccgcagaaacgctcatggaagcgttgtctatctttgtcatgttgtcaaagacgacgtccactttgccgtcccgcgcgcaaacgcgcacggtgtgcagtttatccgcggaaaaatcgttgaccagcgtgcccgtcgcgaccgtggagagcgttccccccttgcattcggagagcgtgacggtctttgccgtcaagtccacgccgacgctcgcataattgtcggagtcccgataggcgaacacgtaagcggcgctgcccatccccgaaaggttgtattccgccgtaaaattcgcctgcgccgtcgtcttgctgagcgtgaacgccccggaatcgtcgaacttttccgcatccttccccgtcgcataaaattcgggcgccgtgggcgcaatgctgccttcgagattaggcgatacggacatctgattgccgttgaacaacagacggtctattccgaggcttctgttaggtccgcccgaggaattgagcatatgatagacgagatagtaagagtccatatccggtcccatgacggtggaagaatgcccgatgcctttgagcagaccctccgtttccaaagccaagggattgttttccgcgcgggtgaacgcgtctttgtcgatgccgccctcggacgtagtgatggcgttcgccgtcgaataggcgatgcgatagccgtcggaagcgacgtggttgcccgtataggtgagataataaacgccgtcccgtttaaggatatacgagccttccgtccatccgcctatcgaggtattgttgagtcttggcgtggacttggtgtctacggtcagcatggaatccattttcgccatacggatgccgccgttgtcggcataagtgaaatacagggactcatcatcgtcgatcagcaccgagccgtcgatggacagcccgaagctgttggtcgctttgacgaaaggcccttcggggctttccgatgtcaggacgtaatgcccgttgcccgcgggcgaggtatacatatagaacatcccgttccagtaatacacttcgggcgcgtaggcggctttggtgatattatcctgcgaaacgtatccctcgcgcagtccctctcccgtcatgggcgcccaattcacgagatccgccgatttatatccccgcacgcccagctcggaatcgagcgtggaacaatataaataatacatcccgttgtatctcatcacgaaaggatcgccgatgccgtatccttcccattgattggaaacggtcgcattctctcccattaaatactcgttgtaggatttattgtcataggtcgtaaataccgtattcggatcccgataaccgtcggggggcgcggaagaactgctgtcggaatttttcgaaggatcgccgcaggcggctcctcccagcatcaacaatgccgataatgccagcaccgatacttttttaattattttcatcgattttttcctcctcttagtcaggctttattgttgtttgcagccttgtagagcgtaccgtccgcagcgactctcacatactgtgaggacgccgcggcgtctattctgccgccctcgaaatagcagtcgtaccaaggatcgtacagatgatgatcgccggcgttatgcgaagcttcgcgcatggcgaccccgaacacgtcctccgccccgatccccagcgtggaatacgccacttttaaactaaacgtcgtgacgccgttttcgcgggtgatgaccaccgtgccgattttataagagtcggaagcactccaccagcttacgcttccttcgttcgcggttcctggattattgatattcccgttattatctttgccgttacttccgtatacggtgccatcggatgcaatcttgatgagataatccacattattccagccatcggcggtagttcccgtatcgaagtagatgagcaccatttcgttttggtcgccctctttgccgaaatcgcccgtcgtaaggaagtcaaaggtaattccgctctcatctctcgcggataccttgccataaaaatcgtccgcctgcgcgacgggacgagcgcccgccgccgtatccgtattttcgcccgtagcgaaatgaatccgataagaggaaaggtccaccgccgcgttgtccgccttggaatacatttcgttatgagcgccgacgcgcacatagtccttgggcatttcgggcttgacaaggggaatgccgtctacgccgggcagagcgaagttatcccatccgtcccagctgttcgccgtttgggagaactgtccgacggaaatgccgatgacttccgtaggcgcaacgccttcctccgcgtggcgctgggcgaaaaattcatagggaagcgtgaagtaaacttcgggcgccgtatctttgttgcgtaccgtaagcttcatcgaagcgggtatgctttcgttctttccgctgtcgcaccaattgacgatcgtaacggttccgtccgcgttgagattaaagaggtaatcgccggaatcgcgcgtatccccgctcgccttggtgtccacgaacaattcgatgcgccccgtaaacgctttcgtgccgacgaacttgaattcgaagccgacggcggaacgggtgacatagcctttaaaatgcgagaagttgtcgttggcgtcggcgataacgccgttcatcacgccgtattccagcatcatgtccaaacttccgaagtcgtactccgtatccgacgctttcaggtccgcttccttgaaggagatttgcagaggcagatagccgtccttttcgacgatcacgacgcagtcgactcccgcaaaattttgaatcgtgaaattgccctccgcatccgtcgtcgcggtcagggcgctattgccctccaccgtcaccgacgcgcccgctacgggtccgttgacattggtgacggtgcccgtcgccgtgacgtactgaatgcgatcggtgggaatcagggaaacgtccaccgtatgcgaagcgcccgcggcaagctctgccgccgtccttgtcttttcgctggcggcatagccgtccttttcgtatttaatgacgatgtccgtaagcgtggatactttggcgatcgtatatttgccgtccgcgtccgtggtagtcgtcagcttggtgccgacgatggaaacggtaacgccctcgacgcccgctcccgtgtcttcgtccgtcaccgtacccgtcactgcgacttcctgcaattcgagcgtcacgttatcggtaaacgtatagctgctgtcgaaatagccggcgggaatttccgtcgttttcgtcgaatatccctgacgggtatagacaatctccatttttcccgaggaggcgggcactttcatagaccaggcgccgttgctgcccgtcgtcgtggtgtaatcgcccacggtgactttaacgccgccgatccccgcgttgcccgacaggttgaccatggaggtgttgttttcctgacgatacatctcgttaatagcgctgacgcgcacaaacgtcttgggcgtttcgggagcaatgaactgcccgttgaagccccagccgtcccaatcgcttgcggaagtagaccactgtcccaaagagatgccgaacacttcgaggggcgtaatatccagatagctgtacggaatgaagaatctcgcctcatagccgtccgagccgttcttaaacagcttatattccagtccggccgccgtgaacgcgccgcccgcgaaatgcgtgccgcctatcgaaccgtcgtcgttgagatcgaatctccaacaggtggcgtcctgatcgcgatgatccgcgcattccttggtatcgaggtaaatttcgatatgtcccgaaagctgcctcgtccccgtcaagttcatttcgacgcccgtgagggtgcgggaaatcgtcatggaactgtccgcaaatttcgcggatttgttgccgaaggagccggtttcggcatacgggcggttgagattgacgtcgccgagcgcggaaatcgcctccccttccgtcaccaaatcatccgcggaaatatacgtcctgctttccccgtagcccgtcttgccgacgatgagagtgacgtcctcttcggcgggaactcccgcaagctcgaacgccccgtccgcgcccgtggcggcttcgaggacagtgccctctacccgcactttcgcacccgacaccgcgccgtcgataatgtttttcacagtgcctttcagcgtggtctttgccacggtggactcgtccttgatatagatcgtcttcaacacccgtccgccgtcgctcgctctcagttccgcacgggaataggtgacggaattgccgatatatccgtccttggaaacggtgacgacgtaatcgtggtcgggatccaccttttcgaacaggaaatatccctgcgagtccgtcgtgtaagtgcgttcctcttcatcgacgcggacggaaaccttcgcgcccgcaacggcttgctgcgtgacgctgtcgagcacgtaacccgccatatcggcatcgggtttttcctccgaatcgcgggaaagcagcttgttgtccttatcgagcaggatataattgtcgggagtctgcggctcgcagagaacgccgtcgaacgtccagccgtaccaatcccaatcggtgcccgacgagctgcccagcccgtatttatccacctgaccgaacgaaacgccgatggtgtctttcttttcaatccctatttgggtgtagggaatcatgacctccacgctgtaccctttatcggttgcctccacgccgtcgttgagggtgccgtcgaggaatacctcgtagtcgataagcccgttccaatttccccagccgctgcccgagccctgcatgatacgggtcttgccgtgaatgccgaggttgatctgataatcgtcgttctgcggcttcaaaccgccgtcggcaagcgtgtcgagatagatctcgatactgtcgctgcgggtaaccgagtcgtcgttagcgtttccgtccgtcagcaggatcgtatcttccacttcgaaaaagaagaacagcgcgtcgttgccgcgatatgctttcaccgtagcggcgttgccgtggccgaaggtggcgagaacgggtacgtttttccactgttcgtcgtccccttttccgtcgatcgtaagttcgggcgcgacgtagtttccgtcgaagtcgaactgaccgccgcccggttttttatcgggagtatagtcctcgtaggaatcgttttgattgccggagtcggaaggattgcctccgcatcccgtcgccagcaaagaaaatgccgtgatcagcattgccgcacgaatccatttttttctcattttttgcctcctgtatctgttttattttcaacggtttttcccgtttaaccttttacgcccgaaatcgccaaggactcgataaaatatttctggcaggtgatgtagataacgaacatgggaatactcgacaacaccgcgcccgccataatcaggggaagattagtgccgcccgcgttgtccgagttgatgcgcgccatcatcggctgcaaggtcatcgtttcatagctcttcaaatagatggcgggagcgaaatagtcgttccagatgccgataaaccagaagataatctgcgccgcgagcgccgtcttgaccatgggcagcataacggaaataaacatacgcatatagcccgcgccgtctattttggccgcttcgaaaaaggcgtttgacacccctctcatgtactgaatgagaaagaacatcatcgagatattcccgaaaagcccgggcaggatcaaaggccacagcgtatcgaacatattgagagccatgaacgccctgaactgcggcatcatcagcgccgcgtaaggcaccatcatgccgctcattaaaaagagcagccaaaaatttttgtgcggaagtttgagcttcgcgaagctgaacgcggccatcgaagaaacgaaggttcccaccacgatgacggaaatttccaccagcagggtattccatacgccgcgaatcagcggcacgaccgtccagatttccttataattgctgaaaatccaatgcttggggaagagcaccaattcgaggctgatcgcctcgtaatcgtccttgaaggaggtgagcagcatccagagatacggaaagaggaggataaaggcgccgatgatcaggagcacgtaaataatcacgcgcagaaggatatgcaacgccgtccttcccgcgcttgcgttttcattaaatcgtttggtgttttccatagccgttactcctcgtaaacccatttatccgagagcttgaactgcaccagcgtaatcagcatgatgacgagagccaagaggacggatgccgccgaagcaagtccgtagcggctctgattgatgccccttgcccagataaagtacacgatggtctgcgaaccctgcacgcccgccccgaaaatttcggaatcggcatacgattgcagtccgccgatgagtcccgtaatgagaagataaaaagtaatgggcgtaatcaacggcagagtgatcttaaagaactgctttactttccccgctccgtccagttcggacgcttcgtaatagtccttgggaacgccgagcatacccgcgagataaagaatcatcgccgtgcccatgccgttgagggagtttttgatgataatcgccactttgataagcacgtcgtcgcttagccacgggatcttttttccgatcaaaagattgataataccgaattcgttattgaagatgtatctccaaacgatgttcattgccaccgcactggaaaccgcgggcagataatacaggacctgaaagaccttggagcctttgatctcccccatccgcagaagccctgcaagacaaagcccgagcgccatgctgcacggaatgctcaaaagcagcaccagcgtattgaggatagaggtgaaaaagcttttggaatagagaatatgggtaaagagatccttataatttttcagtccctgccacgtcgattcgcctgtcagtatcttataatcctgaaagctatacacaaacgagaacgccatagcgccgatcgtgaagatacaaaatccgacgatcggcgggagaataaacaaaaaggcaatgatattctcccttctcgtaagtttgctgaccttttgtttcgtcatatgtcaccccaaatttgcacgcatttcgtcgagcgccgcctggaacgttttggcgtaatctttgcaggctttttccgcagtcacgttgccgtcccacattttgacgctcgtaagatattccgtgaacgaatcgtaccaatcggaagaataggtgtaataacgcgaccgcactttgcccccgatcttgtccgtatcgctcctgccgttgatcgtatccacccatacggaacgggaaggaggatttttatcctttaaaagctcctgcgtgtcgttgatatattcgtcgttcgccatgctggtgatattgggcacctgctgccccagttcgtaaaatttgcgctgtgcgccttcgttgtagcaaagatatttggcgagcttgacggctgcctgcgtcttggcggagctggcgtctttattgatgcaatatcccatggagcctacccaggcggtgctctccgcgtcgggattgtttccgttgtagggaacgggcagaatatcgtattcgaaattcaccgtcttccaaaattccgcgcagtcccaaggtcccataaagctgaacacgcagccctgtcccttaaaacgctgatatccgttcgtagaaacctgatcggacgcggtgggcataacgtggtccttcaaagtgagatcggcgataaattggatcgcctcggagaagtggggatcggtgatctgttcccggctggcatcgtcgttgaagaagctggcgttattcgaatagaccgccgcttcgatctcgtaatgagagatgccgtaaacgttgtccgccccgccgtcgggatcgatctgcttcaacagcgcgcgaaattcgttccaggtcataggttccgtcgcgctcagcttcgcatagatcgcctcgctgtccaagccgtatttggctatctgcttatccaatagcgtcttgttgtatacgagcgtaaacggtcccagatccttgggcagaccgtacagtttcgcgccgctcgattttcccagcgtgcttgcgctcgggttatagtagtactcgtccaccgcctgcggccaaagctcggacaattcctcttccgtaatgtaggaagaaaggtccttcaattttccgttggaaacccattccagaaaatcgtaatcgggcatatagaagagctcgggcagattggtcgccctgtttctcagcgtcgtcatataagtggacgaactctccgccttatacaccaccgtgatatttttgttctcttccataaacagattgacgagagtctgataattctcctgttccgcggcgtcgccccatccaaaaaattcgatggtcacgggaccgttgttgcccgagccgccttcggaattttcagaattgttcgacggatgacttccgcaggcccccaggctcagcgccataagccctgccaataacaacacagataatttcttcatgtcttctttcctcctcagactgaattattttttggcctgccgctttcgcggcggcgcgttcttccaaataagcgttttacgtaataccgttgtattacgtaaaacagggacgtccctgttttagcgttctgatttttttcgcttttatttaaacttacgcattttgagcttaattatcaattgaaaaacaatttttgttctttaattatttattttctgtcattattttataacaccattcctcccttgtcaataggtttttggaaatttgcaaaaattctcgttttagttacatgaaagtcgttgaaataaaggcgagaaaaaacgccgggaatcccgacgtttgcaaagaatgcagtctgctttttttcgcggaaggaaaccgctgcttcgcggcgttttccgcaataaagtcctgttttttattctatcttccaagaattttattcgacgccgtaaaactcctctttttctcaaaacgaagggcaaagatccgctttgcgcctccgcttcaagacagcttctttttaattataatccaccatatagacgagtccctgcgcgaaatccccgaatttctccccaaagagattgagtcccccttgatggcgcgcattctctttgattccgatgcggaagaggatatagttgcccttttgcagccccaatttttcgatattgtaagtgctgacggcagtttcgtcgagatatacgcattcgggcgtgatcctcagagtcttaatgatgccgtactgcgtcgagtaatccgaccaccaatcgggattgagtctgccccgccttccgccgtaatcgccgggagaaagataggtggcgacttccacgccgtttatccagaacgtaatgtcgctttcccagtcgttgcggtaattgggggcttcgctgcaaagttccatgctgaacgtgacggcgttgatgtgcttgtctttcagcatataattgggaatgcggtattcgaggtatcccttgctgaaccagatcatctgcgcatcgtaacgcaagggactgaaaaatgcgccgggcatatcgtcggcgatgatgatgccgcgttcgtccgccatgccgcagcccgcctccacgtaagcgtcgctaaaactccccagggggatttcctgcgaaaactgacggctcttactcaggcgcggatcggtggcaaaatcgagggaaaaacggtcgatttggcgcgagatgagcttggcgttgccgcgggtattgcgtttcaccgtaacgctgatgaaccccgcttttctcaaaatattgacgtgaaaagaaacggtggaaacgggcagtttcagccgcttcgccagttccgcaatcgaataacaggaagaacgcagcatacacatgatacgccgccgcacagtggcgttgagcgcctgtacaatctcttccagcctctcctcttcgtctatctttaaatcgaattccctttccgccatacgcgtcctcccgaccacactttcggtcgcttttattttaccacaccccgacgccgctgtcaagcccctcgtcgcaaagctttcccgtaaaaatcaaaacacttttttctcgcctgtcgcccctcgattcttaaaaactctttgctcttaaaacgaaaaatcgccgcttgcctcttacgcgtttttctatgacagcgctccctcttctttctccaatcctccctccgacctttctctttgctttttttattcccgcctcttaccttaccgacctcttcctttggctttgttcccccttctcctccgcttagcatctttccacaaaaaaacgcggactctttctcgctctgaaacagtccgcgtttctctttctcaaatcatgttttccaaaatcagcttgtccgccaccagcgcgatgaactcgctgttcgtcggcttttccgtccccagataaatcctcgtcccgaagatcgcgttgatcgcctctatccgccctcggttccacgctacctctatcgcatgacgaatcgctctctccaccttgctcggcgtcgtttcaaacttcttcgcaatgctcggatataatcccttcgtcacgttgttgatgatgtacggcttctctaccgtcagtttgatcccttctctcaaatacccgtatcccttgatgtgcggcggtatcccgatcgatatgaatatgtcgctgatcttctcgtccaatgtctgcggctttctcttcgcgctcgcgtactccctcccttctcctccttcttcctgccctctcatcagctctttcatccgctctatcgctccgctgatcgaaaacggcttcaccagatagtagtccgctccttcgttcatcgccttttccatcagcgcgtcgttcgacactcccgtcgcgatgatcttcggcgtacctccctgcttgcggatcgcacggatcactccgcatccgtccgtccctttcaggaacatccctacgatcgccatctccggtttctgctgctggatttgtttgatccccgcctccccgtcgtcgcccgcgtacaccactctcaactcttcgctgctctccattgcctctttcagctcttgttgcagcgtcacgttggactccaatacaactacattctttgtccgcataataccgtcctctccttgttttttcgtcgatctttcgacctccgtgtttaacaaggtatattatactacaaattccgtcctttgtaaaggattattttacattatctattcttttatttctgatttttttgtcttttttaaaaatatactgccccttcttgtcgctttttgtcg

SEQ ID NO: 3125 - DNA, 18738 bp, Unknown
  16S sequences of unknown bacteria
cgacacagtgcgtagacaagcggtcgggcagattcgttggcaaaccagaggtttgccaacgagcagaaatttccactccctctttccaattcgcgcgaagtatgataagataaacaatgaggagggaacgattatggaaacccagcgtctgcctcacgatcatagccaaaaaatcgaacgcaagctggagagcatgcctagcgcggaagattttcaagccatagcggttcttttgaagcagttgggcgatgggaaccgcctgcgccttttttggctcctttgccatggcgaggagtgcgtcatcaacctttccgccatggtcggcatgagcagcccggcggtatcgcatcatcttaggcaattggcgagcgccaagctgattgtcagccgccgcgagggaaaagaagtgtattatacggcggcccaaacggaacaagcgcaattgtttcaccatatggtcgagcgcttaattgaaattcattgtccttctgaaggcgcatagaaaggcggaacaagcatgaagtccgacgaatgttcccgcatcgaagctctgctgcacaacgtgcctgacggcgaaattgccgtagcctaccatagcgctacacgagactttgtgctgcaaaccgagcaattttttccccaaggcgccgggaaaggacaaatagacgcttacgccgttttccccggcgtagacgcggcttatcacgtttttagcgcccccaaagtagcttttcgccacgcgcccgcccccggcgtgctggaactgtttcattgccatagcgggcgggtcggctggaatatgcggggcggcatggccatttacttgggtgcggaggacatgaccatgcatagcgccacctgttgcgcggattccgccatgatgttcccactgagctatgtggaagggctctccatttccatcgatccgcaacgcctcgcggcaaatctgcccgaggcgctacaagaagcaaatttccagccgcagaaattgttcgccgctttttgccaggaaaagcccgttgcgcttcctgcttgtccaccattggaagggctattcgcacccctatacgccgcgcgtcctgccctgcgcaaaccctacctccagctcaaaatccaggaactgctcttatacttgatggaactaaagccagagcaattggcaaccagccgctattcttcccaacaggcagaatggatcaaggagattcaccagcagctaacggaacacctggaccagcgtttcaccatcgaagcgctggcaaagcaatatttgatcaacgcttccaccctcaaagaagtcttcaaagccgtgtatggtttgccaatcgccacttatatgaaagagtatcgcatgcggcgggccatgaagctcctgcgggaaaccgatgccagcatcgcagatatcgccgcgcaagtgggttacgaaacgcaaggaaagtttgcccaggcatttaaggatgtcgtgcatgcgctgccaacagaataccgcaaacaatatgttcagcgctaagccaggccgaaagcccagtgcacgccatggacgtttccctttcatcgccaaagaatgcgcaaacaagcctccaacgcaacgattgaattgcataaaaagagagcggaacgcattgcaaaatgcattccgctcttttctgttgttttttacaccagctcgagaatgaccatctcggccgcatcgccacggcgcgggcccttcttgatgatgcgggtgtagccgccgccgatgcccttttcctgctggcgggcgcgatatttgggcgcatgctcgcggaagagcttttccaccacaggatgcttcacggccttctgacgggcgaggaaatcgtccttgtcctcatccgcgccgcgagtggcggggatttcatacagcgtgcgcatgatctggcggcgtgcggcgagcttctcgggcgcgtcgttcaccacgtccagcaccacgatctgctgcttatcgttcttggtttcctttttcagctcgatggtcttatcataggtacgcacggcaagcgcgatcaggtgctccgcaacagagctgacttccttcgcgcgcgcgagcgtcgtttcgatttttccataccagagcaggttggtcacctggttgcgcagaagcgcctttctctggttggacggcctgcccagcttgcgtttggccattttcggttcctcccttgattcaaaacgttatcgtaatgctagtcctctgacactttcaaagagaggcccagcgcttcgagcttctgctccacttcctcaagcgactttttgccgaggttgcgaaccttcatcatgtcttcctgattgcgctgcaccagctcgtgcaccgtgttgatgcccgcgcgtttcaggcagttgaacgcgcgcaccgaaagatccagctcctcgatcgtcatttctagaaccttttccttggtgtcgctttccggttcgttgtaatcgacgcggacgacgttgaccgttaggtcaatgaacaggcgcatattgttcgtgatgatctgcgccgccgccgccaaagcttccttgggaagtatgcttccgttggtccaaacctctatggtcaatttatcgtaatccgtgacctggcctacgcgcgtatcttccaccgagtagctgaccttgcgaatcggcgtgaacacgctatccatcggaatcacgccgatgggaatcgtgccatttttgccgcgctcgatcattgcctgcttgttgcgttccgcgctcacatagccgcggcccgtttcaagcgtaatctgcatgctcaggtgcgcgcccgcgctgagagtggcaatgtgcaattcgggattgacaatttccacttcatcatcgccttggatgtcggccgcggtaacttcgcattcgccattcacatcgatgttcacgagtttcggctgatcggtaaacagcttcaccgacaggagcttcaggttgaggatgatctccatcacatcttccttcacgcccggaatggtggaaaattcatgctgaatcccatcgatgcgcacgcttgtcaccgccgcacccggcagcgaattgagcagcacgcgccgcagcgaattgcccagcgtctgcccaaagccgcgctccagcgggttgatcacaaacttgccataccgattgttctcgccgatttcaacgcgctcgatttttggcttttcgatttgatcgatcacttagcgtttcctccttcccgtcgccgcgcttttcaggcgctagcggtgttccgctcaacagagctcagaggcaagcccagcgaaacatgccttgcctcgcgggctattgcacaagcgccgcccgcataggcgcataaaatcgcccatgcgagcaaacactgtgtgattagcccttagcgggagtacagctcgacgatcaagtgctcctggatcgtcagatcgatgtcttcgcgctgcggcaacgccgcgaccgtcagtttcaagttcggagcgtccatcacgagccacttcggcaacaccttgcccgtgccctcacgcatcgccttgaagtattcgctctccgcactcttttcgcggatcgtgatttcgtcgttcgcgctcacgagatacgacgggatgttcacctttttaccgttcaccaggatgtggccatggcgcaccaactggcgcgcgtggttcctgctggaaccaaagcccgcgcggtataccacattgtccagccggcgctccagcatgatgagcaggttatcacccgtgatgccctgctggctttccgccttcgcaaaatagcggcggaactgggtctccatcacgccatacacgcggcgggccttctgtttttcacgcagctgcaggccatattcgctctgcctgcgctggcgcgtttggccatgctcgcccggcggggtcgggcgcttgccaacggcgcacttggggccgtagcaacgttcgcccttcaggaagagcttcacgccttcgcgacggcagaggcggcaaacggaaccagtatatcttgccattgttatatcctcctacactcttctgcgcttgggcggacggcatccattgtgcggaatcggcgtcacgtccttgatcatggtgacctccaggccagcggcgtgcagcgaacggatcgcggcttcgcgcccagaaccggggccctttacgaacacttccacagatttgaggccgtattccatcgcgccatgggcggcggtttcggccgcgctctgcgccgcaaacggcgtggacttcttgctgccgcggaaaccgagtccgccagcgctcgcccatgccagcgcgttgcccgccgtgtccgtaatcgtaacgatcgtattgttaaaagaagagcggatgtgcgccgcgccgcgctccacgagcttcttttcacggcgcttacgcgtaacctttttcagcttcggcttcgccatttttctttcctcccgatctcaaccctacttggtggccttcttcttaccggcgacctgcttcttggggcccttccgggtccgggcgttctgcttggtgttctgtccgcgaacgggcaggccacggcgatgccgcaagcccctgtagcagccaatctccatcagccgcttgacgttcatcgatacttcgcggcggagatcgccctccaccttcacgttgtggtcgatgtagtcgcgcagtttaccaatttcctgctcggaaagatccttcacgcgagtatcgggattgatgccggtcgcctcgatgatgtcgtcggcgatattccggccgatgccgtaaatatacgtcagggcaatttcgatgcgcttctccctgggaagatcgacgcctgcgattcgtgccattggattcaagcacctccaatatccattccgtgtctatattcgctcagcatcggcgccgccgctccctctttcggaaagggacgctagcgcctgcgttattgatgaagacccacgaatcacccgaactttggcgagaacggatgcagccgcttcggagtcgttcacgatccgttgcggggcgtttacccctgcttctgcttgtgcttcgggttttcgcagattaccatcacgcggcccttgcgcttgataatcttgcacttttcgcaaatgggtttcaccgacggtcttaccttcattttgccatcctcctgttctcgttcaagcccgcttccgcgcccgcgccattgcgcgcgcgccatccgaagcgcgcctttaggccttgctgcgccacgtgattctgccccgggtcaggtcgtacggggacagctcgattgttaccttatcgcccgggtaaatccggatataattcatccgcatcttgccggaaacatgcgccaataccttgtgtccgttggccagctctacctcgaacatcgcgttcgggtacgcctccttcacaacgccttcgacttcgataacatcggatttcgacaagcttttaaccctcctcgtgcgataggctcgcgcgcacttcataatccgcaacagcttcatgcctcaaaagccgctcgcgcagcgccatgtccacatgcgctgtgggcttcaaatggctgcgccgctttttctttggacgtgccatttggcgatgcctgccatccgccacacagacaaaatcggcatccaattcctggacgacgagcatcttgcggcccgcatcgcgcccagcgcgggaaatggcaatccgccccacttccaatggccatttgttcatgcgctctcctccggaagcgtaaggattcgggcgcctttatccgtcacggcgatcgtatgctcatagtgcgagcaaaaacttccatcgcgcgttacacaggtccagccatccttcaagatgcgaatgtggtaatcccccagcgcaatcatgggttctatggctatcgtcatgccttcccgaaggcgtatgccgtggccggccctgccgtaattgggtacgttgggatcttcgtgcatttcgcggccaattccgtggccgcacatgtcccgaatcacgccgtagccatgtgcctccgcatgcgtttgcactgcgttgccgatgtcgcctagccggttgcccggcttcacgacctcaaccgctttccagaagcactcttccgtaacgtccatcagcttttgcacttcgctggatacttcgccgattcccacggaaaacgcgctgtccgcctgccaaccatcgtacaccagcccgcaatcaatgctcaaaagctgcccgctttccagcggcttgtcgttggcaaacccgtgcacaaccgtctcattcaacgaagcgcagatcgtatagggaaatccatgataatccttaaacgagggaaccgcgcccattgagcgaatcatgtcctccgccatgcgatccagttgaagcgtcgttacgccttcatgaatttctttgcgcagcgccgctagcaccttccccagcatctgcccggagacgtacatcttctcgatttccgcctccgtctttatggtaatcattcgcaccccagcgcgcggaaaatggcgcgcgtcacgttggcgggtgtatcgtccccgttaaccaccttgagctggccgcgctccttatagaacgcgatcagcggagcggtttgtgtgtgatacaccttcaagcgattctcaatcgtctccggtttatcgtcatcgcgctgatacagcgcgccgccacaaaccgggcaaacttccttttccaactgcgaaatatggaacgtgccctggcaatccttgcaaacgcgacgtcctgtcaaccgggaaaggagtttatcgtccgccacatcaatttcgatcacgcaatcaatcgccgaaaagccttccagcgcttccgcctggtgcacagagcgggggaaaccgtcgagcaggaatccgtttacgcaatctgcctcgcggattcgctcctcgaccatcgcaatcacgatttcatccgacacgagcttgcccgcgtcgatggtttccttcgcttgttttcccgtaggcgtgcccaggcggatggcccgccggagcatatcgcctgtcgaaatatgggcaatgttcagtttagctgcaacttccgccgcctgcgtgcctttaccggcacctggcgggcccagaaaaatcagcttcatatgcgcacctctattacttcaggaagcccttgtaatggcgcatcagaatctggctttccagctggcgcgtcgtttcgagagccacagaaactgcaatcaacagcgacgaggcctggaacggcaacgaaacattcgcgatgccgtagatcagggtcggaatcgtcgccaatactgcgaggaacagcgcgccaaacaagttgatgcgcttggtgatcttggcgataaacagcgcagtgggcttgccctggcgaatgcccgggatgctgccgccattttgctgcatattcttggcaatttcgtccggattgaaggaaatggacgaatagaagaacgtgaagccaatgatcaacagcgcgaacaccaattgataccagaagcccatcacattgatgtgctgatcccaccagctgctgccgaacatcgcaagaatcgtcggcgggaactgcatcagcgccgaggcgaagatcagcggcaacacgccggaggagttcaccttgagcggaatgtgcgtggactggccgccgtacatcttgcggccgacgacgcgctttgcatattgcaccggaacgcggcgctctgcgaggtcaacacaagtcaccgccacgatcagcaccaggctgatgatgagcaccggcagcgcgatcagcaaatagctgggcatatgccacgcattgtaggcgcccacagcgatctggtttgcgaagttcgagatgatgcccgcaaagatcagaaggctgatgccgttgccaatgccgttttccgtgatgcgttcgccaatccacatagccagcgccgtaccggcagccatgcagaaaccgatcgtgatcaagccgaaggtgccgccgctcgcctgcgcgccaatggccgaggtgagcgccactgcctggaggaagcccaaggcaaccgtgacatagcgggtgatctgagcgatctttttgcggccttcctcgccggacttgttcatctcttccagcttcggaatggcgaccgtcagcagttgcataataatcgaggcgttgatgtagggcgaaatacccatcgccataatcgtatacatctgcaggttggaaccggtgatcgaattcataaactgcagcaagctaaaggtttcaagtccttcctgcacgcttgccagatcgacacccggaaccggcaccacgcacagaaggcggtacaggatcagcataaacaccgtgtacagaaccttcttgcgcagttcttcaatcttccaaacattgcgaagcgtctcaaacatctcagagcacctcgcacttcccacccgccgcttcgattttcgcttttgcggacgcggtaaacttcatcgcctgcaccgtaagcttcttggtgagttcaccatcgcccatgatcttgatgccgtcttcgatcttcttgatgatgccttcctcaatcagttcgaccgggccgaccgtcatgccgtcttcaaacacttccaggcggctgacattgatggcgacgtactccttgcggaagatgttcgtaaagccgtacttgggcagccggcgcaccaagggcagctgaccgccttcaaatccgggccgcttgccgccgccagaacgcgccttcgcgcccttatgacccttgccggaggtcttgccaagaccggaaccgatgccgcggcccaaacgcttcggggcggctgtcgatccgactgcgggtttgatctcatgaagtttcatgccaggacctccttagtcgttaatttcctcaaccttgaccatgtgcttcaccttgaagatcattccgcggatcgccggattgtcctcatgcacaacggtatgcccaatgcgatgcaggcccagcgccttaatggtggcaatctgatcctttaggcaggcgatggtggatttcgtctgagtgattttcagcttcattgttctaaccccctcagcccaacagctcttccacggtcttgccgcgaagcgccgcaacctgttccgcggagcgaagctgcttcaatccctcgatcgtcgcacgcgccatgttgatcgggttgttcgtgcccacagacttggtgcggatgtccttgatgccgcacgcctcgatcacggcgcgcacagcgctgcccgcgatcacgcccgtgccttccggcgccgggagcaggagcacgcgccccttgccaaaggtgccgatggcctcgtgcggaatcgtggtgccgtcgatcggcacctggatgaggtccttcttcgcatcctcaatgcccttgcgaatggcttccggaatttccgccgccttgcccatgccaacgccgacgcgacccttttcgtcgcccacgaccatcaacgcgctgaagcggaaattgcgaccgcccttaacgaccttggtaacgcggtttaccgctaccattttctctttgaattcgctaacctgctgctctctgcgctgcatttgcgtttgatacctccttaaaccatcagaagtccagaccgccctcgcgagcgccagcggccagctcggccacacggccggtatagatatatccaccgcggtcaaagacgacattgtcaatgccctttgccttggcacgctgagccaccactttgcccacgagctttgcagcgcccttcttgtccagttcgccaagctgacccgcgatttccttttcaacggtggaagccgcaaccagcgtattgccgacgctgtcgtcgatgatctgcgcgtaaatgtgcttcaggctgcgatacacgcacagacggggacgcgcggcggttccgctgatctttttgcgcacgcgctcgtggcgaattttgcggacttcgttccgatcccgcttgctaaacatttgccattcccctccttatttcttgccggccttgccttctttgcggcgcacaacctcatccacatagcgaatgcccttgcccagatacggctccggcttgcgaatcgcgcggatatcggccgccacagcgccgacctgctgcttatcaatgccttttaccacgatctccgtcggctgcggcgtctcaaaagagatgttctccggcgcgtcgatcactacgggatggctaaatcccacattcaaggtgagctgcttacccgcggcctgcgcgcgatagcccacgccttccatgtgcaaacgcttttcaaagccgttggtcacgcccaccaccaggttgtgcagcagcgcccgatacaggccgtgcatcgccttgtgcggcttggcgtccgacggacgggaaacggtaattaccgcgccttcgtgcttaacggtaatatccttatgaaccttctgactcagcgtgcctttggggcccttgatcgttaccagattgtcttcgccaatcgtcacggtcacgccgctgggcacggtgatcggaagctttccgatacgagacatttcattgcacctccagttggtaattaccagatataggccagcacttcgccgccgatacctgcgttgcgggcttctttatcggtcataatgcccttcgacgtggaaatgatcgccacgcccaggccgccgagcaccttcggcagttcttcacggcgggcatacacgcgaaggcccggcttggagatgcgcttgaggcccttgatcaccggctgcttgccctgcacatacttgagcacgatcttgatctggccctgcacgtcgtcgtcgatgaaatcgatcgacttcacgtagccctcgtccagaaggattttcgcgatcgccttcttcatgttcgaagcgggcagcgtaacggtatcgtgtctggcaatgagggcattgcggattctcgtcagcatatccgcgatgggatcgttcattatcatttgaaaacctccttgctattgcccagcttaccagctagcctttctcacgcccgggatctggcccttgtacgccagctcgcggaagcaaatgcggcacacgccgtatttgcgaagaaccgaatgcgggcggccgcaaatgcggcaacgggtatacgcgcgcgtggagaacttcggctcccttgcctgccgaaccttcatgcttgtcttcgccattttacgtcctcctcattacgcctgcgcaaacggcatccccatcagttggagaagctcctgcgcctcttcgtcggtcttcgcgctggtgacaaagatcatttccaggccgcgaatcttttctaccttatcataatcgatctcagggaagatcaactgctcgcgcacgcccagcgcataattgccgcggccatcaaaggccttggtggatacgccgcggaagtcgcgcacgcgcggaagcacgatagaaacgagcttatccgcgaattcatacatgcggtcgccgcgcagcgtaaccttggcgccaacgttcatgccagcgcgcagcttgaagttcgcgacggacttcttcgccttcgtcacgagcggcttctggccggagatcgtggccaattccgaaaccgccagctcgagcgccttggcgttgtccttgcaatcgcccaggcccacgttcagcacgatcttctcgagcttcgggatttccatcacatttttatagccgaacttctgctgaagcgccggaacgacttccgcgcggtatttgtccctcagtctggccatgaaacttctcctccttacttgtcgatggtcgcgccgcactttttgcacacgcgcaccttgcggggcttctggccttcagcttcaacaaacttatgcgctacgcgcgtagccttcttgcagctggggcaaaccagcatcacgcggctcgcgtcgatcgcggcttccttgctcacgatgccgccaggcatgccctggccgcgcggcttctgatggcgcttcacaatcgcgacgccttccacaatcactttgccctcgctcgggaaagccttctgcaccttgccagttttgcctttgctgttgcgcttgtcgccggaaatgacgacaacggtatccccggatttcacatgaagcttgggtgtactcatttcgtctttcctccttacagcacttcaggcgccagcgagacgatcttcatataatccttctcgcgcagttcacgcgccacgggcccaaagatacgggtgccgcgcggctgcttatcgttgccgatgataacggcggcgttatcatcaaagcggatataggatccgtcggggcggcgatactgcttgcgagtgcgcacgatcacggcgcgcaccacgtcgccctttttcaccgtgccgcccggcgttgcgctcttcacagaggcgacgatcacatcgccaataccacccgaacggcggaaagagccgcccagcacccggaagcacataatttccttggcgccggagttgtcggctacctttaagcgggtttgcggctgaatcatttcagtttcctccttagcttaactccggcagattactttgccttctcgatgatttccaccaggcgccagcgcttgtccttggacagcgggcgggtttccatcacgcgcacgcggtcgcccacgccgcactgattgaattcatcgtgcgccttcaggcggttcgtgcggttcataatcttgccatacagcggatgacgaacgcgggtgcggatttccaccacgatggtcttatccatcttatcggaaacgacgacaccagtacgggttttacgaatgcctcttacctcggccatttttcaagctgcctcctttcgcgttctgtcacgccttggccgacagctcgcgctgccggagcacggtgagcacacgggcgatatcgcgcttgcactcagtgatcgttgcggtattttccaactggcccgtggcaagctggaagcgcaggttgaacagctcgctctttttgttcttcagttcggtgttgagctcttcggaggtcttggtcaaaagttccttgaattccttatttttcattgctcttcaccaccagtctgcagattctcccgcttgaggaatttcgttttgatcgggagcttgtgcgacgcgaggcgcagggcttcgcgcgcggtttcttccggaatgccgttcagctcaaagagcacgcggccgggcttcacaaccgctacccagtattcgggcgcgcccttaccagaacccatgcgggtttcggccggcttggcggtcacgggcttatccgggaaaatcttgatccaaaccttaccgccgcgcttgatgaaacgcgtcatcgcgatacgagcggcctcaatctgattcgaagtaatccagccgggctgggtggccatcaggccgtaatcgccataggcgatgaagttgccgcgctgggccttacccttcatgcggccacgcatcaccttgcgatgctttactcttttcggcatcagcatgagcttattcctcctttacgtcctctgggccggcttttcggactttttcgacttcggaagaacctggcctttgtagatccaaaccttcacgccgatgcgtccataggtcgttttggcttcggcaaagccataatcgatgttggcgcgcagggtctgcagcggaatcgaaccatcatggtagccttcgctgcgggcgatatccgcgccgcccaggcggccagagacctgcgttttgatgcccttcacttcgctcacatgcttcggcgcacggttgcggttgccgccgcgctggccgcgctcgccggggcgatagcccgggttcttcgcgcgcgtaatcgcctgcttcatcgcgcggcggaaggaaatgcgcttttccagctgctgggcgatgttctcggccaccaactgcgcgtcggtatccggagattcgatctcgaggatgttgaggttcacagccttgccggtgaacttttcgatttctttcttcagcgcttccacgcccgcgccctggtggccgatgatgatgccgggcttggcggtatagatcgaaacggtgattttgtcgccggggcgctcaatgtcgatatgcgaaatgcccgccgcgtagagcttttccttgagcattttgcgcaggttgaagtcttccaccagattgttggaaaaatccttcttgcccgcataccatttggtgctccagtccagaatcacgcccacacgggcgccatggggattaactttctgacccattttctttcctcctacttctggtccagcacgacagtgatatggctggtgcgcttatgaatcatatcggcgcggccatgcgagcgcgcccaccaacgcttgagcgtggggccctggttcgcataaatctccgcaacgtagagattctcgcggtcataagcgccgtcctcacggttcacggcgttcgcgattgcgctgttcagaagcttcaaaacgacaggcgcggcggccttgggagtatacatcaaaatcgccagtgcgtcgtcaacctgctttccacggatcaggtcgatcacgatcttcaccttgcgggaagagatgcgaacatatttcgccgtggcatgcggcctggtatcgcgctgctccgcgcgcttggcggccttttctcttacacgggttgccatattctcactccttcacgtcacttacgggccgaagccttttcgccggcatggccccggaacgtacgcgtgggggcgaactcgccgaacttatgtccaaccatatcttccgtcacatataccggaacgtgcttgcggccgtcgtgaaccgccacggtatggccgacgaaatccgggaaaatcgtgctggctcgcgaccaggtcttcaaaacctttttatcaccggtctcattcatctgctgcacacgcttgagaagagcgggctgaatgaacgggccctttttaactgatctgctcatgaattcgcgctgcctccttccaagcggccattacttgccggccctcttgacgatcatcttgtcggaatacttgcgatgcttgcgggtcttgacgccctgcgtgggcttgccccacggagacatcggagccggcatgccgaccggagaacggccttcgccgccgccgtgcgggtggtccaccgggttcatcacaacaccgcgaaccgtgggccggatgcccaggtgacgctggcggcccgccttaccaatgcggacattctcgtgatcggtgttgcccacctgaccgatcgtggcgcgcgcgttcatgggaaccttgcgcacttcgccggacgggaggcgaacctgcgcatacgcgccttccttcgccatcagctgcgccgccgcgcctgccgcgcgcaccatctggccgccgcggccgggcttgatttccacattgtgaatcagcgtgcccagcgggatgttctcgatcggcaggctgttaccgggtttaatatcggcgttgggcccactcatcacggtatcgccaaccgacagaccgaggggcgcgaggatatagcgcttttcgccgtcggcatagtgcaaaagagcaataaagcaagtgcggttcgggtcgtattcgatcgcggcgactttcgcggggatatcgtccttcatgcgcttaaagtcgatgatgcgatacttgcggcgcgcgccgccgccctggtggcggacggtgatcttgcccgtgttgttgcggccggccttatggcgcagatccgtcacgagcgagcgctccggcgtctttttggtaacttcttcaaaagtcagcaccgacatgaagcgccttgcgggcgaggtcggcttatagactcgaatggccattttgtcccctcccttttattgcgccaggctctcgaagaattcgatcggcttcgagtcggcggcgagcttgatgaatgcctttttcttttcggggcggcggccctgggtgcggccctggcgcttgatcttgccttcctggcgcagggtgttcacgctgtccaccttcacgccgaacacggcttcaatcgccttgcgaatctccgtcttattcgcgtgcacgtccacctcgaaggtgtagcacttttccgccatctgatcgtacgatttctcggtcagcaccggctttttgatgatatcataggggcttttcattattcgtacacctcctcaaccagccgcacggcttcctcggtgacgatgaacttgtcgtatcccaggatatccagcacattgatcgtgctcacgtgcgcagccttgacgccctggatgttcgccgtggcgcggttgaccatttcctcgctaccagcagtgacgatgagcgccttgcgcgtggcgcccagatccttaagcatcttggcgatcacacgggtcttgccattttccacttccagcttatccagcacgatcaggtcgttgtccacaaccttgctcgtgagcgcgccgcacatggcgaggcggcgaaccttcttgggaacgttgatgcgatagctgcgcggcttgggagcgaacaccacgccgccatgcgtgaactgcggcgcccggcggccatgatggcgcgcattaccggtgcccttctggcggtaaatcttgcggccgccaccgcgcacctcggtgcgggttttcgcggcctgcgtgccctggcgcttcgcgttgagctgcgcgcgcaccacgctgtggatcgcgtgctcgtgaatcgtagcgccgaaaaccaaatcggaaagctcgatttcgctcacgggcttgccgctcatattgtagactgctactttaggcattgtcttgtcctcctctccagaacattacgccttcaccgtattgcggatgaagagcaggcaacccttcgccccgggaactgcgcccttgatgagaatcaggttgcgttccgcgtccacgcggacgatttcaagattctggacggtgactttttctccgccgtagcggccggccatcttcttgtttttgaacacgcgggaaggatcggagtttgcactcagggaaccgacgccgcgatggtacttagagccgtgcgccatggggccggtgtgctggttccagcgctgcaccacgcccgtatagccgtggcccttgctgatgccggaaacatccaccttttcgccttccgcgaacgtgtcggccttgatttcgtcgcccactttgaaggacgaaatgtctgccagccggaattcgcgcagatagcgcttggcgggaacgttcgcctttgcaaaatggccgagctcgggcttcgtcatcagtttcttcgcacgctcctgagcgagctcaccgaaaccgacctggactgcctcgtagccgtcggtagcaacggtcttgatctgcgttaccacacagggaccggcttcgacgaccgtgaccggcgccagacgtccgtcggaaaggaaaatctgggtcatgccgatcttcttgccgagaattgccttgttcattgttgcacctccatattcgaaaaagcccattagagcttaatctcgatttccacgcctgcgggcagatcgagcttggtgagcgcgtccaccgtgcgggggttcggatccaggatgtcgatcaagcgcttgtgggtgcgctgctcaaactgctcgcgggaatccttgtgcttgtgcggcgagcggagaatcgtgatgatttccttttcggtgggcagcggaatcgggccggaaacgcgcgaaccggcgcgcttggcggtctccacgatgcgagcggcgctctggtcgatgatcgagtgctcgtacgccttgagcttgatgcggatcttctgattggccatgaatgttcctcctcttagaactcatgcacacgctgccgggcgtgttcataactcttacctgcgacggcatgagcccgtcgtccgatttttgcggactggtccccgaaaattcccgccgccgaccggagtcgccagcggcgcaacctttcggttccaccctgatgtgcctgggcagccgcgttttccggcaaaattgcgcatagataccctcacagcacactcaattattatagcgcatatgagctctggttacaagggaaaattccgtaaaatctcggcaattctttcacgctttccggccaaatttgccttttcaccagccctgcggctcttctccctctactggacggcacaccgcggcaaacgtcagggcgcgcgcctcagcggcatgggctttcagcaaggcttccgcgcaggcttctaacgtcgcgcccgtggtgcgcacatcgtcaatcaacaaaagccgcaggccccttgcatcggttcgcgcgcgaaacgcgccccgcaaattctcccggcgttccttgcccttcaaccgggcctgctgcggcgtttcccgggtgcgctccaacaaatccagcgcaggcaaccccgtggcttccgccaacgccttagccagcaaatcggcctggttatatcccctggacgccaagcgctttgccggcatgggcaccggtaccaacgcatgcacttcttccagccagtcctcccgcagcaatagcccatacaattcctctgccatccaatccgccatgcaggtaacggcgcggtatttgaaaccttgcacaacgccgcgcaccgggccctgatagtaaaaagcaaatcgggaataggcgacgtgcggcattctatcgcagacgcacttggcttccaccggagtgccgcagcccaagcagcgctggctttccggcgcgcgcagttcttccaaccgccgcgcgcatggcgcgcacaagtattcccgatccgccccgctcacatcgccgcatccctggcaattgacctgcttgggccacaccaattccagcgcggcgcgcccgatattccccagcgtttgccgcaaatcccgcatctttcttcctccacgctcggcataaaaaaggaaccgcctgcaagaagcggttcccccattgtttcgcttagcctagaaccttggtcacaacgccagagcccaccgtgcggccgccttcacgaatggcga

SEQ ID NO: 3126 - DNA, 4197 bp, Unknown
  16S sequences of unknown bacteria
gggagatcctgcgcgaatgtatgagccgcggctacgaaggcgttgccgccgacttcggcggttccaccacgccagaccgcatggtttttctggaagaagcagcaaagctgctgcaccgcaacagcaaaaagcttttcctctctgccgcttacggccggcgaatccccacggcctatgtgctggtgaacaccgctatctccggcggcacgctgcgcaccatgctggtggacgcatgcaacgcctttggccggggccgcgttgcgctggacatcgagcggctgcgcatggatttcctgctgccctcccctaccggcgaaggaacgccgctgacgaaagaatcctttgacgctctgtatcaggatctgtctcccagcgtcttcttttctcatgagttgtgcgccaagtattttacataccaacgcgacgggcgcgcgcattttgttctttttgacgacgccgataccatccgcttcaaactcaaactcgcccaatccctggatctgcgctgggcgtttctgctctgctccgaggtagaagatattctgccgcagctgcagcaataatgcaaatatgaaaatgccctgtacggctatcccgtacagggcattttaatagaacaaaattaatagtatctcttgtttctattcttgcgagcagcctcagactttttacgacgcttaacgctggggctttcataacactcgcgtttacgaacctcagccagcacgccggactttgcgcagctgcgcttaaagcgcttcaaagcgttttccagagattcgccttccttgacgcggatttcagacattgttttccctccctccaaggtgccgcccaatacggcacttaagggccattcgtatggctttaacagtagtattatacaagtaccttatatttttgtcaagtaatttgcaaaatttcagtgtaatttactttgcaatcaagttgatcaaccggttctttacatagatcaccttgaccaggtttttgccctcaatggctctggccactttggcgtcggcctgagcggcaacagcaaccgtttcctcttcgctgtccataggcacttggatcgttcccttcattttgccgcatacctgcacggcaatggtgacttccgcatccatggtcttgctctcgtcgtaggcgggccaactctgggcacaggccataccggcgtttgcaaaaccgagattctcccacatctcttccacaatatgaggcgcaaagggcgagagcatcagcagcagggctttcagatcagccttgttgacgccgttggcataaaaatcattgaccagcgccatcagagcagcgatagcagtgttaaacttcatcgcctcgatatcgtcggacacctttttgatggccttgtggatcgccgattcatttttcgcgctgtaggtttcgccctcggccacatcgccctcatgcagattccatacacggtcgaggaaccgcttgcagcccttcaccgcattgtcgctccaggcagcggccttttcaaagtcaccgatgaacatgatatacatgcgcatggtatcggcgccatactgtgccaccacatcgttggggttgaccacattgccgcgggatttggacattttttcgccgccctcgcccaggatcatgccgtggctggtgcgtttgtgatacggttctttggtcggtaccacaccgagatcatagaggaatttgtgccagaaacgggaataaagcagatggagcgtggtgtgttccatgccgccgttgtaccaatccacgggagaccagtactgcagcgcttccttggaagccagcgcctgatcgttgtggggatccatataccgcaggaaataccaactggatcccgcccactgcggcatggtatcggtttcacgccgggcttttccgccgcagcaggggcaggtggtattgacccagtcggtcattttggaaaggggactttcaccgtcgtcagtgggttcgtaactctccacatccggcagcaccagcggaagctggtcttcgggcacgcactgccagccgcacttgtcgcaccagatcatggggatcggctcaccccagtagcgctgacgggagaatacccagtcacgcagtttgaaattcgttttcggatggccgattccctgttccgtgacccactttttcatggcggggatcgcttctttcaccgtcatgccgttgagaaaatcagagttgaccatgataccggtatcgtctttcaggacgaaggcttccttcatcacatcgccgccttggacaacctcgacaatcggcaggccgaacttggtggcaaattcccagtcgcgctggtcgtggccaggcacgcccatcacgatgccagtgccatagcccatgagcacatagtccgaaataaagagcgggatatgcgctccggtaacgggatgcaccgcttcgatccccttgaggcgcacaccggttttgtccttgctcagttcactgcgctcaaaatcgctcttgcgggcggcttcagcctgataagcctccacctcatcccagttttcgatctgatccttccacgctttcaaatactcatgctccggagacatgaccatataggtcacgccgaagagagtatcgcagcgggttgtgtacacggtgagcttatcgccgttggtggctgtgaaatccacctcggtcccttcgctgcggccgatccagttgcgctgctgtatcttcacacgattgatgaaatccagatcgtccagatcgtcgatcagacggtcggcatatttggtaatgcgcagcatccactgggacttctccttgcggatgaccgggctgccgcagcgctcacacacaccttccaccacttcttcgttggccagaacgcatttacagctggtgcaccagttgacgggcatggtagctttataggccaggccgtgcttgtaaagctgcaggaaaatccactgggtccacttgtagtagctggggtcggtggtgttcaccacacggtcccaatcgaaggaatagcccagcatgtgcagctgcttggaaaagttctcaatattgtcgtgggtcactttggccggatggatgtggtttttgatcgcataattctccgtaggcagaccgaacgcatcgtagccgatggggaacaaaacattgtaaccatccatccgcttcttgcgggccaccacatccatggcggtatacggccgggcatggcccacatgcaggccctgtcccgacggataggggaattccaccagcgcataaaacttcggcttatcgctgtggttcgatgcggcgtaagttttttcttccagccactttttctgccactttttttcgatgttggtaaactcgtacttcaaaattgatcacactttccgtttttatggtatccgctttcccatgaaagcagaaaatttcaaacagcttttttattataccgggaacaggtatgatttgcaaggcttttgcgtctcttttctgtttttatcccgctttcaagcgcacctttgcaaaaagggcggaagcgtaccaaacgctcccgccctttatcaattgcttcagtcctgtgtcacaataccggaaatatcgatctcttccgcgtcgctccacaaacgttccaggtcgtaaaactcccgcgcttcgggcgaaaagatgtgaacgaccacacagccataatcgctgagcacccaggtaccttcgcggtgtccctcaatgtggtcgggcatctccccggcatttttcatcgcttcctccaccgattccgtcaaggccttgatttgggtgttggatgtaccggaacagatgacgaaatagtccgccagcgttgtcacatcggtggttttcagcatgcggatttcttttgcgcggcgcgcgtccagcgctttgaccgcaacttgagccaattcataaggtgtcataccattctcctctcaatttatatgttattgtcatgccgcagttcatgcagctgcattgcttccttccggcggcaagggattgcctgtaccgtcgctccctccagtgtcggtattaccactgttatcgctgctaccgccttccccggaaccggtgctgccgctgttgtcgccgctgccgccttctccggtgccggtattgccgctgttgtcgccgctgccgccttctccggtgccggtattgccgccgttgtcgccgctgccgccttctccggtaccggtgttgccgctgttg

SEQ ID NO: 3127 - DNA, 32759 bp, Unknown
  16S sequences of unknown bacteria
tttttaactgaaaaagccagacctactttgtagatctgactttttcagtgcccttgaaatatcaagggttttcaggatttgtgctttttagtcgcacagttatggcgcgctgaaagggactcgaacccccgaccctctgcttagaaggcagatgctctatccagctgagctatcagcgcaggttgtgtttttcacaacgaaaattattataacacatgttgcattaataatcaaggtttttttgccgtgttttaattttttttgcgtttaaacggtctttccgcaattttaggcggcaaaataagcttttcaaaccgaagctcaaaaagcccggaagaaactccgggctttttatcggggaaatagttataaaaccgatttcaaaatcaattgcaaatcgtaagctctgtatccttatcaaaaaggtgaatcttagcggtttcaaatgcaattgtaatcttatcgccggggcgagcggtgttagtcgggctaacgcgagcattaatcgactgaccctcacagttcatatagaggtaggtctcggcacccataagctcggtaacctcaacatcggcctctaccaagccgtccttatggatagcgatgaggtcttcctcgttgtgaacattctcgggacggatacccataataacttccttgccggcataagcctcaaggcagttatccttattctttgaagccggaagcttaattttatacttaacaccggcgcgggtctttgtatcctcagagccgaactctacgagataatcgtcaccctctttaagaagcttggactcgataaagttcatctgcggagaaccgataaatccggcaacgaaaaggttgcagggatagagataaaggttattcggggtatcaacctgctgaataagaccgctcttcataacaacgatgcgggtacccattgtcatagcctctgtctggtcgtgggtaacataaatgaaggttgttcccaaacgctgatggagcttcgaaatttcggtacgcatctgtgcgcggagcttagcgtccaagttggaaagcggttcgtcaagaaggaataccttcggctcacggactatagcacgacccaaggcaacacgctgacgctgaccgccggacaaagccttcggcttacgctcgagcaggtgtgaaatatcaagaatgcgggctgcctcttcaacgcggcgcttaatctcatccttcggagttttgcgaagcttaagaccgaaagccatgttgtcgaaaacagtcatatgcggataaagtgcatagttctggaaaaccatcgcgatatcgcgatccttaggagcaacatcattaacaagcttgtcaccgatgtagatctcaccgtcggaaatttcctcaagacctgctaccattctgagggtagtggacttaccgcaacctgaaggaccaacgagaattataaactctttatccttaatctccaggttaaaatccgaaacagccgtaacgccgcccgggtatcttttgtatacgttacgcaaagacaaacttgccatattgcagcctcctaaaaaatttgcttgagtttactttgttattataccaaaacgcctttaaaattgctatgcaaaatatatccaatgttaaaagaaatgttttgtttaatatgcatattagggcgttatccgtcggaaaatatgctttcgagagcttccgaatcggtctccgagcaggcgccctgcggcaggtcttcgggcaaatgaaaattgccgacagccgtcctttcaagcgcgtttacgccgagtcccacagtgccgaacattcgctttatttggtggaattttccctcgcagattttaatttccgccgtatttttatccacgcgccttaaaaacgctcttcggcattttgttccgtccgccaaaactattccgtttaaaaatttttcgggcatatccggagttatttcaccatccaaaacggcaatgtaggtcttaaaaatttcctttttcggggacagcactctgtgtgcaaaatcgccgtcgtcggttataataagcagcccggtagtgtccttatcgagtcttcccaccgggaacagcccgttccgccgtaatttttccggtattatgtcgataaccgtcggctgccgcttatcatcgctcgccgagagcacgccgcgcggcttattcattattatgtaaatatgctttttatagcttaatgcctgtccgtcaaaggtgaccgaatcggcattttcgtcgattttaaaatcagcagctctgaccgtcgccccgtataccgctgccctgccccttaaaatggcggcgcgggcgtccttacgagagatattaagctgtgaagaaataaatttatcaagtctcaattttctttacactctcacttaaaagcggcagcataaagccgtcaagtgcggtcgatgaaatatcgccgccgacaatgcagccgtctaccactataagattcactgccgtgcccggtgcgtccgccaaccgatatgtataaacaagcgcttccctgccgcgatacggttcaagatcaagtccggcctttttctgcagcaaattataattctcataaacgcttccgaagcttttcggaattaccgttttcttaaaggaaaccgcggtttcctctacattgcagccgaggctgttcatataatccacccgctcggcgttcgtagctccgccgatatcgccgcccgaaagcgccgtgacacggctcaaaaccgcaagcgccgcaatgagcgcaagcaaaaccgccgcaagacttctttttgaaaaggttataaaaagcttcatatccgttccaccccgtaaataatatgcggggtacggcgtttatattcgctcaataaggcaaacggcatgcgacgctatgccctcaagactgcctgtaaaacccaagccctcctcggttgtagctttaacattaacgcagtcgggttcaatgttgcagtcagccgcaatatttttcaccatttcgggaataaagactgccagctttggcttctgcgctatgaccgtagcgtcgatattgaccgccttaaagcccttttcccgcagcagttctgcggttttttttagcagtatacggctgtcaatattgaggaatgccgggtcggtatcggggaagtgcctgcctatatcccccagtgccgcagcaccgagcaaagcgtcacaaacggcgtgcagcagcacatccgcatccgaatgccccaaaagtcccttttcaaatggtatttccgccccaccgataacaagccgcctgttttccgcaaagcggtggacatcgtagccgtgacctattctcattctttttcatcctttaaaacaaaatattccgcaagcgctatgtcctcgggagttgtcacctttatgttttcatagctgcccggcacggtaaagggcttatgccccgccgcttccataatcgacatatcatcggtaaacctgcctaaatcccccgcgttttcgagcgccgcgcggtaatccgatacattcacgccctgcggggtctgcacggcgacgagcgtatttctgtcgggcgttgacagcacgtttccgttttcgtcaacctgctttactgtgtctttcagcttgacggcgcaggtcacggcattatgcgtaccgagggcgaatataacactgcatatgatctcatccgtcacaaacggccgcgcgccgtcgtggataagcacggtttcggcgttttcgggcaggcgctccaatccgtttttaaccgattgctggcggttttccccgccgcacacaatatcggaaagctttccgatatgatacctatcggctaactgctgcatactgaaaacatcgtcgggttttacaacaagaattatatttgaaattttgccgcacctttcaaagcgcataagagttctgattattaaaggaacgccgcaaagcggtgcggtttgcttgtttatgccgttcatacgggttgacgaaccggctgccaccactattacgggcacgccgccgtctgtcggtgattcttcaattttatattcaagcttaaattccgttttgagcatatactaacctctgtctttattaaaaaagctcccgatatcagggagcttttcagtcttcagacatttaaattcggaattcgaaataaagaattacccatattgaaattccgatttacgaattccgctttaaaaattattccttttcgtccccgtcggtatcagactcgtcaccgtggcagcagccgcaatcgcagccgtcaaaatcgaattcgagttctgttccgcagttcgggcaggtaattccgtcctcgctgagcatatcctcgtcaagatatacggtatcgtggcaggcagggcactctatttcataaagctcctcgtcatcgtcacagcagtcgcagtcatcatcgcagcaatcacaatcgtcatcgccgtaaataatgtcttcaacattggaaagatcctcgtcaaccgcgtcaagctgttccataagctcatcgcagccgtcctctatttcgcatatttcatcggtgatatcactcaaaacatcgataacagcggcaaggattttgccctcttttgtgctctcgtcgagagaaagaccctcggcaagacccttaatataagctaccttctcacagatatccattttacaaacctccgtttttaaattatgcgcgctccatatactcgcctgtgcgggtatcgattcttatcatatcgccctcattaataaagagcggaacgcgaatttcggcgcctgtttcaagcgttgcgggtttggtggcgtttgtagcggtatcgcccttgaaaccgggatcggtggcagatacctgaagctcaacgaatgtgggcggctcaacaccgaagaccttacccttataggaaagaatcttgcagaccatgttttcctttacaaacttgaagttgtcgcccagttcgctgccgtttatcggaacaagctcatagctctcctgatccataaagtagtaaagatcgccgtcggaataagaatactccatatcctttctctcaacaaaagcggttgggaattttgcggtagggttatagctcttttcaacaacagatccggtaataacattcttaacctttgttcttacgaacgcggcgcccttacccggcttaacatgctgaaattcaattacctgaagaacgttgccgtcttcctcaaaggttactccgtttctgaaatctccggcactaatcatattttttaattcctccaaaaagttaaatcatattaaaattataaagcttttcggagcgtttgtcaagtttttacttctttttctcgtcgtcatccgtattttcatcgcaatcggtctttataatatccttattaaagccctgtgcgacggtcggatacatattttcggtctctgcggtggactgtatattatatgtgccgtaacggttcaccatatcgaatgcggtttcgggcattccggtcacgggaacggacgacacatcgatgaccggctcgagtctttccttatttttgtttttgtttttatttttcatatttttcaccccggattattatgtgcgctttgcatattttatagtcgcgcgtatatataaaaaatccgaaagtcccgttaacggcatatgcggtgggtaataattctcagtctgtcgataaactcggaaatttgtttaggttgatttttctgccccagcagcaatgatacatattttacatcattacgaccaccctttataaatgaaataaatataccgataatatgcttcggactgcgtatatccgagcctcgggtcttgattttcaagggataatatggtatactgtcactgcagtgcggcagtatacccggaggtgcgatatggcgcaatttaccaaaaaggcaattttagactcgtttgtagagcttatttcggaacgcccgtttgataaaattacagttaaagacattgttacccgctgcggggtaaaccgcaatacattttattattattttgaggatgtatatgcgctggttgacgaacttttccaggtggagacacaaaacattctaggcagcaatgccgattacgagacatggcaggaagcctttttaaaggccattgattttgtgcataacaaccgccgcgcaatatatcatctttataattcaatcagccgcgagcaggttgaaacctatcttaataaggttacatacaacaatatacttatattcattaaaaaattggttgccgatttatccccaaatgaaaccgatgttgagcttgtagcctcgttctattcccatgcgcttgtaggcatgacgcttgagtggttaagcagcggtatgaaaggcgacccgcacgattttgttataagaataagcgagcttttggacggcaccgtgcgctactgctttttaaaaaatacagacaaacaggtgtaaatgtctgaaaatgcgacactttaaggcttatgtgtgaaattcgcacataagcctttttatgtttattggaaacggaaattattatgtatataatatattgcgttgagaaaatgaagggaggaaaaaacaatgaaaaccattaaacaggcaaaatggtgttatataatctgttctgtgctgcttatagccgccggcatttatataatgataaaaccgtatgcatcggcaattattttttgcagggtcataggtgccgtgtcgcttttctacggcatttcaaaaatactcggttatttttcacacgacctttacaaccttgcctttcagtttgatttggcgctcggagttttcacacttatcttcggtttgatacttctgctgcgctctgcaagggtcgtcgcctttatgccggcaatactcggcgtgtttgttttggtggacggcgtgttcaagctgcaaacggcggttgacgcaaagcgcttcgggctttcaaactggtggctgatacttttaggctcgcttatctgcgcgcttttcggactgctgcttataatcgacccgttcagcggcaacagcgtgcttatgacctttgtgggtctgtcgctcgcaatcgacgggctgcaaaatttatttaacgcgttttacaccgttaaaatactgaaaaaccaatgaaagctgggagataaatgataaaattcggaaaaggcgtggtgaagcaccgcgtgcttattctgataatcgcgatagcactaatggtgccgtcggttttcggaatacttaaaacgcgtatcaattacgatatgctgacctacctgcccgacgacattgaaaccatgaaagggcaaaatatattgcttgacgatttcggcaagggcgcgttctcatttataatcgttgacggtatggaggataagcaggtatccgctttacgcgaaaagatcgaaaaggtagacaatgttgacagcgctatctggtacgacagcgttatggatttatccgtaccgaaggaaatgctgcccgatgatatttacaatgcctttaattcaggcgattcgaccataatagcggtcttctttaaaacctccacctcggcggacgaaacaatggacgccattaaagaggtaagaaaaattgccgataaaaactgctatgtaaccggcatgtcggcggttgttaccgaccttaaggacctgtgcgagcacgaagagccgatatatgtaggtattgcggttttgctttgcacggttacaatgatgatattcatggataactggatgatcccgtttttgttccttgcgaatatcggtatggcgattgtggtaaacctcggttcaaactactttatgggcgagatttcatatgtgacaaaggcgctggcggctgtgcttcagttagccgtcacaatggactactcaatattcctttggcacagctacgaggagcaaaaggagcgctactcgggcgataagcacagagcaatggcgcacgcaattaaggcgacaattacctcggttgtcggcagctctataaccaccgtcgcaggatttatagcgctttgctttatgagctacacgctgggccgcgacctcggtatagtaatggcaaagggcgttttgttcgggcttatttcctgcgtaaccgttctcccctctttaatacttgtatgcgataagctgcttgaaaaaacaaagcacagggcgcttattccacctatgaacaggcttacaagctttgtagttaagcgctcgtggatattccttatagtatttttgttgcttgtaggtcctgctttctggtgctacaccaaggcaaacagcgaggtttattacaatatgaccgaaacactgcctaagaccatggaatgttctgttgcaaataccaagcttgaagaagagttcaacgtaggttcaacgcatatggtgcttatttcggctgataccgacggcaagacaatacgcgagatgtcaagcgaaatggaaaagacagacggcgttaagttcgtattggggctcgaatcggtagtgggcagcagaatacccgatgaaataattcccgacgaggcaaagtccacacttgaaagcgaaaattggaagttaatggttataaattcagagtacgccaccgcttccgacgaagtaaacgagcagataacaaaacttaacgacatacttaaaaagtacgataaaaacggtatgctcataggcgaggcgccctgcaccaaggatatgatagatattaccgaccacgatttcaaggtggttgacgcaatttcaatagtggcgatattcattataatcctgcttgttttaaagagcttctccctccctataattttggtttcggtaatcgagcttgcaatattcataaatctcggcttctgccacctgctcggcacatcaatgccgtttatagcgcctatatgcataagcacaattcagttaggctcaacggtcgactacgcaatacttatgaccacgcgttacaagagagagcggtccttgggcggagacaagaaaacatcggtcagcatagcgcttaagacctctatcccctcggttgtggtaagtgcgctcggcttctttgcggcaaccttcggcgtagggctttactccgacgttgatattatcagctcaatatgcaacctgatggcgcgcggcgctgtgatcagtatgcttgcggtaatattcatactgcccgcaatgtttatgctgtttgataaggtcatttgcaatacaagtataggctttaagcctaaaaaacaaacggaggctaaatgaaatgaaaattgttaagaacgatttaataaagcttattgcggttgccgctgccggcgttattgccggtacgggcgttaccgcggcggctataaatgccgcaagcaataaaaaggataccgcaagcacctctacttccgtctcatccgaaagcgataaaaccgatacaaagaccgcaaaggatgaaaccgtttatgtgcttgcaaatgccgacggctcggttaaaaagataattgtaagcgattggattaaaaacgggcttaatgagaaatccttaaaggataaaaccgatttggaggatgtcaagaatgtcaagggcgatgaatcctatgtaatggataccgacaatatgcgcgtatggaacgccgacggagccgatatttattaccagggtacaataagcaaggagctgcccgttgatttaaaggtaagctataaattagacggcaagaccgtttccgccgatgaaattgcgggaaagagcggcaaggctacaatccgctttgactacacaaacaagcagtacagcgaattaaacataggcggcaaaaccgaaaagatttatgtaccctttgcaatgcttacaggcttaatgcttgataacgatgttttctcaaacgtatcggttacaaacggcaaaatcataaacgacggcgaccgtacaatagttgcgggctttgcactcccgggtttgcaggaaaaccttaatttaagcaaggataaatttgaaattcccgattacattgaagtaacggcagatgttaaaaactttgcacttaccaccaccctcacccttgcgacaaacagcctctttaatgaatttgatacttcaaagcttaactccgccgatgatttacaggcacagttaaacgagcttacaagaggtatgacaaagcttattaacggctcatcggagctgtataacgggcttactactctgctttcaaagtcaaaagagttagttgcgggtattgataaattatcagcaggcacagcagagctttcaagcggcgccgcagcccttaacgcagggcttaacaccttggtttcaaacaacggcgatttaacatcaggcgctaaacaggtatttgataccctgcttgcaaccgttacaaagcaattgaacgagggcggcatacaaaactttgacgcactcacgacagataactacaagacagtattaaacggattaaccaaagacccaatgaaatatttaagcgccgctaaaaaagccgaggtgcttaaaaccgccgaaacggcagttgacgcagagcttgaaaaggcaaaggttcccgcagaacattacacccctgttaaggtaatgcttttcgaccgcttaagcaatggcaagaccatggaggcggcaatgaaagaaataaacgaactgctcacccccgcggtaacggttgaaacaatatccaaaaccgtagaagcggacgaaaccgtttacaatatgcttaaagcaagcaaaggcgaagaaaccgcagcgcttatagccaaggtttgcaatgcattaagccggcaaagcggcggtaaggctacgcccgttcagattttgcaaagcggaaaagcaaccgagcttataacggcagcgcaagcgggtcaggcggcattacaggcagctgcagccgataaaaacgcagcgaccaagattaccgcgctttacaccacacttgccacacctaccgtaaccgctactgttaaaacctcaattgatacggctgtcgcctcgcttgacagctacaataccttctatcagggcgtgcttgactacaccgcaggcgtttcggcggcagccgacggcagcgccaaggtaaacgcaggcgccaagcagctgaaggacggcgcggcagagcttaaagcgggcgcatcacagctggtacccggcgttgaaaagctctccgacggctcaaagcagttagccgacggaataaaagagcttaacgataaaggcataagcaagttaacgggtcttgcgggcgacgatctgcagaaccttgtagacagagtaaaggcaactgttgatgtttccaagaattataaatccttcgccggaattgcagacggtacagacggcagcgtcaagttcatctacaaaaccgacgaggtaaaagcgaaataaacaatcaatatacgaaaaatcccgtcacataattcgcggcgggattttttcggcatataattattcggtctgtcactaaaccaaaaaatttgtttttgcagcgttaccgccgcatattatcatttctctgtaaagcagcatgctcgacagattaaagcataatcgaccgataagcacagtcaagccaaacaatccgtgctgcattccgcattgctgcgttgaggaaatttttattttcacaaagaatgaaaacaggaatatacattagattttagacggtaaataagatatcgaaatgcgccttcagcatatgatattgatttctaattagctttagcttgtaacaacccttccgtcagccatacggctgccacctccccttgcacaggggaggcagaggcttacgcagaccaacggctcccggtgtttaggctgcgggtggccggcggacgcctctgcgaagcagaaataccgaccgaggcggctgagggattattacatactcttccgtattattttttaataatcggcgatatgcgcttatacaccgcgaagcaaacggcagtatctatcatgcccttaacaaaggtaaacggcaggttgaagatcagcagcgatttgataagcgtatcagacgcaggcaggattgcctgatacatcccgataatggcgttcatcggcatattgtaaagcaccacatatgcgggatagaccacaaaataattagtaacaacacttattgccgccattgcaagcgcaccgacagccgccccgaaaaacgcgctttcccgtgttttttttcgcctgtaaaaaattccggcaacgcccacaaacaccgcgcccaaaataaagttggaaagctctcctacgcctgcagagccggtaaacggcagatgcgccaggtttttaatcaggcagactaaaattccgtactgcgggccgaaggcgtatgccgttataattgcgggtatttcggagaaatccagcttgataaacggcggaataataaacggcagcggaaattcaagcagcatgagcgcaaagcccagcgctcccattatgccgctcacggcgatacctcttaaccattgcttttttttcataatatcatttcctttcttttcaggggaaaagaaaaacccgcgtttaaaacgcgggcgcaaaaatgcatataatacatttcttctttcatccggactgtaccgtcggctcaggaatttcacctgatcagccaaaaaggctcgcgggctttaccgccggtggggaatttcaccccgccctgaagattatacttatattatatacctgttttcgctgttgtcaacacttattttttaagagaatccctaatctcacgaagcagcaatacttcttcgctcggttctgcgggcttttcctcttccttaacctcttcctttttgcgcttaaggctgttcatcgccttaataacaaagaatataacaagcgaaactataaggaaattaataaccgcctgtataaacttaccgtagcatatttccgcatccttaacgccttcaattgccgacggaattatgaccttaagatccgaaaaatcaataccgcccataataagacctatcagcggggttatcatatcattcacgagtgaagtgacgattgcggtgaacgcgctgcccattacaacaccgaccgcaaggtctataacgtttccgcgtgaaataaactccttaaactcacctattaagccttttttgcttttgattccctcaacaatatcgatttttttcttactcataatttatcgctccctgtttttaaaatacataaacaactgacattttatcattccgttatacagcttacggcgtttatccgcttctctgccgaagaaacgctcaaattcatcgtgcgggcttattatataatactttctgccgcagccttccttaaagcgctgacccatcacggcatataattcctctgccgccttaacatcaagcagtctttcgccgtagggcgggttggtaataaccaagcacctttcatcgggtacggtaaaatcgcggacatcgccgaccgtcgccctaacatactttttcatgcccgctttttcagcgttttcgtttgtaagcgctacggcgttcgggtcggtatcaaacccctgcgccctgaactctatattatgtacaataagatcctgcgcgcgcattctttcctcgcgccagatattatcgggaataaacccgaagcgctctgcagaaaagaagcgcctgagtccgggggctgtgttcgtagccttcaatgccgcttcaataagcagcgttccgctgccgcagaacgggtcgaacataagcgtatcggggtatatcctcgcaagatcgcacattgcggcgcccagcgtttccttgagcggtgcgtcattcgattttcttctgtagccacgcttatgcagtccctcgcccgaggtatcaatcataagcgaaacaacatttttatgaataaagaaacgaacgcggtattccgcgccggtctcttcaaaatgcgatatatgatatttctgcttgagtctttcaacaatagcctttttaactatcgactggcagtccggtatgctgaagagtgcggaatcaatactcctgccgtttacgggaaacgcgtcgtattttccgatataatcctcccacggcagcgacttaacgccgtcaaaaagctctgtgaaggtcgcggccctgaattcgcccacatctatcataattctctctgcatatcgtgagcaaatgtttgcgcgcgcaagcatattaatactgcccgaaagctttaccctgccgttttcagcggtgacgctttcaaagcccatacggcggaattcatccgccgctatgctttccactccgaaaagacagggtgcaataagctttatattattcataaattatttacccgcgccgcgctttgtccgccttgcctcggggtttttgcgttttaaatcggaaaatttttcatcgcttgtctgcttgaagcggttcatcatttcttcaaagctctgcggctctgtttttttcggagtccaggtatacgagccgtcgattttcggggcagcggagctgcgcctttccctgcgttctctgggttcgtttgttctttcaggctcaagtgctcttttaatgctcagagaaacctttccgtcctccccaatgttcaaaaccttcattttaacgacatcgcctgttttaacgaattccttgatatcgttaacataggtgcgcgcaacctccgagatatgtaccatgccggttttgccctctccgagatccgcaaaaacgccgaagtttgtgattccggttatttttccctcaacaatttgtccgatagtcagctgcataaaagccaaaagtcctcctcaaaaaatttcagtttcccgatatgtctataaatatctgctcgtccggataaacatatcccaagcgctcgcgcgcagccttttctatgatcttggtttcggagccgtcctcaagcaatgccttgagctcctcaatatcatttttttcggcggaatacagcgctttaagttcgtttagctgctttgtgctgtcattccaggtcttccacagccccgcaaaggtaaacaccatataagcgcatacgccgagaatcataatccgcaggataatactcttattcccgcgctttttctttttcataatttcagcgctccaaacgatttaatatatattcaagtatacaacaaaccttacttctttttcaagcctttttttaaagtatttgcgatgaattttaaaaatttgctgatttttgacccgcatttatccgatacggagcaaattttcgcgcaggcagccgccgaaaggcgcgaaaatttaccgaatatcgttttgaaaacgcgtattataaaaagcaatatcggcaaaaaaaggcgtgataaggtaaagcggcatataaaaaagccgacgcccatgccgacaagcgcgaaggcgcgtatttccccgcccgccgcggcaagcaaaaacaggaagccgataacgccgcagataagcgaatacaaaatatcctcaaaaaacactgcgtaccgagttcggttaaagcttttgcggatcgcgcggaaaatatcgtaaataaggcagaaaacgcagccgaccgccaacgatgtcaaaaaggcgataagctgcgaagcattattaatttcccacatagctcacctgaaaacgcgggagaaaaatccgccgctccgctcttcggaggtatacactgcggcataaatttttccctcggcaaacagatcgccgcttgcggtatcgaaattcactatgtgaagccctgcgccctttacggtcagtctgccgagcgccgtttcgagcagcagcgtttcatcgtcaaacgaaataacatcctttacacccgaaagcgtgagcttttttctgtcttcgattattatattgtgattgctgcgaataacctcttccaccgtaaacacccctcaataaaatatattgggaacggcggcggcttattactccataacgcggtaaagccctgcggcatcgtcctttctgacggtttccgcaaccgaggtgacctctgccttaaaaagccttgccccgaaggatatttccaaaatatcccctaccttgacatcgtatgacgcgcgcgcgggcttgccgttgaccgaaaccctgcctgcgtcgcacgcttcgtttgcaacggtgcgccttttgattatccgcgatacctttaaatatttatcaagtctcatataaagcctctgtaaaacaacaaagctgtcgggtcaaggaaaaagcacaaaacacccctgaaagcctcaggccccctctgacgagggaggcatatttgtgccgattgtccttaacgcaacagctccggttttaagtattaaattattttgaaatagaatccttaagagccttgcccgccttgaataccgggttcttggaagcggcaatttcaatggtctgcttggtgcgcggattgataccggttcttgctgcgcgctcgcgtacctcaaatgtgccgaagcctaccagctgaaccttctcgccctttttgagctcgtcaacaactgtgtcaagaaaagcggaaagtgctttttcggcatccttctttgaaatagctgccttctcggcaattgatactaccaattctgttttgttcattttaagaacctccaataaaatttttcaacgatttctcgtttgaaatccgaatgatacaaacgaaaagcttgtactatatatttttaccatactttcagaaaaaaatcaatctattttcggcaaaattttgatttttctgtaaaaaaacataaaatcatctttttaaaagcctgttttcaacgaataattctatgttttctacaaaattcagccaatctttttcctttatccgattcgggaaaatcgctttcgtcaagcgttttcaggactgtgagcgccgcaaaatacacagctcccgcgcaaaaaacggcaatcaaggtcatgccgcgcgagctgcctgcggtcattacaagccgcgcgcatatcccgcaaagcgccgccgataaaagcggctttataaatacaccggaaacatttatcacagggcccgccgcccttatgagcgatataatatcaagcacaaaaataacaaaaaagcaggcggcagtgccgagggatgcgccgtttacatttatttgcggagccgagactgccgctatattgacagcaagctttactgccgttccgaccgcggtgttgaagagcaccgcattctgcctgccgagcgcctgcaatataccgccgagcggtgccaaaaagcccgcaaagagtgcggcaaagccgtaaatcgtaagcagccttccgcctatcgccgcagacgcctgcgtatcatataaaaggccggttattccgccgcctatcgccataaagccgcacgctgcgggaagagatattattgccgcagccttgagtgcggtatttatcccctttttaagcttctcaccgtttgaggaggcggctgcggcggtcaccgcaggaacagccccaatgccgattaccgatgtgattgccggaacaagattgaaaaccgtatacgccttgccgcgtatcccgtaaagcaaaacaggaaaaaccgaaagctcgggaagctcctcccacgaaaatgcgtcggcataatatgcgcgcagatccgtcccgccgtttataagaccttcaagaccgctttttaccgtaaatgcgtctatcatagaaggaatattgagcgtcagcgaggtcagcgctatcggcaaggtcacaacaagaatttttctgaaggcccgcgcggagctttgcggctcgggtgcggtacggagcattgcctctgttatgccgtcgcccttcaatttagcgtatacgcgcacataaagcgccgcgaaaagcgttcctgcggttatgcccgccatagccgccgcagcccctaaaaccgcgctgccggtcagccttacagttaaaaatgccgcgccgagacccaaaaaaagcttgcaaagtgcctctgtaagctctgaaacggcggtgggatacatattattaagtccctcataatacccgcgctctgccgataaaaggcaggaaaagagcaccgcaggcgctacgcaaaaaatcaccggtgcggtgtttccggttgcgtcggtcagtctcacaaacgggatgacgagcgccgcaaaaagcgccgtgccgattacaccggacaccgcaaataccagttttatcagtctgtatgacgcgcgtgcgtcacggtatcttcccttcgcaatatgctccgaaaccgtttttgccgccgccacgggcaaccctgccattgcaagagaataaatcggcaaaaacagatcgtatgctgaggaaaaatagccgaagccctcgtctccaaggcaatgcgccgacgacagcggaattttaaaaagcgcgcctataagctttacaagcactgcggacacaagcagcaccgccgtgccgtattgctgggtgcggcgcgcattatccgccgcggtcaaagccttgctgcggcgcgcgcgcattcaagaataaaatcggaaagcacggtttcgccggagctgttcatctcgcggtagcttgtcagcgcatccgcccccgcgtcgtccgatattctgcggacagaggcaaacggaattcccgcgaatgagcagacatatgcaacggcggctgtttccatatcacagcagacggcatcaaactcggtcttaagcttttcacggagttctacgtcgttcacaaagcagtcgcccgtcactgcggtgccggtaaccgctcccgataaaagtgagaggatcataccgttcagctgctcatcagcttcgtaaatataggtctgtcccggcttttcacaaaggcggtagccgattccgcttaaatcaaaatcgtgctccaaaaagcgtgtacacacgcagatatctcccctgcgaacacggcttattccgcccgaaagaccgtaattgagcattatctcgcagccttcatctgccaaatgcgcggctgcggctgcggcgttaaccttacctactccgcaatgcatggcataaatatccgcagatcccgatttaaaccgcagtattcgccttttcagaaattcactttccgaaaatttgccccttgtcacaaggtcggcaaggggcttgaattcctcttcatcggcaacaattatgccgatttttttatattctgacatatcccggcttattctttctcggttttttcttcggtatcgggttcggcagtgctttcaaaaaccagcttttcaccgcagaaattgcaataaaccgagcatttatcaatagaagcgccgcatttcgggcaaacgcgcttattctttatattgttaatctccctgcgcaattcgttgatttttgcgtttttctcatcaatcgcagcgaccagacgcgccgcctcttcgttttcgatatcgttatccttaagctccgaataataaaatctgcccagcgcttcaaaatcctttgtacgcttggcttcaagcgaagcaatatcaaacttttgcttttgcgttgttacgacctcgttggtttttttgcaggcaacatcaaaggcttcctttgcttttgttacggcatcatcgataaaatccatataaattacctcctgttaaaatcagaaaagcctactttattcagcttaagcaaattttatcacaccgccgccgatttttcaagtattatactgttttttttagaaataaacgcgcgtcctgcgggaacaatagcaatatataaattttgaaacgggtgatttaatttgaaaggaaccaatatagccgaaataagaggctttgagcttatggactcaagaagcacgccgacggtcggtgccgaggtgattttggaggacggaagccgtggctttgcaatatctccctcgggcgcttccacaggcgcgtatgaggcgcacgaaatgcgtgacggtgacgcgtcgcgttattcggggaagggcgttttaaaggcggtttcggctgtcaacgatatgatttgccctgcgcttcgcggatatcccgcagacaaccagcgtcttgccgaccgtgcaatgtgcgagcttgacggaacggaaaacaaaagccgcctcggcgcaaatgcgatattggcggtatcgttggcaacagcgaaggctgccgcggcacattacaaaatgccgctttacagatatctcggcggaataaacgcgcaggtgctgccgagaccgatgatgaacattttgaacggcggggcacacgcttcgaacaacattgatattcaggagtttatgataattccatttgacatttgctgcttttcagagggactgcgccgctgcagcgagatatacaaggcactcggctctattttaaaggaaaagggcaaatcgacgggcgtcggcgacgagggcggctttgcgcccgaccttgattcggacgaggcagcgatagagcttataacagcagcgatagaaaaggcgggctataccgccgaaaacaccaaaatagcccttgatgttgcttcaagcgaatggtattccggcggagaatatctgcttccgaaaagaaatgttaaaatgacagcggatgagcttatagaatattatgaaaaacttgcgcaaaaatacccgataatctccattgaagacggagccgccgaggaggattggaacggctggaaaaatcttaccgaacgcctcggcaagcgcatacagcttgtgggggacgatctttttgttacaaatatcaagcgctttaaaaaaggaatcgccgagggtgcgggcaattcgatactcgtaaagccgaaccagatcggaacactgagcgaaactatggatgtggttgaagcagcgcgcaaaaacggctatacagcggtaatctcccaccgctcgggcgaaaccgaggacactaccgttgcagaccttgcggttgcgcttaatgccggtcagatcaaaacaggagcgccctgccgcagtgaccgcgttgcaaagtacaaccgtctgctcataatagaaaatgagctgaagcagtgttgatttttcttccgttcgggcgctgtgtgtgttataatatgcacggtgatgttaatggaatacgaaatcaaacgctcatcgcgcaaaacggtcgcacttgaaattaccgaccgcgcaacgctgcttgtaagagcaccgcttaaaatgagcggacatgaaatcgaaaaattcgttttgaaatacagcgattggatagatgaaaagctcagaatcgcgcaaaagcgttcagagtgtgagcgggctttggttgaaagagaagaagagctgcgaaaaaaagccgaatacctattccccatgcttacggaaaggtattcggctgttatggggcttaaacccgcgtcggttaagataacatccgccaaaaggcgcttcggctcctgcagcggcaaaaacggcatttgcttttcgtggcggcttgcggcgtaccccctacccgcgatagaatatgtcgtggtgcacgaattggcgcatataaagcaccataatcacagcgcggcgttttataagcttatagagcagtatatgcccgattaccgcagccgcgttaagctattgaaaagcgttcctacagaagcataagcattgtgccgagaataaaaataagcagcccgaaaaacgcctttgccgaaagcttttccccgaacacaacatatgaaaatactaccgacaccgcaatgctcaatttatcgataggcgctaccgccgcggcagggccgtcccgcagggcggtataatagcacagccacgaagcgcccgtcgcaagccccgaaaggataagaaacacccttgtttttccgccgagcgaggtaatttttccgccggagcgtttattaaaaccataagccacgaaaaaagcagcactataaccgtgcgcaccgcggtagccgtgtccgaatcgctgcggcgtattccgcattttgcgagtatcgcggtgattcccgcaaaaaacgccgatccgaaggcataaagtatccacataattattttcctctgcaatccccgcagagtccgtacagcacgctgccgtcgcaccgcaaagcaaagccgtggcttttaagaagatgctcctttatatcctgcataaacgagcattcaaggtgcatcaccctgccgcagcgggtgcattttatatgtatatgctcatcacaattccgttctccgcctatgaatctgtaaaccgatttcttcgttttttcctcggttattttaagcaccagccgctccgagcacagcctgttgaggcagcggtaaacagtggcgggatcaaccgaaatgcccttcactcttaaataattgataatatccgcggcgctcgcggtattctccccgcggtcttcaagaaaatcggaaatatatttgcgcgccctggtggaatagctttgtctgtcaggcataaacatctgtcctttcgtgagtattataacgcaaaattcagaatatttcaataggtcttgatttttacggttcggtatattataatctaaaaaaacaaaataggaagtgttctcatggagcttaaaaacatttttgaaaacgaaaacgaaaagccgcttgacacaatacccgaagacggcggctacaccgcaattttccgcacgattgcctgtgtgggcgacagcctctcatcaggtgaatttgaggcggataacggaaacggcagcagctatcacgatatgtacgagtattcgtggggacagtttctggggcgtatgtgcggcagcagggtttacaatatgtcccgcggcggaatgactgctaaggaatactgcgaaagctttgccgaagcaaacggctactggaacccgaaatatgccgcgcagtgctatataatagcgcttggcgtaaacgacctttttggtcaaaagcaggagctaggcagcccggacgatattaccgccgaggataaaaagacctttgcccattactatgctgaaattatagaaaagtataaaaaaatacagccgcgcgcaaaatttttccttatggcaatgccaaacgagggcgaaaaggacggaaaccttgaaataaagaaaaatcacctcagcctgcttaatgcctttgccgaaaaatatgataacacatatgttttggatttatttaattacgcacctgagtataatgcgcagtttaaagaaaagttttatttgcgcggtcatatgaatccgcagggctatctgctcaccgcaaaaatgacggcggcttacatagattacattattcgccataatatgagggatttcaaggagaccggctttatcggcacggatcttcatgagtaaacgcataaaaacacataaataattaagaaaaaccggactgctgcatcattgcggcagtttttttataaaaaagttgaaaaaaaggcgaaacggtggtaaaataaccgttatacagagaaaaaaggcaggtgacggaaatgggaatgaagaaatggcttaccgcagagcttgacaaggcgctcgcaaaagagcttgccgaggagtgcggcgttgacccgattgttgcgctcatagcctcctcgcgcgggtatacagaccccgataagcttgaagagtttttagcggacgagccgtgcttttccgacccgtttctgtcagccgatatcgacaaggctgcggatattctgaacaaagccgcggaaagcggcgtgagaatcgccgttttcggtgattacgactgcgacggcgtatgctcctccgcaattatgtataactatcttaaaggccgcgggtgtgactgcgtctgttatattcccgaccgcatggacgagggctacgggatgaatattcccgcggtggaaaaattagcggcggacggcgttgggcttatcataaccgtggataacggaatttcctgcatcagggaagttgaaagagctaaagggctcggtatcggcgtaatcgtcaccgatcaccatttaccgggagaggtattgccgcctgcggacgctgtggtagacccgcacagagccgactgcccgtctgagtttaaggaaatttgcggtgcggaggttgtatttcggctgatatgcgtagccgagggcgcagagccggaggagctgctgtctgaatacgccgatattttaagtgttgccgtcaccgctgacgttatgccgctgaagggcgaaaaccgcagcattgttaaggatggaataaaaaagcttaaaagtgcgccgtctgcggggctttcggcaattatgagcgttgcgggaatcaaatgcggcgatatgaacgcctcccgaatagccttcggaatagcgccgagaataaacgcggcgggaaggctcggtaatgccgatattgcattcaggctcctcactacagataatgaatccgaagcgctcaggcttgcgaaaaggatagatgagcttaacacagagcgccgcgaaaccgaaaaggaaattttcgaaaaagcggcagagattatagaaaaagaaggtcttgcccaccgcagggtcatagtggtcagcggtaaaggctggcacccgggcgtcgtgggcatagcggcggcaaggataaccgagcgctacggcaagccatcggtcgtgatatccgaaaacggtgatgtatcatccggttctgcccgcagcattgagggctttgcgatttttgacgcaataaaatatgcttcctcgctgcttacaaaattcggcgggcacaagcaggcggcgggcgtaagccttaaaacggagaatatcgccgccttcagggaaaagataaatgaatacgccgaaggtatacccttcgttcccccgacattaaggcttgactgtcggctgaagccctccgcgctttctctcgatttggcagacgcggtaaagcagcttgagccgttcggtgcgggaaatccgacgcctgttttcggcgttttcggcgtcaccctgataagaatcacccccataggcggcggaaagcacctccgtctgctcttctcaaaggcggaaaacacctttcaggcgctgctcttcggcgtaacgcccgagcgtttctgctttaaggaaggtgatattttagacgcggcggtaaccgttgaaaccgatttttacggcggggaatacaatttatccgtcagaataaaggcgcttcgcatgagcggaactgatgatgaaaggcttttcagagaaatggataatttggagcttttcttatcggggaagcgatttaatataaacgatgtattgccatcaaggcaggaaacggggacggtatatcgcatgataggtgccttcggtacgaacgccgaacggataaaatatttatcgctcaaagacccgggatatgccaagtcggaaatatcgctcacggttttatcggagcttgggctcattgaaaaaaataaggacggcgttttgaaaacaaccggcaaaagaaacgagctttgcaattcgcctacatacaaaaagcttttggagggaggaacggcaaaatgaccgaggcacagcaaagagattacgacaggctgtataaacaaatgcaggatttcggcggaaagtacgatcaaaagcttataaaaaaggcttttgaatactgcgtgctgaagcatgacggtcagaagcggcagacaaacgaggattattatatacatccctttaatgtagcgcttataatcgtttccctcggaatggacagcgaatcaatagccgcggctctcctacacgatgtggtggaggataccgacgccacgattgatgacataaagcgcgagttcggcgacgaggttgcgctgctggttgacggcgttaccaaaataggcagactgaatttcaccaccaaggagcagcaacaggcggaaagccttaggaaaatgctcattgcgatgggtcaggatatacgcgtaataattataaagcttgcagaccgccttcacaatatgcgcactattgatgcgatgtccccgcagaagcagagggacaaatcggttgaaacgctggaaatttatgcgccgatagcgcacaggctcggtatcagacccgtcaaggaggagcttgaggatttggcgcttaagcacctcgatcccattgcctacaaggaaattgaagacctgctgatgttaagaaagcagcaccgcgagcagatattggaggaaataaaacagcgcatagaaaagcgacttcatgaagaaatgccgggcgtggaaatggcgtttcagggcagaataaagtcaatttacggaatataccgcaaaatgtatgttcagggcaaggactttgacgaaatatacgatatttacgccataagaataataaccgacacggtagccgactgctacaatatcctcggtatcatgcatgatatgttccgcccgatacccaacagattcaaggactatatttcaacgccgaagcccaatatgtaccagtcgctccatacaacggtcataagccgtgcgggaataccgtttgaaattcagatacgcaccttcgagatgcaccacaccgcagagttcggtatagcggcgcactggaagtataaggagggtattaccgataataatgccaaaatggagcggcggctcgagtggataaggcagatactcgattcgcaggcggcttccacagacgcttcagaccttgtacgcagtataaaggtcgatttatcgcaggaggatgttttcgcggttactccgagaggcgatgttataaatctgcccgtaggctctaccatagtggatttcgcctttgcaatacattcggcggtaggcattaaaatggtgggcgctaaagttgacggaaaaatagtacccataaaccacgaggtaaagaccggcgaggtaattgaaattttaaccaccaatcagccggggcacggacccagccgcgactggctcaatattgcggtgacctcacaggcaaaatcaaaaatccgctcgtggttcaaaaaggaaaaacgcgccgaaaacatcgccgcaggtaagctggatgttgagcgcgaattccgccgaaacggaatagatctgcccgaaaatgaaaacgcggagtttatagatgacattgcaaaacggcttaaattttcgggagcggacgagttctacgccgcaataggctacggcggaatactgctctcaaaaataatgccgcgaataaaagaggattacaacaagcgcaccgccgcacagaagccgcaggagatcgtcacagtacccgaaacacggcgcagcaaatcatccgaaggcgttgtggtggacggcatcgataattgccttataaagctttcaaagtgctgcactcccctgcccggcgatgagattataggttttattacccgcggtcacggcgtttcgattcacaagcgggactgcaacaatgtgcctgtgaatattgccgattctcccgagccggagcgctggattcccgcgcactgggacggcacccagtcggagaaatttatatctaccctgcagatttcggcaattgaccgcgaaggacttttaatagacgttatgaacgcggtacagaatatgcgcgttccggtgcacagcataagcgcgagacaaacaaagagcggcaactgcttggttataatgtcgctctcggctgaaagcgttgaacaccttaaaagcattatatcgcggctcgaaaagcttcagggcgttttcagcgtagaaaggataaatcagtaatgaaagcggtaattcagcgtgttaaaaacgcagatgtggcggtaaacggcgaaaccgtgggaaaatgcggtaatgggcttatggtgcttttcggtgccgaaacgaacgataccccggaggacgcggtgctgctcgcaaaaaaaacagcggccttgcgaatattctgtgatgaaaacggtaaaatgaaccgttcggtctgtgatataaacggcgaaatgctggtaatttcccagttcaccttatgcgccgatgttaagaagggcaaccgcccatcgttcacaggtgcgatggaaccgacaaaagcaaatgagctgtatttgctttactgtgaggaattgcgtaaaaacggcattaaaagcgttgaaacgggaattttcggcgcggatatgcaggtgtcattaataaacgacggacccgttacaattttgtttgataccgatatatggaggaaaaatggaaatcagagcaatacacctgggactgattaaaacaaactgttacctgatctcaacagataaggcggcagtggttatagaccccggctttaaaaccgaaataaccgcggattttttaaaggcgagcgagggcaaagcgcgaatgatacttataacccacgcacactttgaccacataggcggagcggaagccttaagaaacgaaacgggcgtggaaataggtataggcgagcttgacgcacccgcccttagagatgccgagcttaatctatcggataaatttcatgcgcatatagcccccttttctgccgaccgcacattttgcgacggcgaaaaattcagcatcggcgatattgattttgaggttattttaaccccgggtcacaccgtgggcggcgtttcctacctttcgggcgaaagccttttttcgggggatacgctttttgcgggtgccgtgggcagaaccgatatgccgggcggcagccttaaagcacttaaaaaatcgcttaaacgtctgatagccctgccaaatgaaaccaaggtctacccgggtcacggtgatttcactaccgtgggatatgaaaaagaaaacaatatgtttgtgtggtaaaaaatgaagctgtgtttaataggtcattcattcggctacgagcttgaaaagctgataagaatttttctgccgtttgaaaaaatcgaaatatgcgaaagcagggataattccgaccgcgccgccgtaaccgttttatcgtgtgaaaacggcgtaacgcgcctgtcggcggagcttattctcggcgaaaatacttataccgatgaaaaagcgcttggaaacggcgcggaaaattatgagaaagagtgcgaacggcttatagccgccgcactctataattgctttgttgcggcttcgggctatacaccgccgtggggaatacttaccggcgttcgcccggccaagcttttttcgcggctttgcaaggcggagggcgaagaatccgcagagcagtattttaaaaacgcgctgtatgtaaagccttcaaaaacagagctttgcaaaaaaaccgttgcggcggagaaaagaataaccgatctctccggcaaaagctcctacagcctttatatttcaatcccgttttgcccgacaagatgtgcctactgctcctttgtttcgcactcggtggagcaggcgcgcaggcttattccgcagtatatagaccttttatgcgaggaattaaggcagacggcagaaatagcaaaaaagctttctttaaggcttgaaacgatttatataggcggcggaacgcccacctccgtaaccgataagcagcttgaagaaataatgtcggcagtggcggagaatttccccgtacagagcgcggcggaatacacggtagaggcgggcagacccgacaccgtaacaagagaaaagcttgaagtcataaaacgaatgggcgcttcaagaatcagcataaacccacaaaccatgaacgacgatgtgcttaaaaacataggcagaaagcacaccgccgaggaaacggaagcggcgttcagacttgcaagggaatgcggctttaaaaacataaataccgaccttatagcgggcttgccgggggatacgccggagagctttaaaaatacaattgaccgcgttttggcgctatgccccgaaagcgttaccgttcattcgctttcgatgaagcgctcgtcaacgcttaacacatcggggatgttccccgaggcgcaaatgggcgcggcggctgccgaaatggtggaatttgcggaaaaaacgcttgaaaatgcgggaatttacccatactatatgtacaggcagagcaaaaccgtcgggaatcttgaaaatgtgggctatgcaaagccgggaacggaatgtctttacaacgtttatactatggacgagacccacacaattcttgcctgcggcgcgtctgccgtaacaaaaatgagagaaccgggcggaaataatattgaacgcattttcaactttaaatatccatatgaatatataagtcggttttccgaaataaaaaaacggaaggacggtattctgaaattctatgaaaagtaccctgcagacaataaatgatcttgcggaaaaaagtccgaaggaattagtcatgcgcgccgagcggcactatctgaacgaaatatccgcggcggctgataggatagctcaaaataaaagcataaaggttatcgctattgcaggtccgtcctcctcggggaagaccacaacagcgcatatgttgcgggaagcactcgcaaagcaaggcattaaaaccgatgttgtatctcttgacgatttttacctgccgcaggaaatgctgccgctgctgccggacggcacgcgggatatcgaatcggtaaacgcgcttgatattccgcttataaacaaatgctttaacgaggcgctgatgaccggcaaggcagcgcttccgaaatttgattttttaaagaaaataagaatcgaaaacgcgcatgagcttgatatttcgggcaacagcatcgtaatagccgagggtctgcacgctttgaatcccgttttgaccgaaataattccgcaggacagactttttaaggtgtatataagcgtgaaccgcagcattgaggacgaaaacggcaaggtattgcttacaagccgtcaaataaggctgacgagacgaattttgcgggacagaatattccgcagcacatcccccgcagagaccttaaagctttggaagggtgttaccgcaggcgaagaaaaatacctttactgctttaaaaatcgggccgatttaatgattaaaaccctccatatatacgagccatgcctttataaaagcgagctttccgctttaaaggaagagaccgctcaatgcgcggataacccgtattttatgaaaacgcttgaaagcattgatcgcttctgccctatcgacagctctctcataccgcaaaattcactgatacgcgaatttatcggcacagattcggaattataaaaagtttcgctttacttttttgaaaagctgtggtataatactctcaccgtctactgagctttgggcgtccgccccttttcggggagtcacttttgaccctttgcccggtttgcggatatgtgttaaaggagtgaaaaaaatgactaaagaactcaagcagcagatcatgaaggattatgccgttcatgagggggataccggttctccggaggtgcagattgctctgcttaccaccagaatcaacgagcttaacgctcacttaaaggctcaccccaaggatcgtcattcctatcgcggtcttctcaaaatggtaggtcacagaagaaacctgttggcttatctgcagaagaacgatattgaaagataccgtgctataatcaaaaggctcggcatccgtaagtaatgcgtacattaaaggcagaccgataaaaacttcggtctgccttattgtaaattaaaagcggagattttcgtgctttagcggtaaatcgggcgtccgagtctcatcgggctccggatttattgctaaccggaagtctcccgaaaaaaagaaaaggagattttaaaagtatgtttgaaaactacaaggtttacgaaaccacacttgccggcaggcccttaaagcttgaaaccggtatgatggcacagctcgcaaacgccgcggttatggcaacctacggcgaaacaaaggtgctttgcaccgttacggcttccgcaaagccgcgcgagggggtagatttcttcccgctttcggttgattacgaggaaaaaatgtactctgtgggcagactgcccggctcattcacacgtcgcgagggcagagccagcgaaaaggcgatactcgcttcccgctgcattgaccgaccgattcgtccgctcttcccgaaggatatgcgtaacgactgctcggttgtggcaaccgttatgtcggtcgaccccgattgctcgcccgaggttgcggcggcaataggcgtttctgcagccattgccatttcggatattccgtgggcaggccctatttccagcgtaaacgtcggcttgattgacggtgaaatagttattaaccccacccttgaacagcgcgcaaaatccgaccttaaccttaccgtttcttcaaccgaggacttggttgcaatgattgaggcgggcgctaacgaaatatcggacgagcttatgttcgactgcattatggcaggtcacgaagctaacaaagaggttgttaagtttatcaacggcattgttgaggaaatcggcaagccgaagtttgagtttgagtcaaacgaccccgatcccgaaatatttaaggaaattgaagatttctgcattgaggatgtaaaaaaagcgcttgataccgacgataaaacggtacgcgatgcggctttactgcctatatacaacgccgttcatgaaaagtttgatgaaaaattcgagggctgcgaaggtaagatagaagaaattatgtacctcgttcagaagcatgttgtaagagactggctcaaaaacgagaaaaagcgtgtcgacggcagaggtattgacgaaattcgtcccttaaacgcacagattgatctgctcccccgtgttcacggctcgggtatgttcacccgcggtcagacccaggtgctctcggttgctaccttagccccgataagcgaggctcagaagcttgacggtcttgacgaggaagtatcaaaaagatacattcatcactacaatttcccctcctactctgtaggcgaaacaaagccgtcccgtggtcccggcaggcgtgaaatcggtcacggcgcacttgctgaaaaagcgcttgttccggttattccgagcattgaggagttcccctacgc

SEQ ID NO: 3128 - DNA, 8523 bp, Unknown
  16S sequences of unknown bacteria
tcggaaagaccgttgacttcacagccggaggaaacgccgtaaccgtaaatacgtttgactccctcggcagactgtcgaatgtgtcagtccgaaacagaacggacggcgctctgcgtcagaacagcagctatgtctacgacgcgggcaaccgcatctcaacggtaatggaaaccgccgacacaggctctcccgaggtcgcgggaatgccggagagcatcgacggttacgacacggttttcgtcggatttccgatctggtggtatgttgcgccgacgatagtgaacacgttcctcgaggggcttgacctcaagggaaaggcggtagttcccttcgccacgtcgggcggaagcgggatgggcaagacgaacgaacgcctctgcccgagctgccccggagcgatcgaattacgtttattattttatgccgccggcaggcggcggaaaggagcttgtcatgagcaaaaaacttgtagcgtatttttcggcaagcggtgttaccgcgtctcttgcgcgcaatctcgcatcggcgatcggtgccgatctcttcgagatcaagccggacgttccgtacacgaaagccgatctcgactggacgaacaagaactcccgctcttcggttgagatgagcgatccgtcgtcccgtcccgcgatcgcggcgatgccggaggacatcgacggttacgacacggttttcgtcggatttccgatctggtggtatgttgcgccgacgatagtgaacacgttcctcgaggggcttgacctcaagggaaaggcggtagttcccttcgccacgtcgggcggaagcgggatgggcaagacgaacgaacgcctctgcccgagctgccccggcgcgaagctcgttgagggcaaggtatggaaagcctccgcgtcggctgacgatctcgccgcatgggcggagagcgtgggggaataatgagagataaccggggaaacccctttttaaaaaaaggggctttccccggaccccatcctcaaaaatttttgaactgaagagtattggtgtaggtctttctttcggaaggtatcgtatagttttcgctgtacttaacagaacgcccgcgggggcgtccccgctcaggggcttgggggtgaaacccccaacatataaaactcctacacggcattcgtaagaatgccgtgtttatttggtctcacgttggagtttgacgcgtcatcccccgcacatccgcgccgcatatgcccgataccgcaaactgccgcaggttctcacctgcggcagtttttcgcatgtattcgttttacggcatatcagaagttcacaaagccgaatacggaaaaatcgcatcccatattctccgcctgaacaaatcccctgaggcattttatcagatcgcacatgccgacgcggcactcctccatgaattcgctctgtccgtcggcgcttcctatgtattccgtacagttcagcggatatttgtccgagaacacggcggggtcgatatatccggtcgcatctctgaaaccttcgccgctcgacctgtaatatttcgatgcccaatactcatactttccgtcgtatccgcctctcatgcggaggtaaaagtttatgctttgagtctcgctcagcgggcagtggaggcaaaattccaccatattgctgttattccaataggagaccgaaaaatattcgccgctgtatccgccgtagagcgtggcgggctgctgatacatacagtaatcgccgttcaccgtgccctttttgattgcgaaatcccggcagtgggcgaacagatcgaatttttcctccggcggattcttcacggggggtgcggtggtaacgggcgaagttgcgggctccggcgcgggagttataacgggggcgggagtggttacgggaggagcggcggtcgtggtgccgtcgggggcggaagcgggtacggcgtcaccggaattcggggaagcttcgccgtcctgcgagatctccggatctggagtaccgtccgcggcggtggtatcggttccgttcgcggtatccgattcggcggaatcggaggtcacggcggcaggcagtgcctcggtatcggaagaggcacccggcagatcgggggcgtcctttttgtttccgccgccgaacagaacgatcatcagaatgacgccggcgataacggcggctgcggcaatcgccgtgacgaggatgagcgttttcttcttctttccgggatcggcattttcctcgtcggggtctgccggatttttctcggcagcgtccccggcgccgtccggtgcattatccgtccgatcgtcgggggcagagtcgttctcggcaggggaagcgccgtcggaatctgccaaaagggcatccgaagtaatgccgaaaatcttcgcaagagaaataacattttcgatggtgggctgtgtctgtccggtttcccaaaggctgacgctttgccttgagacatcgagtttttccgcaagttcgtcctgagacatgccgatttcttttcggtaccgttttatattgtcagataacattgctccgttttcctttgtttcctttgaatttttctgcattatatcacatttttcgcttgcaggcaatataatctgttttgaattttgtcaagcagcgcttgctttttcaaaaaaaattcgatttttcgggggaggacgagggagaacggaaaaagaaacgaccggggaaacccctttttaaaaaaaggggctttccccggaccccatgcttgcggggaacgatgcgggacctttttgaaaaaaggtccccgcacccccaaaaacttttgaactgaaaggtattggtgtgtgcccttctatcggaaggtatcgtataaattatcgctgtactttataggcacaggcttcacgttggagaaatgggcgttgcccatttctcgcggacacggtaagtgaacgtgcaagttccgcttcatgtcataccgtgtccttttggctgcgggcactgcccgcccgtgtcctattcgtcatcaccgaacatagagtcgtaatccgccatctcatcgacccatgaggcatcatacttgaccgagcttttcattttcgtgccgcatttcggacagacggcggacggcttgtcgaatgtttcgtgacaaacggaacattcgtactcgtctttttcgaaaagatgagtgtgccgcgtccattttcctttgctcatttttaccacctcgaacgaagaacggggaaaataaccggggaaacccctttttaaaaaaaggggctttccccggaccccatcctcaaaaatttttgaactgaatggtattggtgtgtgtccttctctcggaaggtagctgagaattttcgctatgctttatagaacgcccgcgggggcactagacttcagcttcacgttggagaatgatgcaaagcatcattctcgggaacacagcaagtaaacgtacaatttccgctaaatgttatgctgtgttcagggtgcagggggcagagcccccgcttgggtttgggacgaagtcccaacatataaaagtctcacgttggaaaacggagcattgctccgttttcgggaacatggtaattgaacgtacaggatcgatttgatgttataccatgttcttcaaactcgcggacacggtaagcaaacgtgcagattcggaaaaacgtaataccgtgtcctgtgtccttccgcgctgccctctcactcaaatctccagaagccgcttcacgttgcccgcgaagatcgcgctgcattcatcctccgtcagaccgagcgaaagaagatgcccgatctcgtcctccgcgcgccacatcggataatccgtgccgaacagcacccgatccgcaccgtagcggcggattatttcgaccgcggtgcggtcgtcgagcgcgaagaacgacgacgagcagtccgtgtacagattcggcatccccgcaagaatgtgcgacgcctcctcccacatcgtgtatccgccgaagtgcgccgcgatcaccgtgagaccgtcgtatatctccatgaccgcgcggagtctcttcggatgcgaaaaatccgatctcgcgtcgcccatgtggatcagcatcggcagccgtccctcgcaaagctcatacatcttcagatagcggtagtcgtcgatcttgaaattctgcatatccggatgaagcttcactccgcgaagcccgagcgagataagctcctcgagatccccctcgagatcctcgctgtccggatggagcgtgccgaagccgatgaattttccgcccgacttttcgacctcgcccgcaatgtaccggtttatcgagcgcacctgctttgcggtgaccgccaccgactgaacgagatagcggtcgatccccgcgccgtccccctcctcgaggaggctctcaacggttccgtcgaacgccatcgggatcgagtaaaactcgcccgtgtgcgccgatgccgccgccgctatcttcgccggatagatgtggcagtgcgcgtcgattatctcaaatccgtttttcattctttagctttcctttccgccggagcttacgcggtctcgatctccgccgccttccggagcccgtgacgctccacggcatcctcgcgcatcttgtatttcagtatcttgcccgccacgttcatcgggaacgaatcgacgaagtcgatatacttcggcaccttgtggcgcgccatgtgatcgagaatatatttcttcatctcgtcctcggtcatctcctcaccgtccttcagaacgatgcacgcgcatatctcctcgccgtactgctcgtcgggaacgccgatgacctgaacgtccttcaccttcgggtgagtgtatatgaactcctcgatctccttcgggtagatgttctcgccgccgcggattatcatgtccttgaggcgtcccgtaatgcggtagtgcccgtcgggtgtgcggcacgcgaggtctcccgtgtggagccagccgtcgcggtcgatcgccgccgcggtcgccttcggcatcttgtagtagcccttcattatattgtatccgcgcgcgacgaactcgccggtcacattgtcgggaagctcttcgcccgtttcgggatcgacgatgcggcattcgatctcgggcagatttgcgccgacggtggcgacgcgcacctcaagcggatcgtccgtagagctcatcgtgcatccgggagaggattccgtctgaccgtagactatcgttatctcagacatgtgcatcttgttcaccacgtcctgcatgacggatatcgggcagggcgagcccgccatgatgcccgtgcgcatataggaaaaatccgtcttttggaagtccggatgctcgagcatggcgatgaacatcgtcggaacgccgtggaaggcggtgattcgctccgcgttgatgcaggcgagcgacgccttcggcgagaaatacgggatcggcgcgagagttgcgccgtgcgtcatcgacgcggtcatcgcaagcaccatgccgaagcagtggaacatcggcacctgtatcatcatgcggtcggcggtcgaaagatccatgcggtcgccgatgcactttccgttgttcactatgttgtagtgcgtaagcatgactcccttcgggaatcccgtcgtgcccgacgtgtactgcatattgcagacatcgtgcgaattcacgcacgcggcgcggcggcgcagctcctcctcgggggtgttcacgctgcggctcttcgcctcgtcccacgtcatgcagcccttctttctgaatccgacggttatgacgttgcgcagaaacggcagacggcgcgcgtggagcggagtgccgctcttcgtatgctcaagctcggggcagagctcaccgattatcgagctgtagtcggagtcgcggtatccgtcgatcatgacgagcgtgtgtgtgtccgactggcggaacagatattccgcctcgtgtatcttgtacgcggtgttgaccgtcacgagcaccgcgccgatcttcgtcgtcgcccagaaggtgatgtaccactgcggaatgttcgtcgcccagatcgcaaccttgtcgcctctcttcacgccgagcgcgatgagcgcgcgcgcgaattcgtcgacgtcgcgggagaactccgcatacgtccttgtgtagtcgagcgtcgtatagcggaaagcgtactgatcggggaaatgcttcacctgctcgtcgagcatctgcgagaacgtgagatcgacgagcgtctccttcttccatatgaaattgcccgtgccggcgcggttctgatagagcacctcgtccgcctcgcttgtgtcgccgaagcggctcatgcagctgacgaaatgcgagaagattatatccatgtcggcaagctcggggagccatgcgacatcccattcgagggagataaagccgtcgtagtttatcgagcggagcgcgtcgatcagctcgtcgatcggaagctcgccctctccgatgaggcagtacgcgagattctcgcccgacccctcggaatccttgacgtggacgtggcggacgtacgcgccgagattctttatcgtctcctcggcgctctcgccgcggaatctcgccggattgtggagatcccagagcgcgccgaccgaatcgcaggcgaaggtgtcgagcgtgtccttgagaaggagcgtatcggagaagatgccgcaggtctcgacaaggatgccgacgttcttctcctccgccgcgccgatcacacggctgatcagagcgcggcttctctcggcggcagccgccgcgtcgccgctctcggcggcgtgtaccctcacataaggaatgcgaagctcgctcgccttctttatgcactccgtgatgtgcgcggcggcagcgtccgcatcctccgcggagatgtcgcacacggcgtcgatgcacgggatcgaaagccccgtctcgtgcatctttctcacggtagccgccgcggaatattccgaaaacggaccgcccctgctcgtgaacatcggattgtcgatcccgtgaagctcgatcccctgaaatcccgtgtcgcacgcgatacggcagaattcgtcgaaggatacgctgtcccagcccttcgtcgtaaatgaaagtttcatctgaatttacctctccttctcaggcgtcgttttcttcgtaaacgatcttgttgagcgcgttgaggtacgccctcacgcttgcggttatgatatccgttgaaataccgctgcccgaataaagctttccgtccgagcggagcttgacgagcgcctgacccatcgcctcgtgtccctcggtgaccgcctgtatctgaaaatcgtcaagctcgtagtgatgcccgacgacctgctctatcgccatgaacgccgcgtcgatcggtccgtctccgacggagactccctgaagctttttgccgtcgcgctcaagctccacggtcgcgcttgccttgataacgtttccgctgttcgtaacgtatgagcagagcacatacgtcggcgggcactgcatcgccacgcttgcgacgatcgcgtcaagctcgcgcgaggtgatgttcttcttctccgccgtgtgggagaattcctcgtagaccttcgacagatcctcggcggagagatcgtagccgaggcgctcgaccgcgcgcgccacctcggaaacggtgtcgttcttcgtcattgtgaattcgggctgcgcctcatctctgtccgcgcgtccgtcatcgtgcgcgccgccgccggcaatgcggcgtatctgctttgcaagtctcgtaagctcgggcgtgttgaggtttgaggatacgccgatctcgtcgcccttctgaccgatgatgtgcgagagcatctcgacggacggctcctttttatcggtcacgcttgcacggacgtagtccgcgcccgcgcgaaatgcggcgacgcatgagctttcagccattccgagctcgccggatgcctgcacgccgagagggatctcggacagtccgggaacgtcggcgcggagcgcggagacgaaggatgcaaaatcctcgggaaggagggctgccgcgctgtcgcagacgcacacgcgagtcgcgccggactcgatcgcgcactttatcgcctcgcggaggaattccgcctcggcgcgcgtcgcatcgaccgcgacgaattcgatgtcgctgccgtaggagcggcacttcgaaacaagtgcggcgatcgcctcaagcgccgccttcggcttcttgtgaaacacgaattccatctggatcggggagacggggacttcgacgcggtagcgcgcctttttcgctttctcgagcgcggtgcgggcgagttctaccccctcctcggtatatccgacgccgatcgaaagggtcgtgttcttgacgagcgcggatgcggtgcggacgaaaagcgtgtcggtgcgttcgttctccaccggtgcgatctcgatagcgtccgctctcattctgtcgaggcagcgcgcgatctcgatcttctccttgaaggagaaggatgcgtttgaggtaagcgtcgtttcggaaaattcgattttcttcattttcatttcctttcttcgatgagggagtgagaatattgggatggagtagccgggggaaccccttttgacaaaggggattc

SEQ ID NO: 3129 - DNA, 17961 bp, Unknown
  16S sequences of unknown bacteria
tgggcttttttctgcgaaaacaaccttaaatcagtgtttccttaattataccatataacttgcggagaatcaagagatagcgaaaattttatgacggataattgccgcgtgtgacggatatgaccgttttcaaatcgcgatatctccggtataatatagttacgatatcgttctggccagacggtaaaacaacgggtgtatcaaccgagcagaaggatccgcgcgacattgacgacggtctcccggacaccgactttgacggacgggagttcaggatactcacctatgagatgctggtcgacgactacatcgccgacaccaagaacggcgggcttatcaacgacgcggtattccatcgcaatcgcgcggtcgaggagcgcttcggcgtgacgatcaatacgacgaacggcggcagcaatgcggctgtaaaggatctcacaaggagctcgattctctccggggacgatgagtatgaccttgtaatcaatcatatgatcgacaccgcgaacctcgccgtgaccggcgtttacagtgatttcaacaacataaaatacatcgacccgtcgaagccgtggtggaacaagagcgttaccgagaatctgagcatcggcggcaaggtctggctcatgatcggagatatttcaccgtattttctcgagcatgattacgtggtctacttcaacaagcggctgacggctgagtacgacatctccgagggcgatctttacaagacagcgaaggatggaaaatggacgatagacaagtacgcgtcgctgacaaaggatatctggcgcgacctcaacggcaacaacgagcgggacgacgatgatctctacggtctcacggcacaggttacgtcatatgcgacgccgttcatctactccttcggcgagacgacagttaagaaggacaaggacgatatgccggtgctcgcgataaacgaggaaaaatgcgcggcgatcacagaaaagatatataatcttctgtataatcagcagggaactctcccgtcgaataactggacccttcaccgcgacacgtatatggacggccgtgcggtgttcatgaatggtgttcttacgcacgcagtgcgtatctttaccgacgttgaggacgattacggcatacttccctatccgaaatgggacgaaaaccagagcgaatattacacgatgtcggacggaagctcgcccctcatcgcggtacccaagaccgtcagggacactgattttgtcggcatgataaccgaagctatggcggcagagagctataagcaggttacgccggtcatctatgatatagcactcaaagtcaggggtgcgagagacgaggaatcgctcgaggtcatcgacctcgcaacgagaagtggtgtcgtcgacttcgggttcgtgttcggtgattatgataagatgggattctttctgtcgaatcttatggataagaaaaaagacaatttcgcgtcctactacgcgtcgaacaaagacaaatgggaaaagcgcgtgaacgacataatcgagaccgccgagtctgagggcgcgctcggataaacagaaaggcattaactatgtatacgtactctataccgataaacaacgatcattttgaacgttccggacgtgacagggttgtcgcggcgctgaaacaagctggaataacccgcgcgtttctcgctaccggagcgcttactacagatgagacggagaataagagagttatctcactgctccgtgagaacctcgcgtacctgaaaaaagagggattcgaaaccggcgtctggtactgggcgtttatgtgtgacgacggcggaaaattcacaaagataaccggcgtcaacggacatccttcggcaaatgagtgctgtccgtcagacccggagttcaggcgtttcgcggctgacttcacacggcgggtcgcggagctcggtccggatatcatcctgctcgacgacgatctcagatacggacacctcgacagcggactctcctgcttctgtgagcaccacatggcggacatctgcgcccgtgtcggcgagacactcacaagagatgagctgaaagagaagattttcaccggcggaaagaacaaataccgcgacgcttacatggattccctcggtgacgcgatgcgcctctacgccgccgccctccgcgaggcgatagacgcggtcgacccgagaatacgcctcgggcaatgctcctgcataacctgctgggatcaggagggtgtgacatcaccggagatgtcaaagatattcgccggaagcacgcgtcctttcctcagaaccatcggcgctccgtactgggctccgccaaggaactggggtaaccggctcggcaacgtcatcgacataaaccgccgcgagataagaaccgcgcatgaatacgacccggatatcgaggttatcggcgaaggggacgtctggccgcgaccgagatatataacgcccgcttcctatctcgaactcttcgacctcgcactgatagccgacggcggagctgacggaatgcacaaatatatgctcgattactactccgccgcgtccgactatgatcccggctaccttgagcggcacaatgacaatgccggggacagggaaaagattcacggaatgttcgacggaaagacgcctgtcggagtacacgtctggtcgacagagcgcaaattcgcggattatgatcttccggaaacatttgtcggagaggatttcatacagaatatgctgttctcccgcgcgtacagattcgtcacaggctgctcgctcccgatgacgctcgacgagggcgtctccggactggcgtttggtgaggacgcgaagaaactgccggaagaagcgctcggaaagccgctcataatcgaccttcacgcggcgcgcatactcgccggaaaaggcatcgacaccggcatctcggacttcggtgagcggatacatccgtcgtatcagcattttatcgaagcggacgactacacgagaatagatttcgggctgaacgcttacggcataacgataaaggaaacagcgtctgttcttgccgagtacgacaacggaataccatcggcatttgagtacacgaacgcggacgggaacagcttccttgtcctgaacttccgcgcggatttcgacgacgagcgcttctggcggaactaccgtctccagaagatagtgaccgatttcgcgaaaccacctgtcagcctgaccggagagccggatctgtacataatagcgtccgcaaaaggaaaccgcctatccgtgctccttctgaacgcgtcggcagacaagatacctcacccggctgtctccgtgccggatggaagaccggtcggtttcgtcaattgctcagttgagctgaaggacggcaaaatgcaactgactacccttcatgccttcgaccatgccgcgtttgagattgaactcgatgaatgtgaaataaacttcagatgaccattatcttagtcctcctctgcattttcacctcttcgatccagagtgtccttcgccgcgggtatgacgaccgtgttcgcggtggcggggtggcgttcttcggggctgtacagtcgttcgtttcgctgcttgtattcgtggcggcgggggcggtgcgcgggtacgattttccgtctgagccggcaatgtatctgtattcgttcgggttcgcggcgttttacggtacctccatctcggcgacgcaggcggcgttcgcgcacggtccatatgggctgacgtcactcatcacgtcctacgcgccggtaattccggctgttacgggatacttgtgctcggtgagccggtaaatccgacaaaagcggcggggctcgcgtgctttatcgtctcactgccactgatgcgctcagcgaaagcggacgaaaaagacagcggacgtccggcaaaccgtaaatggctcgtgtttgtgatcgtctccctcgtctgcaacggcttctgttctgtcacccagaaagcggagcagaacacgctcggtggcgtgtttgcgaacgaattcatgatcgtcgcgctctcgtttgtgacgataggtctcagcgccgccgctgttgtccgagaaaaggatcgcataagcgctcacgctatatctttccccattctctgcggagccgcgaacggcgcgacgaataagctcgtgctcatcgtgatagcctccgccgcggcgtctgtcttcttccctatgataagcgccggtcagctcgttgcctctgtcgtttattcgatcgtgatataccgcgaaaagctgtcggtcagacagtatatagccgcggcgctcgggatcgcttctctcgttctcctcagcatatagcagaaggggctgcctcagggcagccccttctcgttttattcaggtctctttgtcttccacatcccgcggcagccgccgatgacgtacagatcgccggtctccgggtcggtgcgcatgaagcttgcctcgacgcctccgtccattccggtcacaccatcggcagcggtcttcgtcatattctcccatgtcgcgccgccgtcggtcgaacggatcacgctcgcctcgctctttgctatgttcagcgcgtttccgacatagatgatatttccgtcaaacgggtcgcaggcgattgtcctcgtgcgcatctctcctcctgtcgggagctttatattcactctctcaccgtcgatgaaccggaaaagatacccgccctcgccgagcacccacagcgtgtcgttctggttgtcatacgccatatcgagcacattcaccccggcgcgtccgtacttctcccatgtcagccccttgtcggtcgacttcacaatccacgatccgcgcagaccgaatatcgcgctgccgtcaagggcgtaggtcaggacagcttcgacgttctctttctcgtcggatttcgtccaggtctctcccttgtcctcagagcgccatccgccgacgagaagcacattctcctccccgacaaccccgaggatattcagacttccgtcaagcacgactcctgtcgattcccatgtctcgccgccgtcggtcgagcggattatcacgtcgacgccctctccgcttccgtacatatcagagaagtcgcggcacacgaaaattaccgtctgctcgtcgacaacatacgcgccgtaggaatatccgccccaccccgcgtagaactgcgtatacttccatgtcttcccgccgtctgtcgtgaaagctccgctgtagtcctggtttccgagcgccatcagatcgggattattcacgttaatggctatccgggtaaagcatccgccgttgaacccactgttcgaccactcaaagttttcgccgccgtcagtcgagcgcagtatgtagtcgccgccgaacgagaggcagatatttctgtcggtcgggtgccacgcgagattgccctgacgctgattgtatggtatgaatgatatctcatcgtgccgtccgctctttttccatgtctttccgccgtcgtgcgagaaatatgtgtcgctcaggtactgcccgcggctcatcatgtcgttctgaagcacgatatagtcatgatccgccgggctgacgcggatgtgcgacgggtttccggaggacgggtatccactctcgctcatcttattgaagctctttccgccgtcggaagagatgtagagcgcgtcctgctttgtcacatagacataaccgggattgttgtaaacaacatcgagcgacaggcattcgccctccaggataagctcaaagctcttcccgccgtccctcgacacaaaggttccgttctcgtttccggcgtacagatcaccgctcactgggtcacagaatatcatagcgccgccgagcttttcatcggtagagataagttcccagttctcgccgccgtcgtccgagcgatagagcgcggtctctttataaccgccgttattgtaaattttagtctcgcgcgaccagtagacgacccggcatccgccgaaggactcgtcatagctcgacatatcccaggcgatctgcggtctgaaatcgcggtgtccgacaatgttcatctgaagcgtcctgtggaacgtgtccccgccgtcggttgacaaatagagcccgttctcatcgaaaggaccagagttgcagccgactatcagcactctgtcagcgttcgtcgggtcgacctcaatgcccgtagcggcgctcgatcgtatacctaccgtacatggctcccatgtcacgccgccgtcctctgagcggtacatccccgcgacatccgagcccgcgtatgcgatattcccgtcagtgttcgcgtatgtgatatagagcatccactgacagccctcgccgccctgtataccattatcatactgatattttgtcgtcatcggcacggctgtccaatcggcgtcttttgctccggggagctctgccgcgtccggctgatcgacctttggcgtcggaaccctcgtctcttccatcatcgttgtctcctctgtcgtttcgtctgttgtgtcggtcactgtatcaccttctccggcacatccggaaaacgtcattgccgccgccataatggcggatatgagcgccgcggcgcgtctctctttctttgccatacaaacctttccccggtaagttccgggattctgtgttattttatcgcatatattatatcacatatttcccgggaagtcaagcctgtttcgcaatcccgacaagcgcgcgcatatcctccgggagcggcttatcgcagacgacatgatcgatctccgacacatggcggaggttgtgaagacatcgccgtccgatcttgcccgaatcgagcagcagtacgctcttccggctccgcttcatcatctcaagtctcacaagatcctctccgaccgagttgtcggtcaggtttccctcatcgtcgagtccgcggcaggaaaagaagacaacatccgcgttataacaggatatcgtcctcagcgcgtcgccaccgatgaatgattcggacgacccgatcagctgtccgccggtgcagatcgtgtttatccccatctcgccgagaatcagcgccgtcctcgcgccgctcgttatgacgacgatatcccgctttccacggaacgccgcggcaaggtgaagggcagtcgtcgaaccgtcgagcatcacagtgtccccgtcccgcacgagctttgccgcctcagccgctatcatgttcttcgctccgctgtcctcgtccatcctgagtgacgccggtatcgtgtcgtccgcgggtcttgtcgtgagcttcgcgccgccgtgcgtgcgggtgagcgcgcccttttcctcgagctttatcaggtcccgccggagggtcggtcggctgatatacagctcccgcgccatctcgtcggctccggcgctcccctgacgccgcagtatgtcgagtatcttctcttccctgtcgctgaatggcattttcttcttcctttcagatattgaaccaaacgttcagaaaaccgttcatgagtatgatcgtttcgccgttatttcatcttcatcttgactttttctgaaacttacgctataattataccacaagagcaaagataattcaagccggaaagaaaaatttcccggcggaaagagatatatatgaacacaaaaaatgaccttgaattcctcatgctccccgaaggctttgtctgcccctcctgcggcagacgacacaccggcgggctcggacgcctcgacatctcggacggggcgataaaaaacataccgtcgatactgaaagaactcggcggaaaagagcctttcgtcctctgcgacctgaacacatacgacgccgctgggaaagacatatgccggatactcactgacgccgggctgagtttccatctccatgtcgtcgatcagcgtatgccgaagccggacgagaggattgtcggcgaggcgctcatgtactgcccgaccggagcggactcggtcataggcgtcggcggcggcgtcataaacgacacctgcaagataatatcagccgcgaaaaaatgcccgtatatcatcgccgcaacagcgccgtcaatggatggcttcgcctccgcgacctcgtctatggaccgctcggggcttaaggtctccctgccctcgaaatgtgcggacgcggtcgtcggcgacctcggaatactcgcgggcgctccggcaaagctcatctcgtccggcgtcggggacatgatcgcgaaatacaccagcatcgccgagtggaaaatatcgcatataataaatgaagaatatttctgcccgcacatcgccgggatggtgacaagagccctcgacgaatgcgtttcaggcgcggaaaaggcgattcacggtgacaaggacgcctgcggaaacgtcatgcgcggtctgctcgtcgccggaatggcaatgaacgccgcgggctgctcgagaccggcgtcggggatggagcactacatttctcacataatcgatatgcgctcgctcgccttcgggacccccgcggagctgcacggaatacagtgcgccctcgcgacgcttgtgaccgtccgttcctacaagaagctcgccggaatcactcccgaccgcgaaaaggctttagcgtatgtctcgtctttcgaccctgacaaatggtccgcgcacctcagagaaaagctcggcgcgggagccgaagcgatgatagccggtgaagcccgcgagcgcaaatacgacaaggaaaagcacagatcaaggcttgaacggataatcgcccgctggaacgaaataaaagccgtgatcgacgagatgccgtcgccggatgagcttgaatcgctgatgcgccgcacaggactgccggtgacaccgatggagatcggtatatccgacgacgaccttcacgaggcgttcatcatggcaaaggatatgcgcgacaagtatgtcctcgggagactgctctgggatctcgggcttctggcgtgacagaaaattttacagtcaggcgggtttttatccggactgactgtatttttttcggctggtattcaaccgcactccgcaattagccgccggattgacggatatttccgcaatttttgcactataatactttaacatattacctcatatgcgtcatatagccgaaatttgcgaaattgtgtccgaacgcttgaaaaccgtctcgttttggtgtataattattgaaggcgccgacgctctcagaacttatggctgagacgaacgcgccactcatcatttcaaaggactttatcgatatgaagaaaaaactgagtttcaaggaatatctccaggtcgcgagtatgctgttcgggctgtttttcggcgcggggaacctcatcttcccggtgcacatggggcagatggcgggcagcaacgtcattccggcgacgataggctttctgctcaccggcgtcagtctgccgcttctcggcgtcgcggctctcggtgtcagccgcagcaatggtcttttcgagctcggggacaaggtcgggaaaaagtattcctacgtcttcacctgtcttctctacctgacgatcgggccgttcttcgcgataccgaggtgcgcgaccacgtctttcacggtcgggctcgagcagattctgccgagtgagcatcatacactgtttctctttatctttacgctcgtgttcttcgcagcggcgctgtatttttcgctctctcctaacaagattctgactgtcgtcggaaaggtgctgaacccgtgcttccttatctgtctcgcgataatcgccgtggtggcgctcctgaatccgggcgcggctgtatccgaggtcgctccgcagggggattacgtgtcgcagccgttcttcaccggcttccttgagggctacaacaccatggacgcgctcgcgagcctcgctttcggaatcattgtcgtccgcacgatacgcggtctcggcgtcgagaaggacagcgacgtcgccgcggtcacagtgcgctcgggcgtttacagctgcgctttcatggcgttcatatacgtcgtcataacgatagtcggcacacagagccgcgggctcttcgagacaagccagaacgggggaatcgcgctcgctgagatttcgacgcattatctcggctacgccgggctgttcgtgctcgcggcgacggtcacgctcgcctgcctgaagacttcggtcgggcttatcacgagctgctccgagactttctcctcgatattcccgaagggaccggcgtacagggtctgggtcgtgatattctccgcggcgtcatttctgttcgctaacctcgggcttgaccttatcatcgcgtactcgataccggtgctgatgttcctctacccgctcgcgataacgctgccgctgatggcgctgttcggaaagtttttcgacaacgaccgcgccgtttatgtcccggtcacggcgctcacgctgatcgcggcgctctacgatatgctccgcacgctgccggacagcttgcgcgccttccttcatatcgatccggcgctcggggttataaaggaagttctcccgctcgcgaagctcggtctcggatggatctgcccggcggtggcaggacttgttatcggaatagttattcatcttgtgaagaaacgttccacgaaaaaggcataaaaataacggcacacagcgcgtgtgccgctttttttgtcagcttctgtattccattcgtctaatcagcgttccggcgtagtcggtatcctccgccatggtctgcacgtgaagataggatatgccgtccggtgtgtcaagtttcttctttatcccgaacagtctgacgccgtcgcaggatacctcgccgtctccggtcaggcaatcgaaggttatcctgaccttcagccacctgccgcgtccgagcgttctgctgtcgagctcgaaatcgtacgccgcgtaaagccccgcgtactcgtcggacggattcatccagtggtcgcacagccggattttaacacccgaaacctcgacacgcatatcgagaagtatctctcctctcagcgccttcgggaaattccagaccattccctgtcgatccgagacaagccgttcatccttcacccggcagatctgaagcgcctccccgaacgtcacatccgggtcaggcacgagaagcgcgccctcggtgcgattccacgcgcagtgcccgccgaacccggtatcaagatgacagtccgaaatactcttcacaaacagatgcgtgctgacattcttcattccgttctgccagtcctcggtacggctcttctcatagagccagtccacgtcgaaaatgacaatacggcggctcgcctcgtgctgaccgtactcgacaagtatcttgccgccgggcagctcgattgcctggaactgatgcacactcttgtccgcggaggagaggtttcctccgttcacgcggaaatccggcgcgttgcggatagcgttgagcccgagctcgcggaatccgatccactccttgcagtcatctgatatcgcgacgtggcaggcgtcacggttcgtgaagacgtcctcgccatttccggctttgcatccggcggagacgggcggccactcgttctcgtgattgcgttccgccagcggtcgggtattgttccagaacagcacggtccgaccgtcgctgagtctcagcaaatacggcgtcgtcagcgtacaatggaatcctgacggttcgccgtcagtccaggtctcgccaaggtcgtccgaatagtagacatacagatagtcaagcgaggtacgcacaagcatcatgagtcttttgccgtcaagtctcgtgaacgtcgcctcagtgccggtattctgccacctgacaccgaggtgcgggaagacagcctcatgcttcggcgctgatttgagcggcacgagcgtccagttttccccgtcgtcgtccgagtacatcacggtcggtatatcccacccgtcgcgatgcgtgtgaccgcagcaaatgatacggcgctcatcttcaaatattgtcggctggaacatatctatgaagatctcgtcggatatgtccaccctgcgcggagcggtgtcatccggtccgatttcggatatcagggcaaaagtgccgcggcttccctctttccggctgaaatcgacagtgacccacctcccgctccacggcagatacgacgccgcgccgagtacggtgtcgctcacggcgtaatgaaacttccagtcaagcccgcagctgcgtgaggatatatacacacgtcttccgtccgcgaacacgctccgcttatccgcgactccatagcttcttatctcaccgtccggcatgacgacgagacttctgcgggaatcctcaggctggacgcctgtgacagtcggctcatagattttttcaagacgtgttctgtcctcatcagacaggatatttctcagtgcctcaagctgtgtcattattccgccctctctcactcaaacagttcttttattttgtcgatatccgcgagtgccttggcctccgcgccctgatataccgacgcgatattctcgtttttcttgttccacgccgtcatcaccttgtttgtcagatcaccccacgcgaagaagtttcctatatcgtatttcttgctggagaaaatcagctcgagcatctcggcggactcatcgtcacgcgtcgactttccgatcagtgtcttgtcatagaaagccggagtgacgatctccgcgctctttgctgagaaagcctcaagtatgaacccggtgcggtcaggatcccgggtcgtgaccggcacggtcaggagagtattgccgtatgaatgcggcgagacgatatagttcttctgcgcctcgtcaaacttcgggtgcgggattatgccgaaatcagcgtcgctcgagcggagctggagcacgaccgacacagtggtgaacccgtagagcgcatgatgcccggaaagcatataatcaagcgcgctgtcagcgttattgtcctcaaactgcttcaggttgtcaagtatcgagaacgcgctgtcagtcttgatgaaagagatcagcttctgccaagagtcgaccatcctctcggaatacagtgtcagctccggctcgccgtttcttatctctccgaaagagttgcctgtcgagtagataaacgcgaacgccgcgtcctgccagtacgcgtaaccgaacctgtcttccttcgaataaacgttgtctccgttcaggtctgccgtgaccttgtcgcagttcgcgaagaacttgtcaagcgtccattttccgctccggacatcctcgtacgggtcgtcgatatcatattcatcgacgagctgcttatcaaagaccattacgtgagtcgccttgttgtctatatacgatatgtcgccggacgccatatagaccttgcttccgaacgacaggtcgcgggtaacgttctgatcccaccattctctcgtcagatccatgttgttgatctttgaaagatcagtcacgtattcattcatgacatatccgaccgaatcgtacggagacgtaagtatcgcgtcaaagtcggcgtccccgctcattatcgagcttgagatcacctttgacatctcactgccgctcgtcgacgtggatgttccgccgcagaatttcgccgctatcttcacgttatacttatctctgaggtaactgttgcgctcatagacggcgtcgttcaggatgtctccgttctgttcgtcagccacaatgtccgtaccgttccagtgatactgaacgccttcctctccgcggaccgcgaaggtgaactcgtatccgccgaaatcggcgtccggcagaccggggtcataccttccggtggtctcctctgaagtcgtcgtttcgtctcctgccgtcgtttctccgcctgaaggttcccccgcgtcagaaccgcaggatacgcacaggatcagcatcgacgcgaggagcatcatacttgtgtactttcttttccaatctttcatttttgagtgttcctttccttatgaatcatcgtttaccggattaccgtccgacaacacccgccgcgcctgctccgccgaagtctccgttttcatccgcgaagccgaacgagtagatagcgccgtcgacgtcaaagcgcagcctgaatgtctttccgatgagagacattatatcatgctcactgaatccgagccgcgtgttcgtgctgtcgccgtcaaaatcagccgaggcgagcgattctccgtccggagtcagtatcgtgaccctgacatttccgacggcgttcaggtgaagcgagcgtttcgtgtcgtttatctcaagcacacgggtctcgattcttccctttccctcgagtgagatgaagccgtcgcgtctgagcttcgcgattccggtcgcgccgttcatgtacattccggactccatgtcgtccttaatgtaaccgttccggcggctgtacttctcgtcaccggcgaaaccgatgtaatatatccacagttcatcgccatgaattatcgtgacgccgccgaccgactgcacgtatcccctgtcccacgcgccgcggtacatcgacgagccgatgaaagtccgtctcgacggtctcgaaaaattgtatccgtcccgcgagtacatcggtatcagcccggtgttcttcgggattccgcggtctccgcagaagttgttctccggaccgtagaagatctggaacataccgagcattacgctctcgtaaccgaccgcgtcgacgttgtagagctgcggctccatgcgtatatacgggtcgggaaggtcgagcttgtcggcggcgagccacttcggtgctttttccggatcccatcccgcgccctcaaaaatgtcatcgcactcatgatactgcctcgacctcgcgctccacatactccttatcgagtagacccatttcttcctgaacgggttgtaaaacatcgtggaacggtcaaacactccggatgtaaaggtcaggttctcccagtgtataccatccggagatgagccgatgatgcctggcatgaagcctccggggttccggaggaacatcttgtaccgtctcgatgtgtccgggtcattgtcgtctatccagaatgtcgtcgaatccgggcgcagatacatcggcgattccggcgggtcgaaattgcagagtccgttcggtctgcgctcgtatttcagtattcggttcgttctgtcgccgagatcggggcgtatccactcgattccgtcatgcgaatacgcgtagcacatctggtcaagccagcccgcttcgtaccacattttgaatagcttttccttcgcgtcataccagacgccgccggatttcgggcaggcggctgggcctgcgccgtcacgctcccatcttgtctccggcttcagcaccggattcccgtcaaacttcaccgcgtcgtgataaaccggcgtgaggtcgctcctgtcgatcaggaaatcgtcaacgaacagctgacgtccgaccgagacgcttatcacctccggcggattcttaagatacggaacattctccgggtcggacggcgctgacgcgaagtcgtccggaagtataatgttgttgtacagtttctccataatcattgatcatgttcctttcggtaattattttcgcttttttgttccgacctattgacaaattgagctgcctgtgatataatggatacaccggatgcgttcgtatatgcgaacacagttccggatatttgtcttatttctatcataccacatcgcgagctgtttgtcaacccctttttggaattttcgtcacgactcattcaaaaaaagaggccgcaaaagcagcccctcatatcttattctgttatctgaagttctcgctgtacttttcgagtatcgactcccacttatccgtcttctcagcgaagagcgacataacatctgtcgagcccttgtcgagcagcttccgcatatcgctgtcaatcgacagtccgtagctgttcaggagcagcgtgtaatcggtggtgatgctgtttataacaatgtcgaccgtctccgccgactcattgtcacgcacgtatttgcccttgagcgaggtctcgatgaacgccggtctgacgagaaccgacgactcatacgccatgtcctctacgatacgtccgacaaggtcacgctgattctcagggatagtcaccggcaaagtcaggctcgacgcgtgcgtcgaatgtatgaacgacgagtactccttctgcgtcacgtcatatttcggcgtcgggagaataccgaagtcgccgcccatctcgcgcagccacatgacgccgtacatcgcgtccgcccagaacataacgcgattctcgttgaaagcgtcggtacaggtcttgacacggtaatccccgccgagcttccggtaattctcggaatacagagtgatcgagtcatcctgagccgtcgggagcattttctgaagatagcttatgatcttctcgtttccggagtcgaaatagagttcgccggagttatccttctttatgaacggctcgtttatgccatagtaaagtatctgccacgcgaaattgttgtaggtgattccgtactgatccttctctgtcatctccccgtcgccgtcaaggtcattcgagacaccgcggcacaggcttatcagcttgtcaaatgtccattccccgccgcggacaagctcatacgggtcctcgtcgcagtactgctccgcgaactgcttgttgaaatagatgattccggcggaaaagtacgcctgaatcgtcatatcgttgattcccacatagtatttgtcgtacatcgccatctcgcccattatccggttgttccaccacggcgcggttatgtctgtgttcgggaactcgtcgagccggttcaccatgccctccgcggagtaaacgatgccattgttcaggctgtcgattattatgtcatacgtatcgtcgcccgcgcgcacagatttcttaacgaccggggagacgtcgaactgactttcgatctcaaacgtgacgttgtatttttcctttatcttctcgtttcgggtgtatgtgttgtcattgaggacgtttccgttgatctcatcggcggttatatcgtcgctctggcggctctgactgtcggtcgttcttgttatgaagcggatggctcttccaccgccgtcaacggcttcggggatcctgtaccgcggttcagtgtcatcgggagcctcagtccgggtctctccggctgaagtatcgtcagacgtcttcggaacagcgtccgatccgcaggcggcactcatcgtcagcgccgcaagcaggattatcagggtaattcttttcatggctttgatatcctttccgtaaaatgatgtctggaacaaggcgggttcgcgccgcacgcgttccatatcaataatatcacaattttacccgtttgtcaagtacttttcgaattttcacgaactaaatacttgacatttcatccatgccatgctataatacaaatgccggagtctgtttctccggcaaagaaagaggttcttcacacaatgaacaattccgccatacgcgtcctcgagatactcgagctgttcgcgtccacaccagagccgctgaccgtcagcgacatcacccgtatactcggttacccgaagacaagcgtcttcgatatcgtgaacatcctcaccgagcgcggattcataaaacgcgacaacgagcgcgcgaaaacctatgtcatcggtccgaccgcttatcaggtcggtatgtcctacctcgcgaagaacgacctctactcgatctcacatccgatactcacgtctctcagagacagtctcggcgaaacctgctacctcgcggtcgaggagggcgggtacatcatatatctcgataaagttgagtcctcacagccgatacgttcgacctgcaacatcggcgcgaaaaacttcatgtacctgacaggtctcggaaaggccctgctcgccgcaatgcctgaggacagagtgcgtgaaatcgccgcgagaggtatgccgccgcgcacagacacaacaataaacacgaccgaagcgctcctcgacgaaattcaggaaatcagaaaacgcggctgcgcctacgacatgggcgaggacaactcatacgtccgctgtgcagccgctccggtcagggggagagacaacg

SEQ ID NO: 3130 - DNA, 6324 bp, Unknown
  16S sequences of unknown bacteria
attctatatatttcatatataataaatatagaaactatatttattttatatggagtgtgtcatggagctcaaacagttacaggcctttatggccgtcgtggaggagggaaccatcagcgcagcagccaaacggctgcatatggcccagccaccgctcagctgccaaatgaaatcgctggaagaggagcttggcacccctctgttttggcgcggtgcacggcatattacgctgaccccagccgggcaggcgctgtataaaagggcgcagcagatgcagcggctttccgaaacggccaagcaggaggttgcagcgctgcggggcaaggtgcagggcacgctgcgcatcggcacggtatcgtcctcttccgcgcgccttctgccgtatgtgcgtgcgtttcatgcccagtatcccgaaatacgctttgagctggaagagggcaatacctatgagctgctggatcttttgcggcgcgacctgatcgagattgccgtcgtgcgaaccccatttcccatggatgggatgcagtgccggtttttggaggccgagccgatggtagctgccgcccggcccggctggtttgccggggaaagcacgctgagtgtgaaggccctggcttcctggcccttgattgtgtaccgtaggttcgaaaacctcattgcctctgtttgccaggaagccgggtttgagccagatctgttctacaaaacccaggatgcgcgcacctcgctgctgtgggcggatgcaggactgggggtagccctggtaccgcagagcgcgatggccatcatccccggcgggcttttgttccgccccattgcggaggaaaacctatacacccgcattgctgccatcgcgaaacaaacgcgtacgctatccgagccggccgaagcgtttctagctgcctttggcgcttgctcttaagggccgttatagtgtaaagtagagccattgagagtttcgaggaggcgtatcaaatggttgttattaccatggaaaatggaaaacagatcaaattacagctggaaccggacaaagcgccgagcactgtaaaaaactttgaaaagctggtcagcgaaaaattttatgacggattgacctttcaccgcatcatccccggctttatgattcagggcggatgcccggacggcaccggcatgggcggcccgggatacagcattcggggcgaatttgccgccaacggatttaacaatcccatcaagcacacgcgcggtgttatctccatggcgcgcagcatgaacccggattctgcgggctcccaatttttcatcatgcatgaggatgcgccgcatctggatggccagtatgccgcttttggccgtgtcgtagagggtatggacgtcgtagacgagattgcaaacacccccacagggcgcaacgatcggcccaatacgccgcaggttatgcggtccgtcgtgctcgtagaggattgatgggaaaataaaaaaagaagccgagaggcttcttttttgtatgggaataggaaatacaaatacgtttttgtcggggagcaaagcaaaaataaaagtgcccccaacgaccatcccatcattgaaagcacctttgctctaaattaattatccatattatagggaattcattgactaaagtcaatggttttttgtcgaaatttgtacaaattttaagggtcgcctactatatacggcaaacacacacgcgggggacagcaggatatggtaggaggcctgttagatgttgccaggcagcaacaagccgaatgtggcttgccaggggcatagggccatgctacaataccagaaaaggaagggggcccgcctaaatgagcgaagaaacacattttacgccgcgcagccagaatcgacactttgaaaatccagctcctagagcccataaaaagcaggccaagcggcaggcgcccaaagggaaaaaaggaaagaaaaacatactgctgaatgtgctgttggtatttttctgtgcggtatttgtgttttctgcgtataagcttgtctcgcagtatttggtgtatcagcaggcggattccgaatatgagcaggtacgcgagcttgccggaatgcctgcgggtgagcaggcggacagccgtccggattttgccgcgctgcaagccatcaatcctgagattgtcgggtgggtcactgtgccggggacggtcatcagctatccggtggcgcagacagatgacaacgataaatatttgcatactacatttgaggggaaatccaacgcctccggctgcatctttatggataaggacagccagacggacggcaaagggcagcataccattctgtatgggcataatatgaagaacggatcgatgttccacgaattgctgcaatacaaaaatgccgcgtttttcaacgagcatcctaccatctattacgatacgccggaagggcgcatagagctgcgtgtcattgcggcatatgcggcggacgccaacgacccgtacaattttgtgggcgcaagcctaggggaatttcaggcatttttacagaagggcatagaaaaatcccctgtgcaggttgatgtagatgtaacgcgcatcacatcggcgttttccttgcagacatgcagttatgagacggacaattcccgtacctttgtcatcgctgtgccggtaagccagatgcagccataacagccaaacgatagggatcgcggagggccaagccccctccgcttttttatagcgcagatcgcttgcaaaatgccttgcgatgcgtcgctgattcccattgactttttctttgggtatgttaatatggattagatttgtataaggaaaaagggcgcatttgcgcttgacccatatgggcctggtgattgctgggtctatttattttaccaaggaggaaagggccgatggagcggaagggaaacggaggaattttcattgcggccgccgccgtggcatggagcacgggcggtctgtttatcaagctgatcacgggatggaacagcctggcaatcaatggggtaacgggcgccattgccgtattggtaatgatgatctgcatgcgcaaggtaaagttgaaaatcacaaaggcggtggtgtttaccgggctgaatgcggcgctgacctccgttttgtttgtcatggccaatcggtataccacggcggccaatgccattgcgctgcactatacaaaccccatgtttgttgtggtgtttactgctgtgctgcaaaaaaaatggccgaataacgcgcaggccgggttggcagtgatgatctttgccggtatcctgctatcctttgccgaccaaatgggcggcgggggtatgtggggcaatttcctggcgctgctcagcggcgtaacgtttgcctgcgtattcatcggcaatcagatgccgggggcaagcccgcaggatgcctctatctttggctatgggtgcaatgccatcatcgggctgccgctggcctttttccagcctgcgccaacggggttaagctgggtagggctcattggcatgggcctggagctggggctggcgtatacctgcttttccattgggatcaagcgaacctctgcggttaccgcctcgctgatctcggtgctagagctggtctgtaatcccatttgggtgttcctgtttttgggagagaggccctcgctattcaccatactggggtgcggaatcatcctattgggcattgtgctcaacgttattttggaaaacaggcagacagagaaactggaagaggctcaggcttccctggcaaccaaataaaaaagcctatgctttttagcgcaggctttttaccctatggattttgcagcagctgaatctccagcttatgcggcaggcagagaatcagattgcctaaaaaccgctgggtatagttgtccaggctcatagcgccttgctgcacgcaatcttgattgccacagtctgcttcgcgcacaaataccgcgccatcctggatcacgatcaggttatagccgtattcggtatgcatggggatctcgcggttttcctgcaaaggataggtgcctatctcctggccgtccaccttgatctggacggcggcccggctgccaagatcggggcgaaacagagtgatggcagccattagtgccgccacgatgagaatcacggccaaaatcagccagatgtcttttcttttttgaatcttcatacgaatattttaccttaacagcaatgcctagggcaaataggttttgaaaaagtgagtaaattgcgctataatagcgaaaatgaagactgcgccgggtcggcgcatggagtgagatttgtacagagggaaaggaagcggtgtaccatgcgggaaaccgggaaaatgggaatacgactgttgattgtatgtgctgtggcaggtctatgcctggcgcttacctatagcattacgcagccaaagattgaagaacaggaaaggttggcggagcaggaggcctatatggcgcttttcccggaaggagccgcttttaatgaagtggataagggaaacgcggcggacgaggtcagtaagatcgtagaggtaaaggataatgccggcgctcgtttgggctattgtgtcagcgtggcccccggcggctacaagggcgctatcaatatcaatgtaggcgtcaaggcggatggcacgctgagcggtatcaggattggctccaacagcgaaacggcaggcttgggcgcgcgcattgcggagccggatttctatgagcagtatgccgggcaagcgccgcctataaacttaggagagcaggtacaggccattacaggggctaccatttcttcccgtgcggtaacaaacggcgtgaaccttgcatttgaagcagtacagcccatgctttagaccaaacaatgtaaaaagccggcctattggccggcttttttgctgtcgttgttttgcggatgcccatcgggtttcttatgccttggggcctagcagcaaacgcacctgttcacaatcgcggcttacttgcctttgtacctcttgcagcgaggaaaacttaacggtagggcgcagaaaatcatatagatcgacgttgattgtttgcccatacagatcagcgtcaaaatccagaataaaggtctcgatggaaatgcggcgctcctggtctaccgaagggcggtaaccgatgtttgtaacgcccaaatgacaccctgtgctgagctgtaccacagaggcatatacgcccagcggcggcagcggcgttgtaggatcgatctgtaaattggcggtaggcatgccaacggttttgccgtttcccttgccatgcaccaccaggccggaaagagaacagagcggctttttgtgttttttttccatctttagacctcgggttcagtttgttttatcggaaggagtataaacaatcccagggtgtattgtcaaaccaaaagcagcccgcccatgggcacgaacaaccattccgtgatatagtaagagaagctagggaggcggaatagatgaaacatgagatcgaaaagcaaatagaatttttgatggaaatcgataagagcaaaggcattttacgcatgaattggatgctggatcaatctcggcgcgaggatgatgcacagcatgcctggcatgcatgcttaacggcgatggtgttgcaaaagtatgcggcaaggccggtggacatcggccatgtgatccaaatgctgctggtacatgatatcgtggagatcgatgcaggggatacctatgcatacgatgaaaagggatatgaaagcaagccccagcgggagcaggcggccgccgaccgcatttacgggatgctgccgggtggccaggggcaggcgctgcgcgcactttgggaggaatttgaagcgggcgaaaccgacgacgccaaattcgccaatgctgtggacaggacccagcctttttggggcaatttttacattcaaggccgcgtatggaaggaaaacggcattgaagccaagcaggtgatccgccgcaacgaagtaaccaaggaaatcatgccggaggtatgggaagcggtatatgaacaaattcagcaggcagtacaaaacggctggctaaaatgatggacaacctgcgccgggcatgatatactctggcatattcacttttggggccttcgcaggaaggaggagaacgccttgcacgaaccgtttgtggcctatgaccgaaacacccaaacgcttgtaccgcaaaagacagtggcggatggctggatgaaatggatctacgagacacaaccgggccggatggcgttgggcgcgctggtgaagcgaaaagcggtttcctccttgtatggctggtattgcaagcgtagggcaagcgcgaaaatggcgcaaaagctcatcgatca

SEQ ID NO: 3131 - DNA, 16398 bp, Unknown
  16S sequences of unknown bacteria
gtggtacagttatttgcagtatgatgtactagcttcgctacttgctcatgaacgccttttcacatgttacatattatagcatgaatcattcagagattgctaccaatattaaaaatcttagcacattcttaattttacagaacgcaatttcctgtaaaacaaaaagaccctggcatctggttttcacctgattgccaaggtctcgctttctgtctcactcttattggtgtgccatttcacccgcagcacccgcgctccgagcagctgcacatcctcctcctgatgtgtcacgaccagaagtgttctccctgcccggaattgcaagatctgctgaattgtccgctttttcgtctcctcatccagccccgtgaacggctcgtccatcaaaattaacccggagcgcaccgcaagcgcacgcgcaagcgcaacacgccgctgcataccgccgcttaaaagctccgttcttttctgccatgcctccggctcgatcagattctgtaatacctcctgcggcgtacagcaaaggccgcgcctgcctccggcaatccggatattgtcaagcgcatctgcatagccgagcagccgattttcctgaaataccgcgctgattgctgattccggacggatttcaggtacagcacttcccttatccggcgtctccagtcccatcagaatccgcagcagcgtcgtctttccgatccctgatgtccccatcagacagtatatctgacctgcttccagagaaaacgacaggtcagacagaactgttttctctctgtaagccttggagagtgaccgcaccttcacagaagaagccgcccatcgcttccggtcggctgcagccatcccttccaggcgtttcgttcgatttgcggtccgctctcttctatctccaatccgctttgcagaaagctgtcccagcagccataaaaaggcacgttccagaagtctgctcacgacgatcaccacaaacgtccacgcaaacagctcagccgtcgacagataaattttggccatatacagcttctcaccaatcgagagctccggtacgccgatgacctccgccgcaactccggacttccacgccatcccgcatgctatccggcttccggccagtaaatacggaagcagcgccgggcggtatacataccacaaccggctccatgcggacattccgaatacatccgccatctccagcagctgctcatccgccgctttcatgccctgcagcgtattgcggtaaataaccggaaagacaatgacaaaactgatcagcactgccagattcttcgacccgatccagatcagtgccagaatgacaaaggaagcaaccggaattgactgcagcaatgccacagccggttccagaaattcctctgcataccattttttataagccagaatgccaaacagcacccccagcaaaaaagcaagcaaatacccgctgcagatacgaaaagaggaatgcagcacagtccgccagaactctaccgtcggcaactgcaaaaaaagcgccgcaaaagcctctgccggtccgacaaagaggattcgattgtgaatcagctccgccagaagctgccatagcaaaagccagatcagaagaatcagaagctgccggatccgttttggaatccggcatttcacttggttttgtttttctctgcccatagcgaattactttattttgcgccgtagtaaaaatcatctgccggaagcgcccctccgatcgaggtcggctcaagctcatgcagtgcgctcaaatatccgccaagtgcatccttcatctcgtttccgtcgatacaggtaatattgcacgccggaattgccttctgagcaatcggtgccttcgccacaatctccagctccgcaatccactgtgctgcctgctcgggattctcatttgtaaatgcagcagactcttcatgctctgcaaggaaatccttcaccgcatcttcattttcctcaagaaaatccgtcctcgcgatcgttacgcccgtcacaaggcggcttccgccttcttcctgtgtcgcatcccattccgccgtgagatccagcgccacgcgcaaattttcattttgcgccattgccgcggtcacaaacggctgcggaagcaatccgatcgctgcggtatcctctgcgagtgctgctacgacctccgtcgcctccgatttatactccagtgtcacatcatccgttgtcacaccattggcctttagcagatactggatgacataatccggcgtcgtccccttgccggtcagatacagggtcttccccttcagatctgcaatagactgtacctggtcgccattctccaccacatagagcacaccgagtgtattgatatcgatcgcctgcactccgccctcggtcttattataaagtacgctggctacattggccggaacgagcgcaatatccagatccccgctgatgacttttccgagcagttcatctgccgccgtcaccattgtaaaatcatatgcctctttcgtctcaccggcctttgccttctgcatcagtgagacaagtcccatagatgtcggtccctttaaagagccaatgcgaattacagctgcatcccctgccactgcttccgtggctatttctgtcatcgcttctgtcgtctcctctgccgatgcactcatcgcaaagcctgccgcgagtaccattgccattatccatattctctttttcattttgtgccgcctttctccacaactgcgggcattttttgcattcccccacccaccatttagtgttccacacacttgaagcgtggaaatgcttatctgcattcataattgactcagtgggagttatgtgaaacttatgcctcctgcaagaacgcacaatatcccttgtacgcctcatatacatctgccttgctcgtcacctccagcggtgcatgcatgttcagcactgccacgccactgtcgatgacctccatgccgtaaagcgctgtgatataggcaatcgttccgccgccaccgacgtcgatcttgccaagctctgccgtctggaaagctacattgtgctcatccatcatcgcgcgtattgctgccagatactctgcatttgcatcgttacttccgctcttgccgcgtgctccagtatatttattaaatacgagcccacgtccgaaatacgcactgttcttcttctcaaagcaggatgcaaacaatggatcatatgctgcgctgacatcagatgagagcatccggctgcgggaaagtgccctgcgcagcttcagctcgctgtactcgcccatgcactccagaagctctgcgacagtattttcaaagaaacgggactgcataccggtcgcaccgacgcttccgatctcttccttatctacaagcagacagcaggtcgtacgctcctgtaccggaatcgcaagctgtgcctccagagaggtgtaagcacacacacggtcatcctgtccataagccataatcatactgcggtccagtccgcagtctcttgccttgtctgccggtacgatctccagctctgctgaaaggaaatcatcctcctcgatcccgtacttctccttcagaataccgagaatatttgccttgacagcctctttgtctgccttttcctcttcctcgccttctgtctttgccagcgggcggctgccgatcagaatgtccagattctctccttcgatcacaacctttgccttcttgtccatctgctgtgcagccagatggatcagtaaatcggagacaaatacgaccggatcgtcttccttctcaccgatgcagatctctacgacactgccatccttctttgcgaccacgccgtgaattgcaagcggaattgttacccactgataattcttcactccaccataataatgagtatcaaggtaagccatctccgtatcctcatacagcggattctgcttcaggtccaggcgcggggaatcaatatgagcaccgaggatccgcatgccatcctccagcggcttcctgccgatctgaaacagcacaagcatctttttcattccgcaggcatacaccttatcgcctgcctccagcttctttccggtcttctgcacttcctccaggctctgatacccggctgctctcgccagacggatcgcctccgctgcacattcccgctcggtctttcccgcattcaaaaatgccttatagcgtcctgagagtgcctccagctcctttacctgctcatctgtatatgtcttccatacattctctttcataattttaaaacctcctgttattcctttcataggtccagcagaaccctcttttagtataccgcatctttggcggataaggaagcgctgttttataaaaaatgccatgcacagagatgattttcatgcacagcattggtcaaaacggatattcacaatccgttttgctacttgctcattaccgaattggcctcccgtaactccctcaaaaaccccacggtatacggaatgcagatcagaaatgccactgcatccgcaataggctgtgccgcctcgactccggtcaggccccaaacacgcggcagcagaaaaatcaccggaaagaacacatagccctgacgcgcagtcgataaaaaggtcgcaagaccggttctcccgattgtctggaaagtcatgttacagcagatattcaatggcagcagcgccatcgtcagacactgaaagcgtaaggcctgtgtgccgatccggacgacatccgcatcattgccgatgaacagtcgaatcaaatgcggcgctgccagataacccggcaccgcacagatcgccatgaataccgttgccgataccgacataaacaaaaacgcctcccgcacacggtcataacgctttgccccgtaattgtaccctgctaccggctgatagccctgcccgaagccgatgagtacggaaaagatcagcataaaaaccttgctgacaatcgccattgccgataccgccgcgtctccgtagcctgccgccatccagttcagagcgatcgtcgccacacttgccagtccctgccggaaaaaggacggcaggccggatcctataatccggacgtacataccgatatgtcgcgatgcatttttccaccgcaggtctgcgatcgtgcgtccgctcacaaacatgtaaagcaaaatgcaaaatcccacaatctgactcaaaccggtcgcaatcgctgcacctgcgattccgagcttcagcccgaaaatgaagatcggatccagaaacatattcaggagaccgccggaagcgatgccgatcatcgcaaagcgcgcttttccctccgcacagagcatcttattcatcgtaaacgaagcaattaaaaacggagacgcatacaggatatactgcgcatactcacgcgcataaggccggattgtctccgtcgcgccgagcagaccgaccagcggatccagaaagcagcatcccatcacggcaaccagcaagccaagtaccagcgaaaaataaaatccgctcgctgccaccttggaagccgtctcatcctttttctctccaagcagccgggacatccagcttccggagcccattccgatcatgaagcctaagctctgtatcagccccatcaatgacatcacgataccgaccgcaccggaagcactcgttccgagctttgaaacaaagtaggtatccgcggtattgtaaatcgccgtcacaatcatactgatgatcgtcggcactgcaagtgataaaatcagacccggtatcttctctccggtcatcttccggaattgggcctcttttctgtcctctcccatatcaaattcctttctgttcatattttcttctattgttctgtttttttacaattgttatctcttatctaaaacaggctgtcctgtgagcgtttgccacagacagcctgtttctattttcgtttataagtattgcctcagcaaatctccgctccggatggcatcttcttctctggcaccatcagcgacagctctccgttctcatcctccgcacacagcagcattccttctgaaaggacacctgccagctttgccggcttcagattcaccagaaccatcaccttcttgccgaccatttcctccggcgtataatgcgccttgataccggatacgatctgctttacctgacttccgatctttacctgagagcagagcagctttttcgacttctttacagcctcacatgcaatgatctcacctacctggaactgcagcttttcaaagtcatcaaaggtgatctcttcctttggctcgatgtcgatacccttctcctcttcagcagccttttcttccgtgcttcctgcctctgcagccgctgcggcagcctgtgcctcatgcagcttctctgcgcgctccagcacctcttttacatcctggcgtgcgaacaggatttccggctgatccgttacccttgtgccggactcatacagtccgaatgtattcatctcatccaggctgcgcttcttcgcattcagctgtgtcagaatcttctctgacgtatccggcataaaggactccagaagggaggcaccgatcgcaatgctctcggtcagattgtaaagcacggtcgcaagacgatcctgctttgcctcatcttttgccagtgcccacggcatcgtctcatcaatatacttattgcagcgcttgaacagcgtgaatatctccgtgatcgcatctgccacacgcagatcgtccatcttcttgctaaccttgcccggaaccgcgagcgctactgccttcagctcttcatccaccggctcagatacgcctgcattcctcaccacaccaccaaaatacttgttggtcatggagatcgtgcggttcacaaggttgccaagcgtattggccagatcggagttcatacgctctaccatcagctcccaggaaatgacaccgtcattgtcgaacggcatctcatgcagtacgaagtagcgcaccgcatctacgccaaagaaatcaacgaggtcatcggcatacagcacatttcccttggacttgctcatctttccatcgccctgcagcagccaaggatgcccgaatacctgcttcggaagcggaagaccgagcgccatcagaaagatcggccagtaaatcgtatggaaacggatgatatcttttccgatcaggtgcaggtctgccggccagtttttctgaaacagctcactgctgttgccgtcacagtcatagccgatacctgtgatatagttggtcagtgcatccagccatacatatacgacatgcttgtcatcaaagtcgaccggaatgccccatttgaaggatgttctcgatacacacagatcctgcagacccggcagcaggaagttgttcatcatctcgttttttctggataccggctggataaactccggatgtgtattgatatgttcaatcagacggtctgcatatttgctcattttaaagaaatatgcctcctccttcgccggctttacctcacgtccgcaatccgggcatttgccgtctacgagctgagactccgtccagaaggactcgcacggcgtacagtacagtccctcgtaagagctcttgtaaatatccccctgctcatacagctttttgaaaatcttctgtacctgcagctcatgctccggatccgttgtacggataaatttgtcataggacgtattcatcagatcccagatacgacggatctcgcctgcaaccttatcaacatgctgctttggtgtgatcccggctgcttcggccttcagttcgatcttctgaccatgctcatcggtgcctgtctgaaaaaacacatcatatccctgctctcttttgaaccgggcaatgctgtctgccagcacgatctcatacgtatttccaatgtgcggcttgccggatgcatacgcaatcgcggtcgtaatataatattttggtttactcatcgtaactcctccttttcctgcgggtagcaagcccccacccactgcttattgctccgcgcaattgaagcaggagccttgcttgactcgataaaaaagcagccctgtctctttccagaagacgagctgccccgtgataccacttctattcatccacacctcgcagcgcagacctctgtgggtactcccataccccgtcgctgtaacaggcgaacctgtcatgtcctaaccgcacgatctgtcttatgatccatctgccgctcggacatgcctctcagaagccatcttcctcatcccatcctgcaccccgtctcaccattcgggaattctctgtagcatttctgaatgtgtactctcttcgtcgctgagtgtattgctctatctgattttccgataacccgctattacctttatttttaaacttagcacaggcaatgaattctgtcaagttcatcttgcaattccacttttcccccgctacaataagcccaggatatcaaaaacagaaaggatgattttcatgattactcacgaacacatcaaagctacgttcgcttctcttgttgccatcgattccccttctctttcggagcgggagatggccgatcatataaaagcactgtttgccggaattgggatcgcattgctggaggataaaagtggtactgtgaccggatcgacggccggaaatctctacgcgtatatagagggcgaccagacgcttgagccggtcttactggcggcacatatggacaccgtcgcacctgcctgcaaaaaacaggccgttttccatgatgacgatcgggtgacaagtgacggcacaaccgtactcggcgcggatgacctcgccggtgtgactgcgatttatgaggcgctccgaaagatccgggaacagggcagctttcaccgtccggtcgagctgctctttacgaccggcgaggagctgtactgcaagggagccaacgcgtttgacttttccaatatccgttcccgcagtgcctacgtgcttgatttaagcggtgaaatcggcagtgccgcatatgccgcaccgacgcttctctcctttgaagcccgcatacaaggcaaggcttctcatgccggcttccgaccggaagctggtatcaatgccatcttagctgcggcaaaggcaatcgcacagcttccgcaggggcatatcgatgaggaaacgaccgggaacatcggtgtgattcacggcggtgccggtacgaatattgtctcagaagcctgcacggtaaagggtgagatccgcagcctgaagcacgaacgcgcactggcacttctacagcaatacaaatcgacatttgaaaaagaggcttcctccctcggcgcatcgcttgtctgggcagataccgtcaatatcatcgcttatgaaacgccagctgacagcgacacgaccactgcctatcgccgggctgtcgtgcaggagggactgacgccttctctttacagaacctttggcggaagtgacaacaacgtctttgcacagcatggcatcgagggacttgtgatagcgacctccatgaacaacgtacacacctgtcaggaatactgcagtatccccgaaattgcacaggtctcccgcattctgctcagactgctgaactgtcagtgattttacttctgatttttatctttctttcataggatagcataagaactcacacggagaattcttatgtccgcatcccatttcactctgcgaaaacgcatactgctgctcctgcttttgctcgctgcagccgtatgcgtcattcttttcctaaccggatttccctttactcccgaaaaaaaatttgactgctttacacggcaggtattctgcgaggagctgtcaggtaatacgttaagcctgcactacacggtcgccagtccatccgactttggtctggaaaaccttccgatatccctaggggacggaagcacaatggcgcagcggcgtgctctggctgcctgtgaaaactatcggaaaaccctggatacattttcttttgaagagctgaatgcttcgcagcaggtcacctatgccatttttaaggactggctcgacaccgagctttccggtgcagattttctgctctatgaggagccgctcggccctgcgctcggtattcaggcacagctcccgatccttctcgcagaatattcctttcgcacaaaaggcgatatcgaaaattatctctcactgctgacgcaggtaccggattattttctctccctgctctcctttgaacgggaaaaagcagtcgccggactctttatgagcgatgcctgcgcacaggaagtcatccggcagtgtcaggattttattcagtctccctctgaccactacctgatcaccctgtttcagaaaaaaatcgatgccttctccaatctctctgtcgatgagaaaattgcctaccagaagcgaaatgaagctgccatcaccggctatgtccttcctgcctatgagacactcatcaaaggactcacggagctccttggcaaaggacaaaatgaacaggggcttttttattttcccaaagggcaggcattttatgaatacctcgtaaaacgggaggtcggggattcacgcagcattgcgcagatcgaggaggaaatcaagcagcagctcgtcgcagattatcaggcgatccagaaccggctccagacggcgtctcatacaacctccgcttcttcacagccttccgctgccgcggcttctgtttccggtctgtccactgccgcgcttcctgctctgacattcttatccgacatttcgacagactccgacacgtctgcatcccttgccgacgacagcaccgatgcagtcgccatgctcaaagatctgcgcaaaaaaatttcacaggactttcccgacattcctgccgtctcctgtgaagtaaaatatattgataactctctgaaaaattatctgagccccgccttttatctgacaccgccgatcgatcagtatacagaaaatgtcatttatctgaatcctgcggaaaactgccgcggcctttccctgtatacgacgctggcgcatgaaggatatccgggtcatctgtttcagactgtcagcttccatgcacagtcacctgctccgctccgcttcctgctcgctcccggcggctatacggagggatgggctacttatgtggaaatgtatgcctattcgctctgggatggcggaagtgatgccacggttgttcagcagaaaaaccgtgccttctccctcgggcttgccgccctgctcgatattggcattcactatcacggctattctcttgcagatgtctctgcctttctgacaaagcttggattcaacgcttccggagcctcctccctctaccgggcgatcctgcaggctccggccaattatctgcaatattatgtcggctgcctgaattttcagcgccttcgcagtaccatgcagcaggcattgcaggaacacttcgtattacgcgattttcatgcggcggtactcgaagccgggcctgcgccgttttctattctggagaagctggtcgctcaaaagcttagggtgacagtttcataacccgctctttttagagggggcgggcagtgtctggtgaaaacactgcccaaaaagtgtgtgtgatatttatttctaatcccggtcaaaaaccggaattggaaaccataagaaatgtaaaaattacactgcacaattgaggcaggcgttactggatttggtaaaaaaagaggcgtccatattcttcgataaatatagacgcctttgtcaacaaacatatataaaatttatgcaatcacactaccacagagctgcgtttttgtcaagccctattttgtattctgttactacaaaacatccagcatctttgttgctgtgattgcgatcgcccccggtccgatgtgacaggatatgcttaaagagagcggacgcatgatgatctcatgatccggaaatgcctcctgtacttcctgcttccagaggtttgcttccgtcagatcggttcccgaataagcgaggtgaatgtgaaccttatccgcagcctcattggaaccgaaccgctgcgcacagtcattccgaactgcctcaagcatcgtcgccttcgccgcctttaaggtacggctcttcgcataggcgtcgagcttctctccttgaatctgcagaaccggcttcagacgaagcagtgtaccaagtgctgccgctgccggtgtgatccgtccaccctttttcagataatacaaggtgctcagtgtaatataaatgctggagtccgccgctgtcttcatcagatagtccctgatcgcctctgcattccagcctgcatcagccagtgcctttgcatcgatcgcggcctggcgctgtgtcacggaaatacgtttattatccacgacctgcacttttccgtcatagtcctgcgccagcatcatcgccgtctggcaggagctgctcagtccgctcgacatcggaatatagataatctcctcatacacctgcagaagcttatcccaaagctctgtcacatccgtcatcgccggcatggaagtggaaatctcagccttctcgctgagatgctgataaaactcttcctgcgaaagtgtcctttcttcataatacaatttcccattaatataaaatggcatcgggacgacaaaaatgtcaagctcctttccctcagcctgtgtgattccactgttgctgtccgttactatcgcaaccttactcatattgcctccttatattatcctgaaagcattcccagacgctcccgcttctcattttcacaggcgataagccagccagccctgcctgtcacttcatgcccttccactatgctgtgtgtatagcaattctctgctatcttcctgatttccttactatagcataaatttttccgcgccgcaattgattcttgcttttccctttctttgacgatatactgatgacatatcataatgctagggtcaaaaggtcaaaaagccgttcatgcttgcatgataaagcttttgaacgcagatcgcgaagcgactgcgttcatgagcaagtagcgaagcggattgcgaatgtccgctttaccttttgcctctggcatcatggtatttacgactgacagaaccgggaggaaatatatttggaacagaaccagattttaaaacgatatggaacggattataagaaaatgacgaaggagctgctcgaggcggcggatctgattggattgatatcggatcacgactgtcggatcgggatcaagccgaatcttgtggcaccggcggatgcttcatggggggcgacgacccacccggagatcgtggcgggaattattgaatacctgcaggatcacggttgccggaatcttgtgatcgcagagggatcctgggtaggtgaccgcacggaagagtcgtttgaggtgtgcggctattggaaactgtcggaacagtacggcgtgccgcttctggatgcacagaaggatacacattttacaaaggactgtgacgggctaaagctggagctttgcagctgtgtaaaagatatcgattttctgatcaatgtaccggtgctcaagggccattgtcagacaaagattacctgtgctctgaagaatatgaaaggtcttctgccaaatacggagaaacgacatttccatgcgatggggctgcaccgtccgattgcacatctggcaaagggcatccgtcaggacttcattgtggtggatcacatctgcggtgatctggactttgaggacggtggcaatccagtcgtgaagaactgtatcatggtctcacgggatccggtactcgtggatacttacgtctgcggcctgctccactatggtattgaggaagtgccatatattcagatggccgaacagctcggtgccggttcgaccgatcttgagcatgccaagatcggagtgctcgcagaggaaggaacgtattatctggaaggaagtgctatctgggatgaagaactcccttacgcggataaagtagtagccgtacaggaccttgtacaggaggttgaatcgtgcagtgcctgttacgggtatctgcttccggcgctggatcgcctgcggaaggagggcctgcttgaacagctgggagaaaagatatgcattggacaggggtatcgtgggaagcatggaaagctcggagtcggaaactgcacatctgggtttgatttctgtgtgaagggctgtccgccgaccgagacggagatttatgaagcgttaaaacgatatattgtcctaggtacgctgacgcaggaaaagagatactagcgccacagatgtccgcatagattgtaaaaaagcatctgtgagggctgttttgtggaaaaggaaagacggattttgatcagctttggggcggctgctctgcttgggttactggcaggggtggtagccccgaagctgtttcgcatgggagatggaagctatgccggatttttcagcctgtacagctttggaaaatttgcgcagctgcccgattcggactttacacagcttttctggtatcttttggtcaaacgtctgcgtctgatttgctttttatggatgagcagctataccccttttggattttttgcgcatctgcttctgcttttctggattttttttgcaggcggtatgctgctgtcactctttttactgcgggaggggacaaatggcatcctgctgttcctgtgttgcctgcttccgcagtggattctgtatgtacttgcttttcggggagagctccggctgtattttagcaagtatggaattgagcgaaaaagggactgcggcataatatcaggacgggaaggggagccacgggaggaatgtcctgcagagtatgacagagcaacgcggacattggattttgaaaaaacatactccgggtggatgaggagagagtttctgagcatgctcatgctctgtgcggtgggatgcggaatggaggcatttatagggatgcggctgctgcaggtaattcccggactgatgtgaacacagaataagcattttctggctgtatattcccggaaatgaatttaccatatctggtgccggaaaaaaatagttttacgacatctggtaaaagcgcagaaatgctggattccagactgattttatgtgaaatttaccgttgactttacataacaaactgcgtaaaatgtgaagtacctattgtaaattggtttgtgtgcgggcaatggcctgtgcccgggctgtatgagggaagagataccggacgagaaagaagaggaatcgtgatatatggaactggagctgcctctgtttattaattacctgaaagagacgaagaatgcatcggcgagcaccgtcagctcttatcagcgtgatttgcgcaagctggagagttatcttggtgagcatggtgtggagcatgtcgagaatgtgacctcgaccaacttaaattcatatattttatatctggaaaagcaggggctttcaacggctactgtttcacgcaatgtggcttcgatgaaggctttttttcattatgcctgtaaatcgcatctgcggatggatgatccgacggaacaggtaaaagcaccgcatatcgagaaaaaaatgccggagattctgagcatggaggagacggtgcggctgttagagcagccttccggaaatacgccgaagcagatccgtgaccgtgcgatgcttgagcttctgtatgcgaccgggatgcgggtgtccgagctgatctccctgaaacaaaatgacctgaatctgatgatgaattacgttatctgtaaggacgagggaagggagcgggtgatcccgtttggcaataatgcgaagcagacgctggagcgttatctgctgggcagccggagtatacttctgcacgggcaggaaagtgagttcctgtttgtaaactgttccgggcattccatgagccgccagggcttctggaagctgatcaagcaatacgcggccagagccgggatcgagacagatattaccccgcataccctgcgtcattcctttgctgcgcatctggtacagaatggggcggacctgcgcagtgtacagcagatgatgggacattccgatatcgcgacgactcagatgtatgtgaatcttaatctgcagaaaatgcagcgggtctacagtgaggcacatccgagaggatagacctgtattgcttttatcctgggcctgtcattgccggagccttggagagtgcagaatacgtgtgaagatcaatttgaagggatttttatggcagtaagatcagaacatttgacgccggtgcgcagaaaagcgccgacagcaagaaaaaagggtcagacaattaagaagctgcgcagaatgattgcggcaggtcaggactattacgattacaacctgctggcagtcgtgattctgctgacaagcttcggactgatcatgctttacagtgcgaccgcgtataagtcgatgataaattcagagacacagagcacgatgagctattttggaaagcagacgctgatcagtatcgcagcgttgggaattggattttttgtctc

SEQ ID NO: 3132 - DNA, 32759 bp, Unknown
  16S sequences of unknown bacteria
cgccccggcggccgcgcccgcggtggaggccgcgcccgtcgccgcggcggatgccggcgcggacttcaacgcggcaaagatggtgacctcgcccatggtcggcgtgttctacgcctccccgtcgcccacggacccgccctttgtcaccgtgggcagcaaggtcaagaagggcgacgtgctctgcatcatcgaggccatgaagctcatgaacgagatcaccgccgaggaggacggcgagatcatcgacatctgcgccacaaacggcagcgtggtcgagtacgggcagatcctctttaagatgctgtaagggaggggagcaagcatgaatcgtgaggaaatcaagggcctgcttccgcaccgcgagcccatgctcctggtggacgaattggagctcggccaggacggcaccgcgcacggcaagtaccgcgtgcggggggacgagttcttcctgcaggggcactttcccggcaaccccgtggtgccgggcgtgatcctgtgcgagatcatggcgcagtcctgcgcgctgctggtcggcgcggaggcggtcgggaagacgcccatgtacacgggcctggacaaggtgaagttccgcaaccccgtccgcccgggcgacacggtggagatcatcgcgagcctggagcggcgcatggggaatttctttttcgccaaggcggaagcccgcgtaggggataagatgtgcgtgcagggccatctctccttcgcgatggtggaagggtaggatttccgtgttttccaagatcctgatcgccaaccgcggcgagatcgccgtgcgcatcatccgcgcctgcaaggagatgggcattgccaccgttgccgtctactccgaggcggaccgcgacgccctgcacgtcgtgttggcggatgagagcatctgcatcgggcccgcgcccgcggcaaagagctacctcaacatgagcgccatcgtttcggcggcggtgctcaccggctgcgaggccatccaccccggatacggcctgctctccgagaaccccaagttcgcggccctgtgcaaggagtgcggcctgggcttcatcggcccggacgccgagatcatcgagaagatgggcgataaggacgccgcccggcgcaccatgcgcgaggcgggcgtgcccatcatccccggctgcgacgtggtggagggcgtccggcaggcccaggcggaggccgagcgcatcggcttccccctgctcatcaaggcgcgcgcgggcggcggcggccgcggcatccgccgggtgaacggcccggaggaggtcgagatggcgtacctgtccgccacggccgaggcgcagtccgccttcggcgacggcgcagtctacatggagaagttcctcttcccggtcaagcacatcgagatgcagatcctctgcgacaactacggccaggtggtctgcctgggagagcgcgagtgctccatgcagcgcaagaaccaaaagaccctcgaggagagccccagcccctccatgacggaggagatgcgccgggagatgatccgcgtctcgacgctggcggccaagaccgtcggctacaagggcctgggcaccatcgagttcctgctcacgcaggagcatcagttctacttcatggagatgaacacccgcctgcaggtggagcaccccgtgaccgagatggtcacggacgtggacctggtcaagtggcagatccgcgtggccgcgggcgtcaagctcgacttcacgcaggaggacgtgcgcctttccggccacgccatcgagtgccgcatcaacgccgaggacccctccatgggattccggccctcctgcggcaagatcacgctgctgcacatccccgggggaccgaaggtgcgctttgataccgcgctctaccacgactacgtcgtgcccccgttctacgactccatgatcggcaagctcatcgtccacgccggcacccggcaggaggccatccgcaagatgcaggccgccctgtgcgagatggtcatcgagggcgtggagcacaaccgcgagctgcagctggagaccatctccgcgccggagttcatcgacggcagctacaccaccgacttcctcggcaagctgctcaaggaactctatccgtagcgcgcaaaagggggaggcgcttcctgcgcctccctccatagaatcaaaaaggaggacaggccatgctcaacaaaagcatgttcatcaagccgcgcaacgccctggaaggcgacggacagagcagcgcgcagccgtccatcccggagaagctgtgcagggcctgccccgcgtgcaaggcggccctgttttcgcaggatcttcaggaaaatctcctggtttgcccccagtgcggacactacttccgcatggacgtggaatcccgtctgcgcctgctggtggacgagggcagctttgtggagctgtacgcagacctgaccacaaaggaccccatcgccttccccaactatgagaagaagctctccgccgcgcgcaaggccaccggccgcccggacggcgtggtctgcggcaccggccgcatcggcgggcaggcggccgccctgttcgtcatggacgcgcagttcatgatgggctccatgggcacggtcgtcggggaaaagatcacgcggacgtttgagatggccgcggaacaggggctgcccgtgctgggcgtcaccgtctccggcggcgcgcgcatgcaggagggcatcttcagcctcatgcagatggccaagaccagcggcgcggtcctgcgccacagccaggccggcaacctctacatcgcgctgctgaccgaccccaccaccggcggggtcacggcctcctttgccatggaggcggacatcgtcctggccgagccgcaggccctcatcggctttgccggcccgcgcgtcatcgagcagaccatccgcgccaagctcctcgagggcttccagcgcgcggagttcctgctggaaaagggcttcgtggacgcaatcgtcccgagaaacgagcagaaaaagacgatcgcccacctgctcaagctccacgagaggagggaggaagcatgaccgcttacgagcgcctgtgcgccgcccgcgcaaagggacggcccacctcccgcaagtacatcgacaacatcttcgactccttctttgagctgcacggcgaccgcttcttcgcggacgacctggccgtgcgcggcggcatcgccgagctgaacggaaggcccgtcacggtcgtttccatggagaagggcgaggacaccaaggagaaaatcgcgcgcaacttcggctcccccaacccggagggctaccgcaaggccctgcgcctgatgaagcaggcggagaagtttcaccgaccggtggtctgttttgtggacacggcgggcgcgtactgcggcctgggcgcggaggagcgcgggcaggccagcgccatcgccgcgaacttgatggagatgatgggcctgaagaccccgatcctctccctcctcatcggcgagggcggcagcggcggcgcgctggccctggccgtcgccgacgaggtctggatgatggaaaacgccgtctactccgtgatctcgcccgagggcggcgcctcgatcctctacaaggacgcgacccaggtcgagcgcgcggcggaggagctgcgcatcacggcgcaggacctgtacggcttcggggttgtcgagcgcgtgatctccgaggcggagggctttgacgcggcctatcgcagcctgcgcgaccagctggacgcggagctgaaccgccgcatgcagatggacgtgcagagcctgctgcgcgcaagatacgaacgatttcgcaaaatcggagggctgatggaatgatcgtcatcgtaaccgattcaacggcgtgcctgaaccgccaggaggcggagcgccacgtgcccatgacctatacattggacggcgtaacccaccgcgagcactttgtggaggagaacggcgactacattgcccgcatcgaaggggcaaagaccttcgccacctcgcagccgcccatcgacgcctacctcaagacctttgcggagctgcggcaggcaggccaccaggtcctgtgcctgtccatctcctcgcgcctgtcgggaacctatgccaacgaggtcgtctgcgcccgcgaggtgggcagcgaggacatccgcgtggtggatacgctgacgacggccggcgggctctacatcatggtgcgcgccgcgcgccagttcctggacgcgggctacagcctctcggagacggcggagaagctggagcagatgcgcggcaaggtcaagacgctcttttccgtgggggacatggagcccctgcgccgcagcggccgcctcggtcccgtgcgccagagcgtctgcaccgtgctcaacgtccggcccctgctcacctgccgggagggcgcggtcatggcctgcggcctggtccgcggcaagagcgagcagatccgcgccctggcgcaggccgtgcccacgggcgcgcgcggcgtcgtcgtgcagtacatcaaggacatcgaggccgggcgccagctgcagcaccgcctggagagcaagctcggccagtccgtcatgctgcgcccgatcggcccggtgctggccatccacctgggcgtggacatcatcggcgtcgcctggctggaaccctgagaaacatccgccacaaaaaagacccgccgcgttcccggaaaccggggcgcggcgggcctttttttacgaaaagggttagtttgcggggcgcgggcgctcgccctgccggcgatagagcaccagcacgaggaaaacgatcgccacgaccagcagcgcggccaggcacagcacgaccatgcccgtcaggtccagctcgaacagcaggggcaggtagttccccgcgttgaagcacaggtgcagcagaacgcagggccagatgctgccaaagtagtcgtccatcaggcccagggcgagcgcgagcaggaaggtgaacccggcccacaggagctgaccgtgcaccaggccaaagagcaccgcctgcgccagcagcgcgacccaggtcggcatgacctttttgaagttcccgtagatcaggccgcggaagacgatctcctcgaggatgggcgcgccgaggaccgtggccaggatctcgacgaagggatagcgcccggcggtcagcgaggaggaggcctcgatgtactcctgcatcaggggcgtctccggggggatgagggacagccccgcgctcacggcgaagtaggccgcaaggcccagcagcatgggcgcccagagcatctccgggctgcgcggcttgcgcaggcccatggcggggagaatcccccgcgttccctgctgcgcgatgagcaggccgcagagcatgccgaacgtcgcaatgtagcacagcaccatcacgacatccatcatgtcccaaaagtgcgcgtacacgttctcataaacattgggcgtaaggcggcccccggacgccagcaggctggagaacaggctgccataggtgaacaatccgcccgcccacatctgcaccagcaggaacacggccaggtacagcagcgcaaggcccgtgtgtttccaaaatttcttcatgaagatgcctcacctcgtaggaaaaaagatggacggcagacctcgccgtccctttcattatacgccagcaagtgtgacatttccatgaattcttctggatgggcagcgcgcggggaaaaagacgcgccgcccgccccgggtcgcagggcgggcggcgcggacaggccgggcgccggtcagatctttttcgcgttcttggtgcgcaggaaggcggccaggtcctcgttgcagccctcgcggctcagggcatagccctggttgggggagagcatcaggtagaagttcgtgtccgtctcccagagggcgaagagctggtcaaaggggatgaccgcgtggccgccgctgtactccacctcaaagcggtcggcgtagaaggaaaagctcatgttctggtcgcgcatcacgcggttggccaggaaggcccggcgcgtgttgatccgcacgaccagcatgtagaccgcgaggaacaggatgcacagcagcagggggtacgggtgccccgccatggccgagaacagcacacacagcagcaccagcgccacgaccgccagcgccgtatggcggcggcgcagcagcgcggtcttggtcatctgccagcattcctcccaggtgaattgggattttgcggtgaagagcggttccatggggcgcacctcaaaccagggagaactccagcttctccagctggtcgtccgcgctggagaagcccagcatcacgacaaagcggccgggctccagcagccattcgcggccgtcgtggaagcggagcaggtcgggcgtgatgggcaggcagacctccttttcctcgcccggggcgaggtccacgcggacaaagcccttgagctccttgaccgggcgggcgatgcgcgccgagacgtcgtgcaggtacatctgcagcacggccgtgcccgcgacgccggagtcgttctgcacccggacccggacggtgagcgcgccgtctgcggccatctcgccggaggagagcgccgcctccttgatgcggaaggaggagtagctcaagccgtggccaaagggatagagcggggtgttcggcccgtcgaggtagcgggagacgaacttctcgtcgctgacgccgttccaggggcggccggtgttcatgtggttgtagtagatcgggatctggcccatgctgcgcgggaaggtcacggagagcttgccgctggggttggcgtcgcccgtgagcaggtcggcgagcgcatggccggcctccgtgcccgcaaaccaggcgcagagcacggcgctggcgttcttgtcgaaccaatcgagcagcaggggacggccgcaggtgacgaccgcgacgacgggcttgcccgccgcggccaccgcgcgcgccagctccatctggatggcgggcacgcagatctcctggcggcaggcggcctcgccgctcatggtcatgtcctcgccgatggcgaggaccacgacgtcgcactcgcgcgcgagcttgaccgcgcggttgatgccgccgacgagctcttcgtggatggtcgtcgcgggctcgcacagcacggtgaagcccttttcctccaggccctggcgcagcgtggcggtgcggtccgcgcgcttggagaactgccagggacccagctggtcctggctgtcggcgcaggggccgaccagcgcgatctttgcgcccttgcgcagcggcagcgcgccgtcgttcttgaggaggacggcggactcctgcgccaggcggcgcgcgacctccaggtgcgcgggcgcaaggtaggccgcctcttcctcgccctcgtgcatgtagaggtaggggtcgtccatgatgcccaggcggtacttgagggtcaggatgcggcggaccgcgccgtcgacgagggactcgggcaccttgccctccatgacgagctgcggaagctcccggttgaacaggtccgtcgccatctcgacgtccaggcccgcgttggcgcagcgctcggcggcctcgcgctcgtccgcggcaaggccgtgggcgatgacctcgaaaacggcggcgtagtcggagatgatcacgccgtcaaagcccagctccttgcgcagcagctcctgcagcacgtagggagaggcggcggaggacacgccgtccaccaggttgaaggagggcatgaccgtggccgcgcccgcgtccacgccggcctggaaggcgggcaggtatacgttgtgcagcgtggagggggagatctccaccgtgttgtagtcgcggccggcctccgccgcgccatagcccacgaagtgcttcaggcagcaggccatgtgctcgccgtcgcccaggccctgtccgccctcgccgccctggtagcccaggacctcggcgcgcgccatgcaggcgtccaggaacgggtcctcgcccgcgccctcggagatgcggccccagcgcgggtcgcgcgcgatgtccagcatgggggcaaaggccagcatcacgccggcgcgggtggcctccctggcggagatctccgtcgcccggcgcaccaggttgggatcaaaggagcaggaccagcccagcgggatcgggaagatggtctggaagccgtggatgacgtcctggcagaagatcagcgggatgcccaggcggctcttctccaccgcgatgcgctgcaggcggcgggccatggcggcgctgtccggcatgtagatgatggagccgatctttccctcggcgatcaggccctccaagggcgaggtcttgacctcgccgccgatggccgtggtgtccgccccggcggactgcaccatctgaccgatcttttcctccagcgtcatgcgggagagcaggtcctctacgcaggttttgatttcttccggtgttcttctcattctcttcgctccttttgcgctcgacaaagcgaggggttcacgttacaatggatatcatacacgatgcaagggggttttgtacacatggaaaatcatccgcttcactacgacatcgacgccatcgggcaggacatcgtccactttgaggacttcatcgactcctccttctacctcatccagggcgcggaccgcgcgctgctgatcgacacgggctgcggcgggggcaacgtgcgccgcctggcctcggccttcacggacaaggagatcgacctggccgtcacccacgcccacggcgaccacgacgcgcacgcgggcgagttcgaccgcgtctacatgcaccgcgcggacatcgagctccgccgcgccgcgcagctctgcgcgccggcggagaagcgcctggacgtggaccggttcctggcgctggaggacggcgccctgctggacctcgggggcggcgcggtcgtgcgcacgctgcacatccccggccacacgccgggctccgtggcctttgtggacgaagcgcacaaggcggtcttcacgggggacgcgatcggctcgggcgtgggcgtgtggatgcagctccccggctgctgcacggtctccgaatacaaggcggcgctgctgcactttgccacggagctgtacccgtaccgggactaccgcttcctcggcggccactaccggcaggcggacccgccctacagcaaggcgcacaaccccgtctgcatgcagatggtggaggacatgatccggctctgcgacgagatgctcgccggccgcgcgcaggacgcggtctttgcgggccgggcctttggggacgagcagccgcacatcgcctcctgcggcacggccgccatggtctacctgccctcccgcgtgcggtagggctcagggcgcggcgcccttgcgcgcgcggtactcgctgggcgagagccccgtgcgcttgcggaagaccttggagaagtagaggttgttctcaaaccccacggagttggccacggccgtcaccgagagcgcgggctccagcagcagggcgcaggcgcggcgcaggcggtattccgtcaggtattccttgggggatacgcccagcgtctgcttgaacaccgtgtacaggtggctgcggtcgatgccgacaaaggccgccacgtccgtcaccgtgagcggcagcgcatagtggtgggcgatgtaggtctcggccttgcgcacgtactgcgaggccaggtccccgacgcggctggggtttgcgcggcgcatgagcagcgccagcgcgctgtagagcgcgcccgtcatgcgcacggcgtgcaggaactccgcgccccgcacctcgcagatgcgcaggaccgcctggcggaaggcctcgccgttctccaggcgcagggtggggcggtccggcgcaaagtccgtgcactgcaggatgggcagcgcgtcgttgcccgcaaagcccacccagacgtactcccaagggtcgttttcgtccgcgtagtaggtgatctccgtgtccggcagggccaggaacgcctcgcccgcctgcagggagtagcgctggccgcgcgtctcgtacacgccgcagccggagaccacgtagtggatcagatagtggttgcgcacgcccggtccccactggtagcgcggcgtgcagcgctggtggccgacgttgtaaacgctcagcgccgtcatctcgctcggcggcattttgtaggactgtttgaaggtgtcctccatcgcaagccctcctttttgacccctttggttcattgtagcacattccgggcgcaaatccaacatttttccatgggacagcatcattcctctattgaatttgcgcgccctttgccctaaagtagaggagaagaggaaaagtgcagacggatcgattcaaaaaaagggggcttttggaatgaagattttggtcttgggcggcgcaggctacatcggctcgcacacggtttacgcgctcctggacgcggggcacagcgtcgtcgtcgcggacaacctgctcacgggcttccgcagcgcggtgcacccggaggcgaagttctacctgggcgatattcgcgacagccagttcctaaacgatctgttcgcccgcgagaaggtggacgtggtcatccactttgccgcctgctcgctcgtcggcgagagcgtcaaggacccgctcaaatactacgacaacaacctgtacggcaccaaggtgctgctcgaggccatggtgcgcaacggcgtggacaagatcgtcttctcctccacggccgcgacctatggcgaacccaagcgcgtgcccatcctggagggagaccccaccgagcccacgaacccctatggcgagacgaagctggccatggagaagatgttcaagtgggtgagcaacgcgcacggcctgcgctacgtctccctgcgctacttcaacgcctgcggcgcgcacgagagcgggcgcatcggcgaggcgcacaaccccgaatcccacctcatcccgctgatcctgcaggtgccgggcggcaagcgccccttcatctccatcttcggcggcgattatcccacgaaggacggcacctgcgtgcgcgactacatccacgtcatggacctggcgcaggcgcacatcctcgcggcgcagtacctcctgaacggcggcgcctccgacatcttcaacctcggcaacggcgtgggcttcaccgtcaaggaggtcatcgacgtggcccgcgcggtcacgggccaccccatccccgcgcgcatggaggaccgccgcgccggcgaccccgcgcagctcatcgcctccagcgacaaggcgcgcagcgtcctcggctggaacccgcagcacgcggacctggaggagatcgtcgcctccgcctggaagtggcaccacacccatcccaacggctacgaggaataaaccccgaaaacaaaacggagcgcccaagcgggcgctctgttttgttttagtttgcggcgctctccgccccgccctgcggcaggtcgggcttgagcacggtcttccacttgccgctctgatagcgcagggtgatgagcagcgtgcgcaggcactggtccgccaccagcgcgatccaggcgcccgtaaggccccagcgcagcacgtagaccgagaacagcgcgatgagcggccgcaccagcatcacggtcacgaagatgaccttggccgtgtacttggtgtcgcccgcgccgcgcagggaacccgtcaggatgaactgcgtggactgcaggggctggatcagggccaccatcttcagcaggaaggcgccctgctcgatgatgctcgcgtcgtccgaatacaggcggatgatcggctccccgaagaagaacagcacgaccatcagcaccacggagaccgcggtgcccagcacctgcgtgcggcgcgagtagagcacggccatgtccgcgcgcagcttgcccaggctctggcccacgagcgaggtcgccgagaccgcgaaggcctggccggtcatgaacgtcagggagaggatgttcatgcagacctggtggcaggcgagcatcacggtgcccaggctcgccacggtcttggcgtagacgatcatgcccacgcgcatgcagagctgctcgatcatggagggcaggccgatgcgcgcgatgtccgcgatggactcccggtccggccggaagcccgcgcgcaggttcaggtgcacgtattggttgcggttcagcaccgcggccagcgcgatggccatcgccacgccctgcgagatggaggtcgccagcgacgcgcccgccacctccagccgcggcatgcccatgcgcccgtagatgaagagatagttcaggaagatgttcacgacgttggcgatcgtgttgtagaagagcgcggtcttggaatctcccgcgccgcgcagcgcgttggtgatggtcgttgtcagcgcgaggaaaggcaggcccagcatctggatctgcaggtactgcatgccgcccagcagcgtctgctcgtcctgcgcgcccatgaacagcaccagcggatgcgcaaacgcaaagcccagcaccgcgaagaacacggacaggaccaggttgatcatcagcgactggcggaggatgagctgcgccttgtcctgccggcccgcgcccttgtggcgcgcgaccatggtcatgcagcccacgttgagcgcggtgaacatcgtcgagagcaggaacttgggctgcgtcgtcagcccaacggacgagatggcccacggcccgagctgcccgaccatgatcaggtccgccatgctcgtcagctgcgtcagcagcagctccaccagggacggccacgcgatgcccacgatgtccgagtagagctcgcgcgaggtcacgccctcgggcagggagatcttctgccggagggattcgcccgcctgcaggggctggccccagtccagccggtccagagccgtgcgatgggctcgcggtgtcttggattgcggaatcgttttctcagccatgcggttgcttgtctgtggacagactgcgcccacaaacctcctcctatccatgaattccctatgcgaatatcataccggttccggccgcggttgtcaatgcgcgcgttccaggggcgtctccaaggcagtgcgcgcggaatttgcgggattttgtcgaattgcggcgaaaatcggtttacttttggaaacaaacatgttatggttaagatgcagactaccaaaaattggataaaacggaggcgacagcatgaagacttgggttgcgttttgggcgtgctttgcgatcctgttcctgcccctgccggcggaggcggccgcgcgcgccagcgtcacgggcaaggcctacaacgtcgaggtccgcagcgtggacgtggtctacagcctggacgggaccttccgcgccctggagaccgtccgcacgacgggccggcaggaaaacgtcaacgaggtgcgctttgcctacgactttgagcaggagcagccggaggcggccggccgcttcctcgaggaccagaaggtcgccctcgtgcgggtggatggctttgacccgcggatcggcgcgattgcgggggcggagcgcgtggtcgtgaccgtggacgggcaggagctgcaggcggaccgcgccgcggactttgcggactacgtcggctggcacaacgtgcacagcgggagctacggcgtggtctttcccatcttcctcgggaaggagagccggcaggagacgcacgtcgtccaggtgacggcgctccttacgcaggacggcgtcgagcgcgagatcacggagacggccgtgctcaccctggcgctggagaacgagcacgtctacaaggaggagcgcgcgctgcgcatcctgaacatggcgggcacgcacgtggacgcctactgcgtgggcgaccggatctacctggactatcccagccaggactactacaactatcaggagtgggtgctgaaccgcgaagcgcccgcggaggtggagatcgcgtttgcggacgcggccgggcaggccatcccgggcatcgcctgggcggcgcaggcgcgcagcgaggccggggagacggcggccctcttcctggaggcggaggggaagctggaggacggcaaggcggtctttcgcgcaaagccggacagcaacctcgccgagcggcagaaggtggtcttcaccgtggagacggccgaggccgtctaccgcacgccggagatgaccatcgtggagcgggaggacatccccgggcgcgatcccaagggcctctacttcgcgcagagcgagatcaccctggccgtgggccagtgctttgacccggtggtgctcgccgtcgccgacgggctccccgtgcgggacggcggcgtgggggagctgcagatcgccctgggccagggcagcgacaggaccatcctggaggtgacggaggaggggcgcgtctacgcgagccgccccggcgcggcctacatcaccgcgacatacgagaccgggcgcgtgacgcaggacagcgtggggaacatgcaccgcgattcctacggcgcgccctcgatgaagatcaccgtcgtgccggccgaggctgcgccggcggaggcggcaccggcggatgcgcagccggcgggccgcgcctggtacgtcgcctgccgcgcgctcaacgtgcgcgccggggcggacacggcgcaacccgtcctgcggacgcacagccggggcgaaaggctggacgtcgtccgcgtcgccgacggctgggcggagctggcgcagggcggcttcgtcaaggcggaatacctcctctgggtctaaaaaatgcgcgccgccgattttccttcggcggcgcgcatcgcgtcagttggaggcggattcttccagggattcgggctgcgggccgttgagctccaggagctgcttctgccggcgcagcagcaggtagtagctggggatgagcagcgcgtccgcgcccagccaggccgcgggctcggccaggaagatgccgagttcgcccaggaccttgggcagcgtcatgaccacgaggatgcgcatggccagctccatgacgcccgagatcatcgggcggaccgtgtcgcccatgccctgcagcgcggagcggtagatgtgcaggaagtagaggatgcagagcatgtaggccagaatcgataggtaggcgtaggccacgtccagaacctgctggaccacgtccggctcgccggagacgaagagcgagaggatggaccggccaaagaccagcatgaggatggagatcacggcggaggtggccaccgccatgagcagcgcggcgcgcatgccccggcggatgcggtcgaccttgcccgcgccgaggttctgcccggcgtaggtggacatcgagaagccgtaggagatggccgcaagctccagcaggccgaagatcttgttcgtcgcggtgagcccggcgatgacgatgaacccgaagccgttgatgacgtactgcaccaccaggccgcccaccgcgatgatgccgttctgcagcgccatgggcgcgcccagcgtcagcaggcggcgcgcgatggcgaagtccggcgcaaagtcctcgcgggaaaggcggagcagctcgatccggcggatgaccagcaggcagtacagcgcggaaaagcactgcgcgatgagcgtggccgccgctgcgcccgcgatgccccagtggaacaccgccacaaacagcaggtccagcaccacgttgatcgccgcggcgatgatcatcgcgtacaggggcgacttggagtcccccagcgcgcgcagcaccgaggagaagacgttgtaggccatgatgacgaagatgcccgagtaggagatgcgcaggtacgtcatcgcgccgcccatgacgttgtccggcgtgcccagcagcgtcaggatcggccgcgcggccaggtgcgccgccagcgtgagcaccgccgccagcgcgaggcccagcgcgtaggtgtggctgacgttgcggcgcatgcccgccatgtcgcccgcgccgaagcgctgcgagatgaggatgcagaagccctgggcaaagcccgtcaccatgccgagcaccatccagttgggccagtccgcggcgccgacggaggccagggcctccacgccgacaaagcgccccacgaccgcggtatccaccacgatgtagagctgctggaagacgttgcccaccatcagcggcagggcgaaggcgaagatcagtcgggccggccggccctgggtcatgtccttgatgttgcttgccatatggattccctctgttcgttctgtgaaatgtgccgttcccttctattctatcagctcgcggatgcgggcgcaatcctgtttgcagaaattttgcgcaagcgctgcaggaggcggacttttccctcgggggccgattgaaaacgcgcccgcttcatggtacactttttccgacagccaaaccgggagggaagaagatgacccgaaaccagcgctatgccgagcacatggcgcgccttgtcgccggggagtttgcgcaggatgtgagcctgctggtcgcctacggctcctttgtcaccggcggccagagcgcggtttccgacgtggacctgtactttgtcccggcgaccgggcgcgccctggcgctcagccgcaccttttggatcgaagacgtggggtacgacctctttcccatggattgggagcgcctggagagaatcgccgacttttcggacaacctcacgccccttgtggccgaggcgcgcgtgctctactgccgcggcgcggccgacgccgcgcgctttgcggatctgcaggcggcgctgcgcaggaacctttcggattccgcgcacatgctgcgcgccgcgcggcagcgggtggacgaggcctatgcgcacttcggccgcctgtgtgcggaggaggacgtaggccgggcgcggtactgggcgggcgcgctgctgatgcagtgcagcgacgcctgcgcctatgccaacggccgctactttgcgcgcgggctcaaggtgcagcgggaggacctggagcgcatggacgcgcccgcggggttcctcgcggcctgcgcgggcgccgtgcgcgccaagaccccgcaggcgctgcgcgccttctgccgcgacgcgctgcgcggcacggacgcctttgtgcgcgggcgcgcggcgtccgctccgtccgccgcccagggcgaagcgcttgcgggcatggtgcgcgagagcgtttcgaccttccagaagctcaacgtctgcgcgcagacggggaacgaacacctggcctttctctcggccgtgtgcctgcaggacgcgctggacgagatggcgcgggaggccggcgcgccggcgctcgacctgctcggcgcgttctgcgcgcaggaccttaccggcgttgccgcgcacgcgcaggggctgctcgcgcgcctgtgcgcggcggtggaggcggcgggcggtttcttacgtccctatgcgtcgatggacgaattcctcgcggatacatcttggtggaaaacggaacaagggggatgcgaaacatgatgcccaaggaatacaaggacctctgcgccgcgcacgtgcgcggcttccagacctggaacacgcgctcggtgctctcgcacgtggacatggagacggggtatgcgctcaacgtctgcctcaaggacggggcgaacgggcagtacctcaaggaggcgctcatcggccgcttcggggagcaggaggagaaggtcacgcccgaggcccacgcctgggacggcggctacaccagcgtcaaggtggagtttcagggcgtgcgcttccgcgtggagagctgccggtgcgaggacgcgccgctgatcctgctggtgacgccgctgtcccgggagctgcgcgcgccgctgctggtgctggagagcgggttcctctggaaccggccgggcgtcctgggccgggagaagaacacgctgctcgccgtcgcggggaagaagcgctttgtcgtctacagcaccgcgccccacaacccgcaggacgcgaacttccccacgcagacgccgtacctcgcggcggactttgaccgcgaaatcgcctttgccgtgaacgcgccgctggagatcgccgaggtgcgccgccgcatggccgccgcccgcgaggcctacgaggagagccgcgcccgctttgcgccctgcgaggacttctacgaggcgctgcgcctggccatgacctgggacacgacctatgacgccaagaacgagcgcgtgctcacgcccgtctcgcgcctgtggtccatccagcacggcggatttgtcctcttctgctgggacaactactttgcggggttcctggccgcgctctgcgacaagttcctcgcctattccaacctgatcgccatcacatcctcgcgcacggcggcggggttcgtgcccaactttgcgaacggaacgggcctaaagagcgaggaccgctcccagccgccggtcggcagcgccatgctcgtggaggtctaccgcctgcacggggagaagtggatcgtcgaggcgctctaccccgcgctgctgcagtggaacgagtggtttgccgcccaccgcatggaggacagcggcgcgctctgctggggcagcgacccggtgacgcccgtctttggcaaccgctgggaggtcgacggcgtgtgcgaccgcttcggcgcggcgctggagtccggcctggacaactccccgatgtacgacgacatccccttcgacaaggagacgcaccggctgaaactggcggatgtgggccttacgggcctgtacatcctggacacgcgctcgctgctgcagctggccaaggtgctggggcgcgagcaggacgtgcccgccctggaggcgcggctgcgccgcgcgcaggcggggctggagacgctctgggacgaggacttcggcttctactgcaaccggcgcacggacacgggcgcgttctcgcacagaatctcgcccacgaacttctacgcgctctttgaccgcagcgtgcccaaggcgcgccgggagcgcatcgccgcgcactattggaatccggaggagttctatggcgagtggatgctgccctccatcgcgcgcaacgacccggccttccccgagcaggactactggcgcggccgcgtctgggcgccgctcaacttcctggtgtacctcgccttctgccagcacgcggaccttgcgcgggagcgcgcagaccttgcggagaagtccgccgcgctctttctgccggaatggcaggagaaccgccacatccacgagaactacaacgccgtcaccggccagggctgtgaccgccccaacagcgacaagttctaccactggggcgcgctgctgggggccctggtcatggcggagaagggactcctctcctcgctcggcgcggatttgtaaacacattccaaagaactttcggacatgtttcggcaaggaaaagcctctgtttcggatttgtaacaatccgcacgaaacctttgacaggacggcattgtgctcgtatactttaggatgagtaatatctgtcaaggatggtagaatcatgagcgaagataaaaacacggaaagaaggggaggcgggcgctactcccgccgcacgcgcaggaagttctattacttcaaggcgtgggtggcggggctcggtcccaagaagctgaccctgctcgcggccggcgcggtgctggtgatcggcctgcccatcggggcgggcgtcgccatgaaccgcagcgcggccgcctcgcagagcgccggcggctcggtgcagctgcgcgcgaagaccgcgaccagcctgagcgggtcgcccgacgcgcagtccgccctggagagcgagggcgccgacggggtcgacgtgctcagcatcacgcccccggaggagtccccggcggccgcttcggaggcctccgcgccggaggcgacgccggaacccaccccggagcccacgcccaccccggaacccgaccccaccaacaccgtcttcaagtacggcatggaggccccggtcgtggccgaaatccaggagcggttgatggagctgggctacatggaaaacgatgaacccaccgagtattacggcagcatcacggaatctgccgtgcgcctcttccagcgccagcacggcctgaacgtggacggctgcgtcggcgcggagacctgggccgcgatgaacgcggacgacgcgcagcactacaccgtcatggagggcatggacggcaccgacgtggaagagctgcagacccgcctgcgcgaactcggctacatcgacaccgtcaccggccacttcggcgagatgaccaccgaggccgtcaagaagttccaggagatcaacaagctcaccgtggacggcaaggtcggcagcaagacgcgtgaaatgctctacagcccggacgccacggcaaacttccaccgctacggggaagagagcgaggaggtcaagaagtaccaggagcgcctgcaggccctcggatacctgaccaccacgcccgacggcaactacggcaaggacaccgtcatggcggtcaagcgcttccaggagatcaacggcttgattgcggacggcttcctcggacacaataccatcaccctgctcaactcctcggacgccaaggccaacggcctgcagctcggcatggagggcagcgacgtcaccaacgtccagaagcgcctgaaggaactgaactacatggacgccgtcaccggctactacggctcgctcacggaagaagcggtcaaggcgttccagaagcgcaacggcctctccgcggacggcaaggtcggcaaggtcaccatgaacgcgctgatggattcggatgcgaagaaggcgtcctccgggtcctcgtcctcgggcggctcttcctcctccggcggttcgtcctcgagcggcggctcgtcctcgagcagcggttcgtcgaactcctcgggtgtggagaagttcatctcggtggccgagtccaagctgggatgcaagtacgtattcggcgcgaagggccccaatacgttcgactgctcgggcttcgtctactggtgcctgaaccatgcgggcgtctcccagggctacatgaccagcagcggctgggcgaactccagcaagtacccgaagatcacctccatgagcgatctgaagcgcggcgacgtcgtgtgcttcgacggccatgtgggcatctacatgggcaacggcaagatgatcgacgcctcgtcctccaggggcaaggtccgcaccacctcgaacatccagtcctcgagctactggacctcgcacttcatctgcggattccgcatcttctaagagacgcaaaatgggcggccccaggggaagaccccccggggccgccttctgcgtgcaggaacaaaaaaacgacgcgaaaggacaggtttcatgcgcaatacctacatcacccggatgccggacaaggccggcgcctttctgctggccagccggatcatcgccgccgcgggcggaaacatcgtgcgcgtcaactacaacaaggcggtggacctgcacacgctcttcctcgaggtctccgcgaccgaggcccagcacgcgaggatcgcccgggagctcgcggcgtgcgggtacctcgccgagcgggatgcgcaggcgcagatcctgatgatcgtcgtgaccctcgaggacaaacccggcgcggtcctgcccgtgctggagaccttgagccgctaccgcgtgaacatctcctacatcagctcccaggaaaacggaacgccgtatcagcacttcaagatgggcctgctcatcgagaacacgggcgagatcaagggcctgatcgaggagatctcccgcatctgcgagatccgcatcctcgactacgaggtgacggaccgcctgctcgacggaacggtcttctacgtcacctttgccaacaccatgcgcgcgatcctgcacctttcgcaggagaagaccaacgaggtgctcatctatgcgaaccagctgatgcagatcctggacgagcagaagaagtcgcccctgcagacctttgactacatccgccgcttcgccaggtttgtccgggaccggaagggggagcgcttccacgccagcgtctacagccaggatctggcggcggggctgcgcctgctcgtcatcgacccgccctgcggcagcaatacctacgtcctggagcacggggaggagctgctctttgtggactgcggcttcgcctgctaccgcgaggagatgctcgccctgctggaggcgcgcatcccggactttgcgcgccggcgcaagcgcgcgtggatcacccatgcggacgtcgaccacgcgggcctgctctccttgtttgacgccgtgtacatgagcgggagctgctatgagaactttgcggcggagcggcgcggggagccgaacttccgcgagcagaacccgctgcacgcgccctactgcgcgctgagcaaggtcatctccgagtacgagccgccggacctggaccggtgccacgtcctcggcagaaagcaggacggcgcgacgctctcgcccatcggcacgcagaacttcgggccgtgggagttcgaattttacgaggggaacggcggccacgtgcgcggggagaccgtgatcgtctgccgggagctgaagctggtcttcagcggggacatctacgtcaacatcaagggcttttcgcaggagcagcaggagttcaacgcgatcgcgcccctgctgatgacgggcgtggactccgacccggccgaggcgcgcaggtgccgcgacctgctgcgcaaaacctacgccggctatttgttctgcccgggccacggaacggtccagagaaacgactgagcggcaggagagaaaccctctcctgccgctcagtgcgccgacaaagtcggcgcgcttcaaacccatgttaggtgctttttttcgaaggaggtccgcttttggccccctgcggaaccattccgtgcgcacaatgcgccgaattccgggaaggggttcctacaaaagtgcggcaggagagaaaccctctcctgccgcacttttttgcggatgggaacttacagaagcgagcggtacagcgtcgcaagatcctccacagaggtctcgcgcgggttgccggggcagcaggcgtccgcataggcggattccgccaggaaggggatgtcctcctccttgacgatgcccttgaggttttccgggatgcccacgtcgcgcgcgagctggcggaccgcgtcgacggcggccttgcggtactcctcctgggtcatcttctccgtgccgggcacgcccatggccgcggcgatgtactggtacttatcgccggaggccggggcgttgtactccatgaccgtgggcagaaggatcgcgttggccacgccgtgcggcgtgtcgtagaccgcgccgagcgggtgcgccatggcgtgcaccgcgccaaggcccacgttggagaagcccatgcccgcgacgtactggccaagggccatgccctcgcggccgtccggatcgttggaaacggccttgcgcagggagcgggagatgatctcgatcgccttgaggtggaacatgtccgtcatttcccaggcggccttggtgatgaagccctcgatggcgtgggtcagggcgtccatgccggtggcggcggtcaggcccttgggcatggtggacatcatgtccggatcgatgaccgcgatctgcgggatgtcgtgcgggtccacgcagacgaacttgcggttcttctccgggtcggtgatgacgtagttgatggtgacctccgcagccgttccggcggtggtgggcacggcgatggtgaagaccgcgcggttcttggtcggcgcggtcccctccagggagcgcacgtccgcaaactccggattgttggcgatgatgccgatggccttggccgtgtccatggacgagccgccgccgatggcgatgatgtagtccgccttggagtcctggaaggcctttacgccggtctgcacgttctcaatggtgggattgggcttgatgttggaatagacctcgtaggcgaggccgtgatcctccagcaccttgagcaccttgcccgtgacgccaaagccgatcaggtccgggtcggagcagacgaacgccttctggaatccgcgcgcgaggacctcgcccgcgatctcctggatggcgccgctaccgtggtaggaaatctcgttgagcacaattcgattggccatggggacgacctccttgtcatttctttacaacgagtataccacggcttggctggcccctgcaatcctcgaaagcgcgctcagcgccggttttgcgcgatggccgaggccaggcgcgcaaggcgcggataggcgtaggcgaaaaagcccttgtaggcggggcagaagtagtttagggagagcgtgccatcgccgcgcaggggctcgcggtcgcggcggcagccgccgcggcagagcgcgtaccacgcgcagccctggcactcgggcgacacgaatcgggagcggccgacaaaccccagcccgtcccgccgggcgtccagcgcgtcgaagctgtccgtcacaaggctccccagccggtactcgtccagcacgtagaagtcgcacgggtagacgccgccgtccgcctccacgacgtattgctgcgaacagatccccagcatgccgcaggcctccggcggctggccgagcagcatccccaccaggttctcgaagtagcggatgtagacaaaccgccccgccgtcacgtccgcaaaccagaggtcgaacaggtccttgaggaagcgctcatacagggccggcgtcagggagtagggatggccgccgcgcgcctcgcccagcgggtccaggcaggggatgtactgctggtagagcagctggtttcggcggaagaaggcgtagatggaccggatctcccgggcggccttggccgtgacgaccgtcaggacgttgaactccaccttgtgcgcctgcagcgtgcgcaccgcggccatcaggcgcttgtgcgtgccctcgccgcgcgcgtccacgcggtgcaggtcgtgcaccgcggccgttccgtccagggagaggcccacgaggaagcggttttccgcgaggaacgcggcccactcgtcgtccagcaggatgccgtttgtctggatggcgctgtgcacggtcaggttccgggtgttgtgggcgcgcaccagctccacaaagcggcggaagaaggggaggccggacagcgtgggctccccgccctggaaggcgaaggtcacctcgccctgcgcgcgctcgagcgccttgcgcacgaccgcctccagcgtctcctccgacatcatgccaaaggacggcgtttcgcgcttttccgtgatgtccgcatagaagcaataggtgcagcgcaggttgcagttgccggaagcgggcttgatgagcaggtgaatcggtcgcggcatggtcttggctcctccccgtgaatttaccaatagtatagcggtcaatttacatgccgtcaatgaaaaggcgctctggccctggtatacttagacatagaacgaatcaaaaggaggaagaacgcatggttcaggctgtgctgtttgacttggacggaacgctcctccccatggtgcaggaggagttcatcaagggatacttcggcgcgctctgccgccggtttgcgcccaagggctacgagcccaagcgcatgatcgacacgctgtggaagggcacggcggccatggtccgcaacgacggcagctgccccaaccgggaccgcttctgggcggccttcgcggaggaattcgggcaggagcggctccaggacgtcccggaattcgacgacttctacggccgggagttcaacgaggcagcggcctgcacgcagcccacgcccctggcggaccggtgcgtcaagaccctccgggagaagggttatccggtcatcctggccacaaatccgctcttcccccgcgtgggcacgctctcgcgcatccggtgggcgggcctggacgcggcggacttcgcgctcatcaccacgtatgagaacgccacgcactgcaagcccaaccctgcctattacgccgacatctgcgcgcagatgcgccttgaccccgcgcgctgcctcatggtggggaacgactacaccgaggacctggccgcggcggagatcggcatggaggtattcctcgtgacggactgcctcatcgcgccggagggagcggacctctcccgcgtgccccacggcacgatggcggagcttctccggcgcctggagggcttccccgaggcgcagggctgaccgcaaagaagcgggccggcgtgaccggcccgcttctttgggtttttggggggaatttatatgtttacgccttgtgccagcccatggccttggtgaactccaggatcgggatggacaccagggagcagcccagacccaccagatagagccaggcgggcagctgcgtgaggccgaagaccgacgcgacgggcgggacgaacagcacgatcgccatcagcacgaggctgaccagcgcggccttgttcatgttgcggttggagaagacgccgaccttgaacaggctcatgttcgagcgcatgttgaaggcgtggaagacctgcgagagcgccaggatcatgaaggcgagggtctggccgccgacgaggccgcccgtgacgcgctgccccagccagaagccgaagagcgtaaggcccgcaaagaggatgccctgcagcccgatgcgcacgcccatgccgttggcgaagatgctctcgtccttgggcttgggcttgcggtccatgacgttgctctcgaccggctccatgccgatggcgatggccggcagggagtccgtcaccaggttgatccacagcagctgcatggagagcagcggcgtctgccgccagaagatcatggcgaagaacacggtcaggatctcgccgatgttcgtgcccagcaggaagcccacggccttcttgatgttgtcgtagatgccgcggccttccttgaccgcgtcgacgatggtggcgaagttgtcgtccgtgagcgtcatgtccgccgcgcccttggccacgtcggtgccggtgatgcccatggcgcagccgatgtccgccgccttgagcgcgggcgcgtcgttgacgccgtcgcccgtcatggcgacgatctggcccttgcgctgccaggcctggacgatgcggatcttatcctccggggagacgcgggcgtaaaccgagatgttcgcaacgcgcgcgtcgaggtcctgctcgctcatcctggccagctccgcgccggtcacggcctcgtcgccctcgccgaggatgcccaggtcctttgcgatggcgctggcggtcaccacgtggtcgcccgtgatcatgacgggcttgatgcccgcgcggcggcactgcttgaccgcctcgcgcgcctcgggccgcggcgggtcgatcatgccgaccaggcccaggaaggtgaggttgttctccagcgcctcggaggtgacggcctcgggctccccgtccaggaccttgtatccgaccgcgaggacgcgcagcgcctggcggctcatctcctcgttgacgcggcgggccgcggcgaggtcgccggagatgcacaggccgtccatgacgtcaaaggcgccctttacgatggccacgatcttgccgtcgacgcggttgacggtggtcatgagcttgcggtccgaatcaaagggcaggtcggcaaggcgcggggactgcgcgttgagcgcgtccttctccatgccgttcttgtgcgcggccacgatgatggccgtctccgtggggtcgcccatgtgcttttcgccctcgggggagaagtccaccgagccgtcgcagcacagggccgcgtattgcagcaggcggcggaccggcgcggagttgttgccggagatggcctccgttcccgccccgccgtcgacgtaggcgtgcgttaaggtcatgcggttctgggtgagggtgccggtcttatccgagcagatgaccgaggcggagcccagcgtctccaccgcgggcaggcggcggatgatggcgttctttttgaccatgcgctgcacgccgatggccagaacgatcgtcacgatcgcgggcaggccctccgggatggcggaaaccgcaagggacacggccgtcatgaagatctccatgaccgggatgccgtccagcaggcccagaacgaagatcaccgcgcaggcggccagcgcgacgatgcccagatacttgcccatgttggcgagcttctgctgcaggggcgtctgtccgtcctcgctggcgtcgagcaggccggcgatcttgcccatctcggtgttcatggccgtggccgtgacaaccgccgtcgcgcggccgtaggtgatggagcagccggagtagaccatgttgtggcggtcgccgagcggcgcgtccgcggcgaccacggcctcggcgtccttttccgaggggacggattcgcccgtcagcgccgactcctccgacttcagggaggaggaggtcagcagccgcgcatccgccggcacgaagtcgccggcctccagcaggatgatgtcgcccacgaccagcttcgaggcgtccacgatggcctccttgccgtcgcgcagcacgcgcgcatgcggcgcggagaggtttttgagcgcctccagcgccttttcggccttgctctcctgcatcacgcccatcacggcgttggcgatgacgatggccacgatcagcaggggctcaaagaactccgagggctcgcccgtggagcaggccacgatgaaggagatcaccgcggccgccagcaggatgaggatcatcacgtccttgaactgttcggcaaatcgctggagattggtcttcttcttgccttcgcgcaggcggttttctccgtcgcgcgcaaggcgcgcagccgcttcctgggaggacaggccgcttttttcgtcggtcttgagctccgcaagcagcgcggacaaggtcttgtcatgcggtgtcaatgcatacacgctccttcttttgacttgtattcattgtagcccaggcatggaggttctgtcatcggacaaaagcgcgcaactgcccaaaagttacccaaattctgggaagtgtcgcttttttggacactttggccattttgtccctatggaaatgaggcgcgcatggataagataaaagaatgaaagggcgcactgcgccgcgacgacggtagggtggggtgagattttggatggaatggagattcggcgggcgatcattcgctccgccatcgagcgcggaatccaggagatccgcagcgatccgcagcggggcgtgcgcaagctcgtggacctggggacgcatttttcccggggaaggttccaaaagcggatcttccgcgagatgcaggacgaattggtcaacccgaataccgcctactatgcgatggtgaccaacctggtcaaccgcgtgcgcgccgagcacatcgagcgcctgggcatcgacatcggcttcaacagctggacgcacggcgcggccatgatccgggaaaatgagcagaagaagggagacaatatcccctggtgcctggtcctcaaccaaacgcaggagattcagtacgacctggacgacttgatgtgccagggcgaaaagctggggatctactgctattgggcctttgccggggacttggagcagaccgaggcgctgtgcgccgtcttccacaagcaccgggacagcgcggtgctcctgatgctgccggatgcgcgcctgccccgcgtcaacatcgagagcctggacaacgtgatgctcttcctgccgtgcggcggcgattccgtgcgcgagagcgcggaggcgctggcccagcggcgctgcctgttcggcctctggacgcggtatcgcagcccggagccgatcgtcagcggcggcctggagcgcatggccgtggagctgggcgcgccgatcgcgctggtcgtgcccgagcacggggcggacgcggaggcctgcgccgccgtgcggtcctatgcaaagcgcgcgcgggaaaagaagtccatccctgcgctgcttgtggacctgtatcccaccattgaagaggtggaccggatcatctccgtggagtcgtgcatgctcggcgtggaaccggatggaacggtcttcaccgccaaggggcgcaacgagcagatcgacgtgcggcgcatttccctggacgatgtgctcctgtgcaccatgccccgtgtcacctatacggagcaggatgcgggcaaacctgcgaaatcgacggaacgcaattgaatagaaaaaggagcgaagccggttgaaggaagtcaaaacccccaaaaaaccaatcatcttttactatttgctggcgctggtggcgctgctgctgctcaacgccttcctgttcccttccctgacgaggggaacgatcaaggaggtcaattactccgagttcctgcagatgctgcgcgacgggcaggtccaggaggtgcaggtcgagcaggacgtcatcctctttgtggacaacgcggagcgcccgcagatctatgagacagggcgcatggaggacccggagctcgtcgaccgcctggaggaggccaagagccaatacggcctggagtacggacaggtcgtcgtcgaggagatgtcgcccctgatgtccttcctgctgacgtgggtgctgcccatcggcgtgatggtcctcctcgggcagctgctgacgcgcctgatgctcaagaagatgggcaccggcggcgtcggcgggccggccatgacctttggcaagagcaacgccaaggtctacgtcccctccacgacgggcattaagtttgcggacgtcgcgggcgaggacgaggccaaggagatcctgaccgagatcgtggacttcctccacaacccgcagaagtacaactccatcggcgcaaagctccccaagggcgcgctgctggtcggccctccgggcacgggcaagaccctgctggccaaggccgtcgcgggcgaggccaacgtccccttcttctcgatctccggttcggagtttgtggagatgttcgtcggcatgggcgcggccaaggtccgcgacctgttcaagcaggcggcggaaaaggcgccctgcatcgtgttcatcgacgagatcgataccatcggcaaaaagcgcgacggcgcctccggcatcggcggcaacgacgagcgcgagcagaccctcaaccagctcctgaccgagatggacggctttgacactacaaagggcgtcatcatcctggcggcgaccaaccggcccgagagcctggaccccgcgctgctgcgcccgggccgctttgaccggcgcgtgcccgtggagctgccggacctcaagggccgcgaggacatcctgcgcgtgcacgcggccaaggtccgccacgcgccgaacctggacttctccgccattgcgcgggccgcggccggcgcctccggcgcggagcttgcgaacatcgtcaacgaggcggcgctgcgcgccgtgcgccagggccgcagcgaggtcatccagagcgacatggaggagagcgtcgaggtcgtcatcgccggctaccagaagaagaaccagatcctctccgacaaggagaagctcatcgtggcctaccacgagacgggccacgccctggtcgcggcgctgcagagccactccgcccccgtgcacaagatcaccatcatcccgcgcacctcgggcgcgctgggctacaccatgcaggtggacgaaggcgagcactacctcatgagcaaggaggagttggagaaccgcatctccacgctcaccggcggccgcgtggcggaggacctcgtcttccactccatcacgaccggcgcctccaacgacatcgagcaggccacaaagctcgcccgcgcgatgctcgcgcagtacggcatgagcgaggagttcggcatggtcgccctgcagacgcagagcaacctctacctcggcggggacgcgtccctcgcctgctcgccggagaccgcggcggagatcgaccgcagggtcatcgagctcgtgcgccggcagtacgaaaaggcgcagaacctcctgcgcgaaaacatgccccgcctgcatcagctcgccaagttcctctacgaaaaggaaaccatcaccggcgaggaattcatggagatcctcaaccagccggttcccaagctccaggcgccggaagcctgacccgaaaaaaagcggtccccgcaagccctgcgggaaccgcttttttgttgacggatcaaaccttggccgcgcgccggttcgtcgcgcggcgcacgaggtcgacaaaccgctcgggcggcatggttccctcgcgcagccagcgcttgagcgcggcgaggagcgcgtccgtgtagaaggtgatgatgaactcgtaggcgtcgtccctgtccaccacgtccgtgtaatacagggagagcagcgagcgcatgacgtcggcgaagtactcggaaaagctgttctgtccctcctgctccagcgcgctgacgtagaaggcgcggttgcggtagaaataggtgcagatcttctcgaggaagaagccggacgtgatctggccctcgccgatgaactgctcggcgaattccgtgtagaacacccagttgaccagatcgtacttgtcccggaagtgatagtaaaagctcttgcggttcatgttgcagcgctcgcaaatgtcccccacgctgatcttttgcagggttttttcggccatgagctgcttgagggcgtcggcaagggccttttttgtgatggaagaatcgggcatgggcggtacctccggtcgtgggcgggggaagagaggggcggtttcaccagggccattcgcggcccagcgcgtcgcgcaggacgaagcgggcctcgtccgtgcggccggggttgtccgggtcgtaggcgcgggaccgcgtgaggatctcgtaggcggcgtccgccgcctgccgcggggaaacccgcccgacgagcgggtcgaacaggcggaaggtgtacccctccggatacaaccgattatagcagattctggccgcctgggaaagggcggccttggacatggcgtagccatagccgcgcgtctgccggctccagttgacggaggctgcctccccgctggtcacaaagcagacgcgcttgcccgtcccgcggtccagcgcgggcagcgcagcctccagcgccaggatcggcgcgcagaggttctcctcca

SEQ ID NO: 3133 - DNA, 25678 bp, Unknown
  16S sequences of unknown bacteria
agcacagcccttggagaggggctctaataactactactctataatacaaggagaaaactcatggccaacctgattatcggcaacggcgaggatctccgcgccctggtggatagcctgttcaccctgcgggacccggagaaggaggcggccctgtccgaggaggagcgggaggcccttcgccggaaacgggaagaggagatccggcttctttgaagttgccctcggtatgggcggcagcccttgacagacacacaagatatggggtaaaataggatgttgacgtttcccggtcgtcgtgccgggaacacttttttacgggacgctgcgaattcactagaaggaatgaggaaacccatggcaacgaaaaagcccgcctacggcaacgacagcatcacctccctgaaaggggccgaccgtgtgcgcaagcgcccgggtgttatcttcggatctgacggtctggagggctgcgagcacgctgtgttcgagattctgtccaactccatcgatgaggcccgggagggctacggcagccgcatcgtgaccacccggtacgaggacggctccatcgaggtgcaggacttcggccgcgggatgccggtggactacaaccagaaggagcagcggttcaactgggagctgattttctgcgagctgtacgccggcggcaaatacaacaccaacgaggcggaaagctatgagttttccctgggcctcaatggtctgggcgcctgcgccactcagtattcctccgaatacatggacgtggaggtgcgccgggacgggtataaatacaccctgcatttcgagcggggcgagaacgtgggcggcctgcaaaaggagccgtacgccaagcgggacaccggcaccgtcatccgctggaagccagatttgcaggtgttcaccgatatcgcggtgccggtcgagtatttccgggatactctgcgccggcaggctatcgtcaaccagggcctggtgttcgttctccggtcgcagaacggccgcggcttcgacaccgaggagttcgtctatgaaaacggcatcgccgactatgtgcgggaactgacgggcgaggagaccctcaccgacgtgcaggtctggtcggcggagcgccgtggccgcgaccgggcggacaagccggagtacaaggtcaagctgaacgtggccctctgcttctccaacaagcacaacctactggaatactaccacaattccagctggctcgagcatggcggcgcacctgaaaaggcggtgcgttccgccttcgtttcccaggtggacgcctatctcaagcagaatggccggtacctgaagaacgagagcaaaatcagctttcaggacatccaggactgcttggtgctggtttcctcctccttctcgacccagacctcctatgagaaccagaccaagaaggccatcaccaacaagttcatccaggaggccatggccgatttcctgcggcacaacctggaggtgtatttcctggaaaataaggccgaggcggacaagctggccgagcaagtgctcatcaacaagcgcagccgggagaaggcggaaaccacccgcctgaacctgaagaaaaccctgcagagcggtaacgacctgacctcccgggtgcagagcttcgtggactgccgcagccggaatgtggaggagcgggagctgttcatcgtggaggggaagtccgccatgggctcctgcgtccaggcccgtaaccctgatttccaggccatcatccccgtgaggggcaaaacgctcaactgcctgaaagcggagtacgataagattttcaagaacgagatcatcaccgacctgctcaaggtcatgggctgcggcgtggaggtcaagagcaaggccaacaaggatctggccaccttcgatttgagccttctgcggttcaacaaggtcatcatctgcaccgatgccgacgtggacggcttccagatccgcacccttatcctcaccatgctctaccgcctgacccccaccctcattgagaagggccgggtcttcatcgccgaaacccccttgtatgaaatcacctgcaaggacgatacctacttcgcttacgacgaccgggagaagacggaggtcctcgccggactggaagggaagaagtacaccatccagcgctccaagggcctgggcgagaacgatcccgatatgatgtccctgaccaccatgaatcccgccacccgccgcctggtgcaggtcactcccgccgacgcggaggatacggcgcgcatgttcgacattctgctgggggacaacctcagcggccggaaggacttcatcgccgagcgtggcagtctctatctcgagatggtggatgtcagctgacaactgaaatgcatagcgtttcagttgtcgctgctcgcttcagcattcccgaagaattcccgatgccgggaattcttcccgagagaaaacgcatagcgtttcagttgccttggaaaaagcccttgcgggccaaagcggagcgaatgttagctgcatagaagaaggaaggatcacatggcgaaaaaaatccgaaaaacgccggtcatcgacaagctgccggataacgcccatatcgtgggagcgggtctggtggagaaccagaagatcaccgatacgctggagaccaactacatgccctacgccatgagcgtgatcatgtcccgcgctatcccggaaatcgacgggtttaagccctcccatcgcaagctgctgtacaccatgtataagatggggctgctgggctccggccgcaccaagtcggccaatatcgtcggctccaccatgaagctcaatccccacggcgacgccgctatttacgagaccatggtgcgcctgtccgccggatatcaggccctgctgcatccctttgtggattccaagggcaacttcggccggttctattcctccgacatggaatacgccgcctcccggtacaccgaggccaagctagcccccatcgcggccgagctgttccgcgacatcgacaaggacaccgtggacttcgtggacaactacgacgccaccatgaaggagcccacccttctgcccgtcggctttcccaccgtgctggtcaacaacaacatgggcatcgccgtgggcatggccagcaacatctgctccttcaacttaagcgaggtgtgcgagaccaccatcgccctgatgaaggatccgcagcacgacctcaccgccaccctgaaagccccggatttccccggcggcggcctggtggtctaccggcgggaggaactggagaaaatctacgaaaccggtcggggcagcgtgaaaatccgcagcgtctatacctacgacaaggccgccaactgcattgacgtcaccgaaattccctttaccaccaccgtggaggccatcatcgccaagctggcggatctggtcaaaagcggccgggtgcgggaaatcgctgacgtgcgcaacgaaatcggcctggacggcctgaaaatcaccattgacctcaagcggggcgtcgacccggacaagctgatgaaccggctgttcgccatgtccccgctggaggattccttctcctgcaatttcaacctgctcatcgccggcgtgccccaggtgctgggcgtgcgccggatcctggaggagtggatcgccttccgcaccgaatgcgtgcgccggcgggtgtatttcgacctgcaaaaagccaaggacaagctccacctgctccgggggctggagaaaatcctgctggacatcgacaaggctatccgcatcgtccgggaaaccgacgaggaggccgaggtggtgcccaacctgatgatcggcttcggcatcgatgaaattcaggccgaatacgtggccgaaatcaagctgcgtcaccttaaccgggaatatattctcaagcgcaccgaagagatcgacaagctgcgccaggccatcgaggagatggaggccgtcctcggcagcgccgccaaggtgcgggccatcatcgtcagtgagctgcgggagatcagcaaaaagtacggccagccccgcaagacccgcctgctctacgccgcagatatcgaggaggccgccgccgacgtggaggaggagatccccgattatccctgcaccctcttcttcaccgccgagggctacttcaagaaaatcacccccgcctccctgcgtatgagcggggagcataagctcaaggagggggacgtcatcacccagacggtggagaccaccaacaaccgggatctgctctttttcaccgacaagggcacggtctacaaggccaaggccgccgacttctccgacaccaaggccagtgttctgggcgattacgtcgccgctaagctgggcttcgacgagggggagagcgcccgctacatggccgtcaccggggactatagcggctatatgctcttcttcttcgaaaacggcaaggtcgccaaggtagagctgtcctcctacgccaccaagaccaaccgccgcaagctggtgggtgcctattccgacaagtcgcccgtcgtggccatcgtccaggcgccggaggatggggagttcatgctcaccgccacctccgggcggatgctgctggtgcataccggcgccatcgcggccaaggccacccgtaacaccatcggcgtgcaggtcatgaccctcaagggccgccacctgctgcaaaaggtagagccctttacagaggggatggtcaccaaatccaaccgctaccgcaccaaaaccatccccgccgccggcgccctgcctctggccgaggatatcggagagcagttgacgctcgattaaaggccgatggctttacacgtgcgaaagaaaactttttcatatttcgcacggaaaaatgcataggattccgtttcgccgggcattctactggtggcgacggatacaaccattttgcgtttgcagtaaccgctgccgggaaagtccgctatcgttcggttcactccgtccggcagcggtctttttctttacatattacatagcggggcaaaaccgggacggcgctaatttccgtttgccgcttgatttttgccgggatgtgtgctagtatactaaggactggaattgatatactatttggagggacaagtaacatgagcgtttgggagatcatcatcggcagtgtgctgattgtgttttcgctgctgattattgcggtggtgctgctgcaggagggccgtcaggcgaacttgggagccattgccggcgctgccgactcctttatggaaaaagggaaggcccgcaccatggacgcgctgctggccaagtggacgaaggtcatcgccattacgtttttcgttctggtgttcgccggtatgctggtgaccaagttcttatcctaggtaagcgattacgccctgcccggttacggtgcagggcgctttttttcacgcatgccgcccggacggctgaaaggattggtagaactatgacggcaaaggatatgagagacagggtgatccgccatttccggcgggcgaaaaagcccctgagcgcggagatgctcgcttccctgatgcggctgaaaaaatcggagcgtccccgcctgctgctgaccttgcagcagatggaacgagacggggagctgacccagagcaaaaagggccggtacaccctggccgacacggcgggcagcgtacggggccggatactgtccctcaacaaaggcttcggcttcgcccgcctggaggaaacgggggaggactgcttcatcgccggacgctacctgggtgacgccctgcccggcgacacggtggccatccggatcggtgcgcccgattcccgcggtacccagggcgcggtcgtcaaggtgctggagcccggccctcgcctgttcgccggccgcctgacgagcgagcgcgcggatcgcttcgccgtggagccggacggcggcttccgctacccgctgccggtgcgccgatccaccgtcggcggcgccgtgccgggggataaggtgcgctttgccgtcaagcggaacaagcagggggactggaccgccggcatcctgaccgtctacggtgcggcggacagcgccaaaagcagcgccgacgccatcatcgacagccggggcatcccctatgtcttcccggaggaggtcttcgcccaggcggaggccctccgaaaagccggcctctccgccaaagagctggaggggcgggaggatctgcgggccctgccgctgttcaccatcgacggccgggacgccaaggatctggacgacgccgtctctctggagcggacggcggatggctgggtgctgggggtgcacatcgcggacgtgtcccactacgtgcaggcggacacccccctggacgtggaggcgcgccagcgcggcacgtcggtctattttgccgatcgggtcatccccatgctgcccgaggcgctgagcaacggcgcctgctccctgaacgccggggaggacaagctggccctctccgccctcatgaccctggacgccgccggcagctgccaaagcctccgcctggtcaaatcggtcatcgtctccagggtgcggggcgtgtacgacgaggtgaacgccctgttcgccggcacagcggacgaggcggtgcgggccaaatacgcgctcgtctggccccagctccaggagatgcgccatctggccgccctgctgaaaagggctgccgaaaagcggggcaccatggatctcatcagtgtggaaacccggttcatcctggacgaggaaggcaagcccgccgccctgctgccccgccaaagcggggaggccgaggggatgatcgagcagtttatgatcgccgccaacgtggccgtggccgccctggcccgccgcaaaaagctgcccttcatctaccgggtgcatgagcggcccaatcccgaaaagctggccctgcttatggaaaccactcgggccctggggctgaaaaccccgctgcaaagcgacgatttaccccagatggccctgagggagctgatggaggaggcccgggataccccttacgcccggctggtcagcgagcagctgctgcgctccatggccaaggcgcagtacagcgacaacccgctgggtcactacggcctggccctccaggattactgccatttcacctcgcccatccggcggtatccggatctggccatccaccggattctgagcgatcatctggcccatacccctaaggcggccctgtacgaccggtacggcgcttttgttcgggccgcggctgcgtcctcctccgagtgcgaggtgcgggccatgaccgccgagcgggactgtgaggcctgctacaaggcggaatatatgctgggcttcctcgggcagaccttccccggcgtcatcgtctccgcctctgacttcggcctgtatgtggagctggagaacaccgtcaccggcctgctgcgcctggagcacctgccggaggaggagctgcgcttcaatggcgtggcctccttgaccgatcccctgggccgtccccgctacaccgtggggcagtccatcgatatccaggtggcggcctgcgatgtgtccatgggccgggttagcttcactctcccgccgtccgccgattaatttatcgccgcgcgctcgccgatgattaacgcgtcatatcctgccaatactctgcataagaatagagacgaagggcaggatattggcgatggagagtgttctgaagcgggcgattttgcgcggcgaacaacagcaggagtgcgatgtgctgcaggccatccgcgaggtgtgccgccagctggacagcgtacaggcgcgttttgagatggagagcgacagcgatttgatcgacgcctgcatctacgagatggaagccctgcgcgcccggtaccggtttttgcttcggcaggccaagcaggaggggctcaccgcctgcgccaacacaccgctgtgggataacaaagcctaagcggcctcgcgtcccctggtcttctgattttatgggcccgaaacggacaggtttccgccgggcgggaaaggctgagaaggtcatgagtctgggcatgtggatcgctgtggggattgtggggagcgccgtcgcgctggcggtaatcatcgcgctgttccggtcggggaagccgatacggggcctggtgggcacgggcgcccaggggatatgcgccttggcggccgtcaacgtggcgggcgcgttcaccggcgtgtccctggggctgaatctcctgtcggggctgagctgcgtggtgctgggcatccccggcgtggtgacgctgctgtttttaaagctgatattcaacggataaccaaaaagcggaggagccgattcggctcctccgctttttttcttatgcccgggccgttccggcctatttcagccggatggcgatttccgtgtccgcccgtcgcatccccgcgtccccggtcagaatggccagcaggctgcggtagagcagggtgggatcgtccagaaaattttcccggataagccccgcctgcatgtcgtccgccacccgcagggaaacggacatgaggggagaggcgctgtcctggatggtgcaggtcacccggtagccgtgatccagcttttccagctccacggtgttctcctgctcccgccggatgcgggtcagcagctgcagcgccgccttgaccgaccgttcccgcagggtgtaggggatcatccccgccagggtgtcgcccacctgccgccccgtttcggtcagggaaatgcggccctcctcctcggtcaggtgcccctgccgggccagctcgtccacggcggcggcggtctcgaaaaaattggccatgccattgcccgcgatcagctcggtcaccatctggcgctccatgggctcgcccaccccgagcagcatatagcagatcagtattttgatttcctgcgacgtatataagccgccgggctccaccccggcggaaaaggcatcctgaatcggcatcgttgatgactcctattatataaaaactcagtattactgtatcacaatcccgcccgaaagggaagtgggattttacacaagaaacagccggcggcttctccggatctttttctcgggaaaaatggcggtttttcttgacaatccggcggaaaacgagtaaatttttaatgatatgcgcggaattttgccacccacattctcgcggcagagaacggcgggaggggctttcgcgcgcaatgaaggagggaacccaaccatgaacgttttttccagggtgaatcaggcgctgtttcccggcgccaaggagtaccccaaggtcggcgcgggcaaaatggcgctgctcggcctgcagcacgccttcgccatgtcctgcgccaccatcctggtgccgctgctgaccgggctggacgtgggcgtggccctgttcgccgccggtatcggcaccttgatttttcacctgtgcacccgcggcaagatgcccaccttcctgggcagctccttcgccttcatcgccgccttgcaggcggtcatcggcggcgacaaggccaatattcccaaggccatgggcggcatcatcgtggccggcctgttctatgtggtgctggccctgctcattcggctcttcggcagcaaatttatggacaagctctttcccccggtggtgcggggcgtgggaatcgccatcatcggcttgaacctcgcgagcgccgccatcaataacatccagggcaatggcattacgctgttcacccctgcgtattattggagctggggcatcgccatcgcggtctgcctgaccgccgtcatcctgtccagctacggcaagggcatggtcaagatgtcctccatcgtcatcgccctggccgccggttatgtcctgaccctgattctgaccaagaccggcctggccccggccgcgctgatggatatggggaaaatcgccaatcacggctgggtcgaaatccccaacttcgttctgccccagtttgacctgaaggccatcggcatgatcgcccccatcgccatcgtcacctgcgtggagcacgtgggcgacgtgtacgccaacggctcggtggttggcaaggactttaccaaggatcccggcctgcaccgcaccatgctgggcgacggcctggccaccatggccgccggcctgttcggcggtccggccaacaccacctattcggagaacaccgccgttctcgccgccaccggcaactacaatcctgcctccctgcggctggcggccctcatcgccatcgcgatcagcttcttcggcaaggccatcggcgtggtggaaaccgtgccgaattgcgtgctcggcggcgcctgcatcgtgctgtatggcatgatctcctccgtgggcctgcgcaccctggtggagaatcacgtggacttcaccaaaaaccgcaatctctgcatcgcggcggtgatgctggtgctggccatcggcggcgccgtcatcggcggcccggcctttagcgtctcgggcatcggcctgggcattctggcgggcatcctgctcaacctggtgctgcccgaagccaagaaggaggacgccggcctggtgccccactatctcaaggaagacgaaatcgacgaggagcgcgactaaaccccggacgcttccgccataccgcccggtgccgccttcgcgcggcgccgggccgctttatacacacgtgaaaggaagtggcttctcatggccatcgaaaaagtcaaggaatacctcaagacctttggccgggacggggacgtgcaggagtttgacgtgtccagcgccaccgtggaactggccgccgcggctctgcgcaccgacccggcccgcatcgccaaaaccatctccctgtatggcgacgacggctgcctgctgatcctcgctgccggggacgtgaaaatcgacaatgccaaattcaaggcccagttcggcaggaaggccaaaatgctggcccccgaggatgtggagcccctgaccggccatgcccccggcggggtctgcccctttgccaatcctgcgggcgctcgggtgtacctggatgtctccctgcggcgtttcgacgcggtctatccggcctgcggcagcgccaactctgccatccgcctgacctgcgaggagctggagaagctgtcgaattcccagggctggatcgacgtctgcaagccgaaagagccggtgaacgccggttgaaacagcggctgcttggttttgtgaaacgggagccggtgctcctggtctcggcgctcctcgcgctggtttccgcgtgctttgcgcccccttcggcggcgtatcttcagtatatcgattttcgcacccttggcatcctgttctgcctgatggcggcggtggccggcctgtcgggggcgggggtgtttgtggtggccgcccgccggctttccgcccgggcccgccacgtcaagtccctgtctctgttcctgacactgctctgctttttgtccgccatgctgatcaccaacgacgtggccctcatcaccttcgtgcccctgaccctgctgctgttggaggggctggagcagcggcaccggatcttcgtggtggttatggagacggtggccgccaatctcggcagcatgcttaccccggtgggcaacccgcaaaacctgtatctctacgcccgctatgggatcggtgccggcgagtttttcgccgtgaccgccccggtgtgggccgcgggccttctgctgacggtgctggccgtgggcctgtcccgcctgccgcgcaccccggtgccttatctgcctgcgtccggccctatctcccggcgcaccgccctgttttacggcgcggtgtttttgctcagcctcttggctgtgttccgcctgcttccctggtggctggtgctgggggcgaccgtcgccgccgtggccgtcgcggatcgccgcctgttccgctcgatcgattacagcctgttcgccaccttcgttttctttttcatcctggtgggcaaccttggctccctgcccgtcgtccgggacatcctgtcccgcctgctggtgggccgggaactgccggtttccatcctggccagccaggcagtcagcaacgtccccgccgctctgctgctctccggcttcaccgaaaattggaagcccctgctcgtcggggtcaatatcggcggcctgggcaccctggtggcctccatggccagcctcatttccctgcgcctgtacgcccgcgccccgggcgcgcgcggcggacgctattttctggtgttcaccgccgttaacgcggtctttctcctggtgctgggcggcggggctcttctgctgctgtagcgtttccagcaaggcgggcttgtcctgcccgcggccgtatggtacaatagaagcaagctcttgcttggcctacatggaatttcaaggaacggaaggttgaacctatgacgaatatccggtgtctgcgcctgcacatggcggcgctgtgccttttgctcgcgagcctgctggccgccgcgctggctggctgccatcagctcgccgctacctcgagcgacgggggagagagcctgggcctcatcagcgtgcctccgctgctttcggtggatatggccacgctgctgacggcgcagcaggtttccgacgccctggcgacggaggtgaccggcccccagatttacgaggaggtcacggcccatttcgagtcggaagacgctctgaccaccgccgacatcacccttaacgaggtgacccgggaggtcttcgacgtccaattggccgtcatccgggaaacctataccgacctggaagaagcgcccaacctggcggacgccgccttctggagccaggagaacaaggaactgatcctttacgggaaggggtatatggcaagcatcgtggtggatatccacggcgtaagcgaggacaacgccaacctcctgggggcccggcagctggcctccctcgtgctggataagctataagaaaaaacgggccgtttcggcccgtttttttcaggctgtcaaagaagtacccggagggaaggggaggtgtggagggggaacctgtgctaaaaagaaagtgactataatagccggaaatcgggataaacaaataacagctatcacattacaggaagcgccgtccgagtaaaactacggacggcgttttccgttgtgaagcggaagggaggaagtttcccatcggagccaagccgaaaggtttggctctttttttatgtcaacacgaaggaggaacaacgtatggcagatgaaccgaagaaaacaacaccggaggaaaaagaaaagaatgccccgcccattcccggcaaatcagtagagccgcctgcgccggagccgaaggctgtagccccggtgtcggagcccgtaaaaaaggctcccgagaaaggcgctccccccgtcacagatgaaaaggccaagccagtagtcaaggatgaaaaatcccgtcccggcaatgtaattgaaattaccggggccatgattgacaagctcgcagcggaaaaggtggcgaagggagctgcaaagcagccggggcaggctcgaccaaccatgttgaccccggagccgaaaaagccagtggcgaagccggacacttccaaaaaagcccctgaaaaggtgctcccagcagcctccgatgtcagcctggcagaaaagaagaaaaagctggaacaggagctgcgtgaaaaatacggtattcccaaatcggataagccggtgaagccgtgggtggccccggaggttgagcaggtggtgcgcatccctcatgagaaactgcacccgtttaaggatcaccccttcaacgtagataaaaccacggcaaaattcaaggcttttgtcgccagtatccgggcgcatggagtgacgcagcctgtcatcgtccgtcccaacggcaaggacggttatgaaatcgtatccggccatcgccgtgatgcaggcggtatcgaggctgaaatcccctatacgccgtgtatcatccgtgagctgaatgacgatcaggccattcagcagatggttgaggataacgtcaataaccgggaaattacggttatggagctggctcgggcgttaaaaaagcagctggattctattaaacaccaaggggcacgtcaggcattggacggtaaggatttcaccgccgacattgacaaacgctcgaatgaaattgtcgcagaacgtaacggcatgagcgtcaagcaggtgcagcgtcacattgccctgacatcgctcatcaagcccatacaggagctggtggacggaaaaatgacagacgacggtaaagccctcaagatttcctttacccccgctgtggagctttcctacatccgccctaaaaatcaggaatatatcgccgttgccatcgagggtcaacagtcaacgccgtcgttggcacaggcccagcggatgcgggaactggacaaaaagggacttttgaacggcgatatgatcgacggcatcatgctggaagaaaaaaaggaggttgacagggtgattatttcaggtgcggagctggacaaatattttggaaaagacaagaccccgaaggaaatgaaggagcagatcatcaagctgctggatgactggaagggacagcagaaggagcagacccgaccggaaaaggcagctgccaaggaaaagtaaggcttcggaccaagttggcccgaagtgaaagcctgcggggctctgccccgtaccccgaagctcaaaggatattccccgtcgccggatttcctatagcgcagcaggagaaggccgtcaagggcttgccgccgcaggcggtggaagccataggctccaccctttgaccgccttccccggctgtgcttcaaggcggcgagcgacggggatattcccttgagccgtttccccgcccaagtccgggcggggacggaaggggtgggctgtcgtacccttaaaaaatacagatgtgaaaggagcacacatattatgaaacgaccattggcctacatcaccgccgcatggagcggcgacaaggaggctgatcgaaaacgggctgccggatattgccggacagtctatgaagccggtttctcaccgatttgccccctgttgtatcttccgctgtatatcaatgacgccattccgcaggagcataaggacgggattgatatgcgccgggatttactccggcgatcccatgtgctggtggtatgcggcggggctgcggatgaagatgtgaaaaacgacattgccgtagcccagcgtttggggattaccgccaccacattgaccggcatcgtcaccgttaagcagcagggccgggaatcccatgcttaaagcgtatataacaaatctcggcaaatacaacgagggcgagctggtaggtgaatatttggcgtttcccgctaccacggaggaggtgcaggctttactggcccggatcggtgtggatggaaagcggtatgaagaactctttattaccgactatgaatccgacattgccggtcttaccgaaaatttaggcgagtatgaaagcatcgacgaactcaattatctggctgccctgctggaagaactggatgaccggggcgagctgtccaagtttgaagcggcgttggagctgggcgattactgcggaagtgtgcaggagcttatcaatctgacacaaaatctcgacgattatgacttctatcccgatattgcggacgaggaggatttaggccggtactatgtggacgatttggatgccttgcaaattcctgaaagcatcgagcagtattttgattatgaagcctacgggagagatattgttctgaacagcagctgcacctttgccagcagcggcttcattacaaacgatggtgggcgcttcattgagtattacgccggaatcgatgaaattccagacgaataccgtgtgtttgcgtatcccgaaaggaaggaggaacgctccatactgaaagctctgaaacaataccgggaggctccagccgctgaacaaggagacagagatatagcgatggactcccacaccgagcgatagaccatagcctcgggccaacttggcccgaagtgaaagggtgaacttttactatgcaggatgaagtaaacgagcgcactgtggccttgtcaatcaaaaccgctaagctcactggccgggtactggccgataccttttccaagtgcctggcgatgtggaagaagcagcggcaggcggcgctggccccgcacggcagacagaccgtccggcagcttatggggcatggcggctccaccaacagtatcccgttgaagggagatgccgggcagttcgaccggatcgcccggaaatggggcgtggattacgcctttcataaggtcggtacaaaggactatctgttatttttcaaagcgggacaggccgacgccatcacggcagccttttccgaatacaccaggcgggtaatggcaaaagagcaggacaagccctctctccttcgccagctgcggaaattcagagagttcgtccagaaccggagcccggagcgcaagcggacaagagaggcggtgaaggaagaacgataaacggccatagcaaaaaactgctgtccctcctcccgtacctgtttgtcttttggggctttgcgcagctgggtgaagcctaccgccttgcgtcagggacggattttgcccataagctcataggaataccggcagctgtcggcccggcatttggaaccatcctgccgacagcccttttcgattggctggtgggactggccggggcggcggcgatccggctgaccgtgtatatcaagggaaagaacgccaaaaagttccggcgggatgaggaatacggatcggcccggtggggtacacccgccgacatcaaacccttcattgatccgaagttcgagaataacatcattctcaccgccaccgaatttctcaccaccaacacccggccaagcaatcccgccaacgcccggacgctcaactgctgtgtgatcggctcgtcaggctccgggaaaacccggttctggctgatcccgcagttgctccaagcccattcctcttatgtatgtgttgatcccaagggtggggtactgtcgcaggtggggcattttcttcagcggcgggaatacaaaatcaaggtgttcaacaccattgatttttcccgcagtatgcactataacccgctggcatatgcgcgacacgaggtcgcgtaattaaactgttcggcgctgaccgaacctgttattccattagcagtagcctatcgtcaccgaagcggctggcaacggtcgtgaggcagcatgacgagaaaaggtagccctcccgaaagggtcaagccgaaaccgcgaggcagaggcaaaaagctggaagcaacgtccggctggggagcttggcttgtgtagtatggtgaatgtaagtaaatcgctgttaaacgtcgttagtgggaaccaggctaaagttgctgataagcctgaaccaaaaggtatgcagtcggatgttctcctgtaagctgggaacacatggacaaacaagactgccggcggataggtggcacctaacctacacggttgattacgtgaaacgtgttaagcccgcgctctctccgtatattcggaaagctgaccgcaaggaaagccgatagaaacgcgggtaaggaacgctggaaaaagcgaatgccgaccttgtaatgaggacggatagggattgaaacagtatcctacgcgaaagcgggctgacttccagcaggtctatctttacgagagaatttacagaacttttgaaaggaggaatcgcaaatgaacaggaaactgtgtgcgcctgctaacagggcacaaagctgggaatccatagattggaagaaagcggaggcctatgttaaaaagctgcaaatgcgtatcgtaaaggctcaaaaagacggtcattacaacaaggtgaaaaccctgcaatggctgttgacgcactctttctatgccaaggcattggccgtaaagcgtgtgacaagtaataaaggtaaaaatactgctggtgtggaccatgaattatggaaaacgccaaagggcaaattcgaggcgattgagaaactcaaacgccggggctataagccccaacctctcagacgggtgtacatcccgaagaaaaacgaaaaattacgcccgctgagtattccaacgatgacagaccgcgccatgcagacactatataagtttgcactggaaccattggcagaaactctggcagacccgaactcttacggttttagaattggaagaagcacacacgacgctatcgggcaatgctttaacgatctgtgcagagccggttcccctcaatggattttggagggagatataaaagggtgctttgaccatatcagccatagctggttaatggaaaatatcccaatggacaaggaaatgctcgaaaagtggctgaaatgtggctttgtggagaccaaaaggctctttccaacagaggaaggaaccccacagggcggcacaatatcgccagtcttgatgaacatgaccttagacggtctggagcggattctaaaagaaagattccctatgagacggacagtggcaggtaaaactgtttacgaccagattaacttcgtgcgatatgccgacgactttatcgttaccgggaaaagcccggaaaccttgcgcaacgaagtcatgccgctcatcaaggactttctggcggagcgcggtctgcaactctcagaggaaaaaacggtaatcacgcatatcagcgatggttttgattttcttgggcagaacattcgaaaatacaatgggaaactgctcattaagccgtcaaagaatgcgataaaatccttcctcaaaaaagtgcgaactatcgttagggagaataaaacagccacacaggacttgctcattcgcaaattaaatcctgtcattcgtggttgggtcaactaccaccgctacgttgtttctgcggacatttttggattggttgaccacaggattttcgaatgcctatggaggtgggcttgccgcagacacaagcgcaaaggtaggaaatggattgccaataaatactggcaccatattgataaccggacgtggacgtttgcaacagagcctgctttccgcggtaaagatttcgatgaaaaatacctcaagctggaatacgcggcaaacaccaaaatcatccgattcaggaaaatcgccgctgaagccaacccatttgatgaaaaatgggcgggatattatgaggaacgtgacggagaaagaatgctgaacagtactaaagggcgggaaaaactcgttaaaatctggaacaaccaggaacggtgctgccctgtatgcggagaaagaattacatccgaaacagggttcaagacgcattttatcaccgaagacaacaggaaatggcccgctattatggtacatccctggtgtcatcgaaatctgcatgagccaaactacttgatttgagccgggtttcgttttacacgaggccttacgataggcttgagccgtatgacgggaaactgtcacgtacggttcttaggggaggggctggcagcaatgccagtctcttacccgacatcaaaacggagagtgatgtactgaaatttgtaaacgccctgatcagcaacaccaaaggggacggcaaggagagcgatcccttctggacacaggccgagacacttttgctctgtgccctcatcgcctatatcgtctttgaggggccggaggaggagcgcaacatgaacacactggtcgaaatgattaacagtatggaggtgcgggaaaacgatgacagcttcaaaaatgcggtggactatatgtttgacggccttgccaagcgcagcccggatcactttgccgtaaggcaatatgccaaatacaagctcgccagcggcaaaacggctaaatcgatcctgatttcctgcggcgcacggctggcccccttcgatatagcggagctgcgggagatcatgagctatgacgagctggggctggataccctcggagacgaaaaaacggctctgtttttcaccatttccgataccaccccgacctacaattttcttgtggcgctggccttttcgcagatgttcaacctgctgtgcgaaaaggctgacaacgtatacggcggacggctgccgcaccatgtccgggtgctgtgggacgaggcagccaacacgggacaggtgcccggtctggaacggctggtggccgtcattcgttcacgggaaatcagtctatgcctgctctatcaacagctggcacaatgtaaggcgctctacaaggataatgcggaaaccatactcggtaatatggacagcgtgatttttctcggaggccgggagcactccactatcaaggaaatatcggaaagctggttgggccgggcaaccatctccatgcagacggaggggcgatcccggggtcagtcggaaagctacagccagaatacccagcgggtggggcgggagctgatgacgatggacgagctcaccaccatgccgggagaccgatgtatcttgcagctgcggggtctgcctcccttctattccaaaaaatacgatttgaaacagcatccgaattaccgctatatggcggaatatgacagcaaacgcaacgctttccgccttgatcggctgctctcccaccggctgaaattggggccaaacgatacctatacagtttatgccgttggagagatagacgatgaggaggacattctcaattacgatgacctcgacagcgaggacgagttcatataacctcgggccaagttggctcgaagatgccgcccgacagaaaatgtcgggcttttttgatgaaaggagcttctgaatgaaacgaacactaaaaattctgacttccctgtgtatggcggttttgctgctgtgcgggatggtgctgccctctctggcggccagctatcagaacggcagtacgggaaaagttacggtttccggcgtgtgggctttccacggcggcagacagcccggtgaaaccagctccaccagcaacggcggtaatcgtggcaaccactacaacaaccggctgtactggtacgagggatattccatcgacattttgcagatggacggcagccagtacaccccgcagtataacggcaaaacgtacttttattgtatacacaagtggatcaactacggcagcagcaatcggaaattctacgttgaccccaccgggaagggcgatttgacaaagagcctgtactggaaaaacaagctcaatcaaacccagcgggatctgcttatgctggtatccatgtacggtttcccggccaaaacgccccagcagcttggtgtgtccaccgtggatgacgcctatgccgccacacaggcgatcatttgggaaatcgtcacgggacggcggaatcaaaacggccttgtatccaactatcgttcctccaccgaggaattaaacggtggaatcgccgcagctaagaataacgtgaactattttcgcgacaaatatatgctgtatccgtataccggcaacggccataccgttggtgaggccaccccggcattgacggcgtacaacaagattttggccgatattgcgaagcatgacacccttgccagtttcgcaaattccacgctgacgctgaaatgggacgcagccagcaaaacctacaagggcagcctgacggataaaaacgggatgttggtgaacagttcgatcacgtctgccctgcccgccggtctgacggccagtatcagcggcaacaccatcaccgtgacggctaccaaagcattcggcacaacgaaaatcaatatgaaaaagaatctccccacgctgcatcaggtgtcgccgctggcggtgctggaggtgacatccggcaccggtcaagaaatgctctgtggggtcatggatgatccccggccttactcgttcagtgtccgcaccgcacagggaaccgccaagatcgtcaaggagagcgaggacagggtggtgtccggcctgcaattccgggtgacgggaaacgggattgacaaaacttataccaccgatgacgagggcaagatttctgataccctcccgtcgggcacctatacggtgacggagatcaatacgccgggtcggtacaacactccggccagccaggcgatcaccgtgcctgacggcggaacggcaaccgtgacctttaagaatacgattaaaaagggatatgtggagctctacaaggccgataccaccaccggcaaggcgctggctggagccgtgtacgggatatacaacagcgctaacgtccgggtgggcgaactgaaaaccaacgcagacggctacgcccaaagcggcctgctgccctatggcgatggctattacctgctggaggaacaggccccggaagggtatgtgctggataccaccaaacagtatttcaatatccgcaccaacaatcagacagttaccattcgcaccgcaaacaccagccagatgggacagattgcggtacgaaaggacgatggcgacaccggcaagccggtagcggctcccgccacctttgaaatccgggctgccgccgacatcaagaccccggacggcacgttgaagctggcagcagggcagttggccgataccgtcaccacccagggcgggattggcaccaccaagcagctatatctcggagaatacggtgtcaccgaaaagacagccccaagcggttatgtgcaggacggaaagcggtatcccgtaacgctggcctatggcggccagaccgtccagatcgtgaccgagagcgtcaccgtccccaaccgcccgcagatgggcaccattaccgttcacaagacggacagcgacaccggcaagccggtgacggaggccgcagccgttttcaccattcacgccaaaacgaatattgtgaccggcgatggtacggtgcgctacaaggcgggagaactggtggataccattaccaccgcaaacggttccgccaccagtaaagccctgtatctcggtgcctatattgtgaccgaggaaacggcaccggaaggatatgtgctgaatcccgtgccgcaggaggtcacgctgcgctacggcggccagacagtggagcttgtgaccgaaagcgtcacctttgcaaacgatccgcaaaagggaacgatccgagtccagaaaaacgatgcggagtccggcctgcccattacagcgtatcccgccatttttgaattgcgggcgaaaacagatattgtcaccgctgacggcaccattcgctacaaggcgggagagctgagcgaaaccctctccaccgaaaaaggcgttgtcacgtccaagcctttatatttgggaacgtacaccgtaaccgagaaaacggctccaaacggctatgtacaggataccaccgtctatgatgtgactttgttctacggcaaacagaccgtggagctggtgaccgagggcattagcatcgacaatgccccacagatgggcagcatcaccattgaaaagcgtgacaaggaaaccggtaaactcatcatcctgtccgatgctaccttccagatccacgcaaaaaccgatattgttaccggcgacggcgtagtgcattacaaggccggagagctggtggataccgtgacaacggtgcaggggcttatcgcttccaagcatttatatctcggcacctacaccgtgacggaaatcactgccccggacgggtatattcttgatagtacaccccatgacgtggcactggcctacggcggacagtcggtggagcttgtcactgagagcctgtcgctggacaatgcgccgcagatgggaaccatcaccatcaccaagacggacaaggaaacgggcaagccgattgtgggtgccgatgccgtgtttgaactgcgggccaaagatgacatcatcaccgctgacggcacggtgcgctacaccaaaggccagcttatcgaaaccctcaccacgaaaaacggcgttgtcaccagcggcctgttatatctcggaagctataccattacggagatcacagccccggaaggatacctgctcgacgatacgccccatatcgttaccctgacctatggcgggcaggatgcggaacttatcaccgagggcattaccattgagaacgccccgcagatgggccggatcgtcatcaccaaggtggacgctgaaaccggcaagccgattattctgtccccggccacctttgagatttatgcggcggcggacatcgtaaccccggacggcaccattcggtacaccaaggggcagttggtggatacccttgtgacggaaaacggtgtggcaaccagcaagctgctgtatctcggtgaatatgtggtgattgaaaccattgcaccggagggctatattctcgacaccgagccctacaccgccgccctgctgtatgacggacaggtggcgtccctgatgcggtatatgagcggcgggcccgttgtggatcagccggatattggtacggattccgatacgaataccgaatccgatccgacactgcctactaatcctgatgcaccgcagcagccggatgcgactgttcctgattccaagaacaacgcttctctgacgattcccaacaaccgtatcccggcatctcccaagaccggcgattctttcccggtcgcagctctggcggcgctgggcatggcctctgttctcggtctgctgactgtgcggagacacagcaaaaagaaatagacagcctcgggccaagttggcccgaagtcaccgtgcaaggccgtccttcaagggcggccttgcttatcgacaacaaggaggtaactgcttatggagtttttcacctcggcggtggataccctgaaactgctggtcatcgcactgggtgcgggccttgccgtatggggggtcatcaatttgctggaaggttacgggtcggataaccctgcggccaaaagtcaggggatcaaacagctcatggcgggcggcgggatcatcctgctgggcaccacactcatcccgctgctggctactctgttttagcagagggacgaacatatgggactgtttgacggtatcgcagattggttcaagggtgtgttggtggacggcattatgggaaaccttgacggcctgtttaccggcgtcaatgagcagatcggagagatcgccacacaggtgggcacaaccccagcggcgtggaacgccgagattttctccctgatccggcagctttccgaaacggtgatcctaccgatagccgggctggtgctcaccttcgtcatgacctatgaactgatccagatgctcatagaccgaaacaacctgcacgacatcgacacatggatgtttttcaagtggattttcaaaacctttgtggctgtgatgatcctgacaaataccttcaatattgtgctggccgtattcgacgtagcccagcacgtcatccggcagtcggcggatttgatacagggaagcaccgccgtttcgccggacttgctggcggggctgcgggaagagctggaggcaatggacacgggcccgctgctcggcatctggctgcaatcctttttggtaaagttcaccctggctgccctgaacattgtaatttttgtcattgtgtacgggcggatgatcgaaatctatcgcgcgtccagaagcaccgctttctatccaaaggcggtgcgcggacattttgggaacccggctttagcaagccggtaaagaaaagtatcaaagatgtgaaaaacatcactttagcgtcgtccgatttaccccggagggaaaccacaagggggacaatagcgtatcggagaaatcgcaagttggggaaaccatctacccacgactgagcggcaagacgcaactttgtgaatgaggaacaaggctaaactgctttaagggcagtccgaggcgggatactcgacccggcggcgc

SEQ ID NO: 3134 - DNA, 13871 bp, Unknown
  16S sequences of unknown bacteria
ggcacgctcggcgggattctcaacgagaaggtcggacacacgaacctcggcgtcgagggaatgatgcttatgggcgcgtgcatgggcttcaccgccggagttaaaaccgggaatcctgtgctcgctattctcgcggcggggctcgcgggcgcgcttctggcgctcatttacgccgtcataaccgtcacgttcatgggcaatcatgtcgtcaccggacttgtgctgacaatattcggaaccggtctctcgagctttctcgggcaggagatgacgcaggcgaaccttccggcaagcgtgtcgaagccgctcgcgagcgtcagaattccggtgctcggcgacattccggtcgtcggcaatatgctgttcaaccagagcgtttacgtctatatttcgattgtgctcgcggtgattctgttcgtctacctgcgcttcacgaagccgggtctgtgcatgaggatgattggcgagaaccccggcgcggcggacgcttcgggcatcaacatcacggcttacaagtacgtccacattctggctggcggatttctctgcggcatgggcggcgcgtatctgtcgctcgttttcgtgccgaggtggcaggaggagatgaccgccggttcgggatggattgctgtcgcgcttgtgattttcgcgacttgggacccgctcaaggcgatattcggcgcgtacttcttcggcgcaatgcgcgcgctggggctgaagatccagaacctctccttcccgctgttcgggcataaaatcaccatcgcctcgcagtttctcgatatgatgccgtatattatgacgattgtcgtgctgattgtcatcacggcgagaaagaagaaggagtatcaggctccggcggggctcgggaagagttattatcgggaggacagataatatgacgaacttcgatgattatctcgcggaactgatgaaaaatccggacttcaaaaaggaatacgacgccctcgcccctgaatttctcccgctattgggcaaacaaccggatgccgaaacgctcgccgcgatggaggaaactgaggcgcttattcgcgaccctgacaccaaacgatacaccgtgaaagaagcattgaaggaattgaaccgcgaggattgacgccgatatccgggcatttgtgagaccgttcaccgttcacacaaccttccccatgcgcacaatcttccccgttcgcaccgcaccccgtaggggcgaccattggtcgcccgcctcaaacggtaagatgtgccttcacccctatgtatgtgcgatgtgtcaggagcgggcgaccaatggtcgcccctacaaagattgtgcgtaaatgtaatgttggtgcgtaaaacgaatgtcagcgcgatatcaaagacatccaaagagaagatataaacccacagctccccacctcggggagcttttcttcttgaacatcctgaacacgctgaacacggcgaatccacccccccttcgcttcttcactctttgtttctgtcaccatggcatgacaatcgggggtaaataccacccccctgtatatttcagaatttgttcacatttcccgtcgcgtaaactttcccaatccgtttcacttcccttcgcggttattcgtcattttcgtcattgacttttcttcggttctgagttataatataaagactgtgtgtgatttgaaaggaaggatatataattgagtaaagaggctgtaaagtccagcaaatacgagatagatatgacgaccggcgcgatactgccgaagatgctccggttcactctgccgctcatggcgtcaagtatgcttcagctgctcttcaacgccgccgacatcatcatcgtcggtaagtccggcgagatgggcgactactacatgggcgcggtcggctcgaacggcgcgcttatcaacctgctcatcgggttcttcatcggtctgtcggtcggctcgaacgtaatcgcggcgaggtgcttcgggtcaaaggacgacgagggactgtcgaaaaccgtacatacatccatgatgatagctctcgtttcgggcgctctgctgactgtcgtcgggcttcttctgtcgcgtcagctgctcgttctgatgggcacgccggacgagctcatcgggtactcgaccacctatctcatgatttacttcctcggaatgataccgacaaccgtctataacttcggaagctcgctcctcagggcgataggcgacaccagacgtccgctttactacctgacaatcgcgggagtgctgaacgtgcttctgaatatcttcaccgtcctcgtcctcgacctgaacgtcgcgggcgtcgctatagctaccgtcgtctcgcagactctttcggcgacgcttgtcgtcatctgcctcatgagagaaaaaggagctatccgcttcgagtggaagaagctctcggtcgacaaatcaaagctcggtcagattgtcagaatcggtcttcccgccgggcttcagggaacattgttctccctctcgaacgtcgtcattcagtcgtccatcaacaagttcggacccgacgtcgtgtccggaaactccgccgccgcgaacctcgagggttttgtatatgtcgcgatgaactcgttctatcaggcggtcatctcgtttgtcagtcagaacttcggtcagaggaactacaagagaatcgtgaagagccagcttatcggcattgcctgcgcgacggtcgttggtcttgttctcggtctcgggctgaccttcgtcggcaagcctctgcttcatatttacgctcagagccagtctgtcatcgacgccggggaaatcagattctactatgtcgccgcgccctacttcctctgcggaatcatggacagccttgtcggagggctcagaggaatcggctactcgttcgcgccgatggttgtgtcgctgatgggagcgtgcgtgttcaggcttgtgtggatatggggcttgttcgcggtgaatccgagcgcgccgatcaccgccgtttacgtttcctatccgatctcgtgggcgctgaccgccgctgttcacgctgtatgctttgttgttctgctgaagaaagtaaagaagaaatacccggaagctgagattaaggggtaaagaaaaggaccggttgacggtccttttttttgttggggtggaaatgtgaacgaaatcttaaatatacaaagggggtcgttctgaccgaaatctcgtgcacacgtgcatgacgtgcataaagagcgaagagcgaagggggggtggattcgccgtgttcaggatgttcaggatgttcaggaatccttctcggtcacggcttttacgaccttctctatcgccgcgtcgaccttctttttgttggattcgatatccgacgcgctgaccggctttccgttgttgaacgccttgaagacgaatccgtcgcggacgtaactggtgaagaacgtgtcgccccagtcatacatgcggttctgcatcatcatatcgagtatctttccggactgctcgtcgcgcgagtacttcgtcttgagcgcggtctcatagtacacgggaatgaccgagttgtacgattcgcaggacagagcctccatcatcgcgcctgcgaaggacgtgtcggtgaccgttgacggaacagagtacgggcatccgccctcgacgcgggaatagtaagtcgtctgcgtctcatcatacttcgggtacggtatgattccgtaatcgctctccatctcgcgcagcgtcgctttgaagatgccgccgaaggtcgtgttgcagaacaaagcctgatccgaggtgaagagggtcaggtgcgagtcccagtcgccttccttctgcacaaaccacgcgttgccgccccatgtgaggctgtacgccttgtcaagcaccgagagcatccgctcactgctcatgtcgaacacagggatatcgtcgtcgtttttctcgaccgacaggcaaccggcgcctatccagaagcagggcgcgatctgtttcgcgagcgacacaaagccgtagctgtcgtcaaggtcgtaaatactgtcgccgttcaggtcgccggaggcgagattctcgtattccccgaacttgtcaagcgtccatgtgccgttctcgacgagatcatacggggaagcgatctgaagatccccgaccatcttcttgttgaacagcatgacgtgtgtgaagtcgtaagctgtcagcgcgatgtcgctgtaagcgaggacctgtctgccgccgatagtcgcgttgcggttcagcgactggttccagtagggctttgagaggtcgatgttctccacctcgtcggcgaagcggatcatgttttcggtcgcgaaggtcagggcgtctctgtcgatgagggatatgatgtcgtaagcgtcctctccggctgtgatgaagttgcgggctttgtcgccgccgttgtcccatgtgtagagatcttcggtcatggtgattccgaaccggtcgcatatccggacgttacgcgcgtgaatcgcgtcgttcagcacgtctcctgtagcctcttcgggagcgagcgccgcgttctctgtgaccttgttcgtcagtatccgcagttctcttccggtgaaatcaaggtcggcgggcagatcgtccttcacactggtatcagccgtggtctcctccgtcgtgtcagagccggaagatgtcgtctcgtcgttcccgtcctcaaccgtaccgcaccccgcgagcatggcgatgagcagaagcgccgaaataagtcgtgttttcttcatgatatagcttcctttcaatattatattaccagatcaataacagccatcccgcacatcggcacgtcaacacgcgcgggcgaacaattgatcgttatggtctcatttttcacttccctgccagcgcagtcgagtatccggcagcgggcggtcagcttttcgttactaccgatatagagcggattcctgtcaacaccgttcacgatatacactctctttcgcggtttgtcgagcatgagcaggcgttccgagtacatcgcgtggagctcttcctcgtcgttccggacggtgacatacgagtagttcgcgtcgcatctgtggggcatcagctcgctcttttgtaagagttcccgcttctcgctcatgaagttcagccagaatttcagcatttcccgctgttccgcgcttatccgttcaaacatcagagatatctgcggcgtgcagaagaggatattcaccatctgtagagcggagacctccaccggctcgtccgggttgaactgcaccatgtcagagtgcacggcggcgtgcgtgtgaagtctcagatcgatcgatccgacgcggtttgtcaggtagtcctgcgggcagtcgccgacgcgtatcatgttagcgttcgccataatcgccggtccggtgtagttctgcctgtactcgatgaggaaatcaggcgagatttcggaaagacgccgcgagatcagccgcgccatgtcgtccacagcgtcggtgagagagagataatcacgtccatcggcgttttccggtctgacatcgccgccctgaaaggaatcaagaaagtcgatcttcagcccgtcaaagccatatttctccgctgcccggcatacatcctcggtcattctcgctctgacctccgggaatctcgggtcgatgacccatccgccggggatcttcttgtcgccgtaaagcctcgagagcttcgacgcgtcgccgcagagtccgggacctatccagagcatcgcgcgcatacctatcgcgtgaaccttgtcgacaaagcccttcatgtccggaaacttgtctctgttcggcgtccagtcgcccgcgcagctgtagtcctcaacacccggcgtggtctgccagccgtcatcgagaatcagcgtcctgcaaccgaggtcataagccatccggcactgctcgagcaccttgtccgcgtatatcccgcgctggaacgagtaccacgacgagaacaccgggtcaaacgcgaagtccggcagtctgtgagaaggatagaacgaagccatgaagtcggaggcggcgcgcaccgattcccaccagtaacgctcattccgggcttccattgtcgtcatatcgcacagttttgaactatcgggagatgtaccttcggtcgatgcgtcaatgaacagcgacagcgtatactttttcggctcgcgcgatgttgtcaccttactcgtctcggcgatgaactcgaggcattttgtccggtcgtcgacgccgattctgagcgcccaagccgccttgcagtcggacagagccgccgtcagacggttgcggtcatccgagcggtagaacgagacaagcggcgctccgccggtgaagtttgtccatgtcgcgccctcccagctgttgtgtacgcctttgtcgaacatcttcatcctcgggaaccacctgccggcaatgtcgcccgccgggatgtggaaggctgtcttcacgccggtaacaggctcgtccgaggtgattgtgatgtcgtatatatccgcgccgtggtcttcgcgcatagttacgctgacttccgctttttccggcgtgggggttatcgtgagatcgtatttcataagtttttcgctcctgcgcttgatttttgtgttccgatgtgctataataattgtactatataaaacgcgccctgtaaagccggaattccgacatttagtatcactttccggacatgagcggaaattctgttgtaaacggaggaaaaaatgtgaaactgacacagtacaacgagaagctgacctacctcgacctcggagccgggaacggctttcttgacatacgcgccgccgggacggtgggagccgacccggaataccgcaccgggcagataccggacggatacacgctgatagagtatataatctccggaagggcgtacataggcaaaggttcggcacagaccgctctgcccggcgacctcgtgattctgagaggcgtgattcagacggacagcgagccggacgggaacataaaatacgtgaacgacccttcgtcgccggtggaaaagctgtgggtgacgctgaaaggcagattcatggaggcggcgtctgagctctacgatattaaagcgccagtgacgataaagcgcgcgcccggcagccgtgagccgcttgagagaatgataaccgacctgtcgtccttcgggtacaggagagctgacgcgtgccattcgcttctcggcgtcttcgaggcgacgctcggcgagaccggggaggaggaggttcctctggcgaagcgtatacgggacgtgcttgaccggcatatcgcgagaccggtgaagagcgcggatatagcggcgtatttctgtctgtcggagcggcatttagagcgggtattcgagggagagttcggcgtcacgatattcggctatctgcgcgggaagcgattcatagcggcgtgcaaagacctgagaacaacagacgagcttatctacagaatagcgtcgagataccagcttggaagcgcgagccacttcgcgaaggagttcaccgagcgctacggcgtctccccgaccgattaccgcgagagattcaggcattcgtcgcctgtcaccgaggaggacacggggaaatacatcgggacgatttatgatgggttaaaggtggaatgacaaacatcgggcaaaatgccgacatgggttatgccctcaataaaattggatggacacctacatacatgacgaaacgttggatgaaggtctacacgcttgacgaaacgttggatggaggtctacacgcttgacgaaacgttggatggaggtctacaccgcttgacgaaacgttggatagaggtctacgcttgtaggggcgaccattggtcgcccgctcctgacacatcgcacaaacataggggtgaaggtagatataaccgtttgaagcgggcgaccaatggtcgcccctacggggttgtaccacatatcaacattttaccgcataccaacattttaccatatatcaacattttaccgcataccaacatttttcacagacaaacaaaggataagggctgtcacaaagcgtggcagcccatttttatgtcgcgtgacctatgtcacgtcgtcacgtgtgacctgtgtcacatgttcccgcacccgcacccgcagccgctctgaccggtgactctccgtccgggggcgaattcctctatcgggaaagccatgcggttgaaggcttcgcaggggctggattcggcggtctgttcgcattccttttcggggacgctggactcggatgcgctgatgaggtactgttcgggtctctcaagccttatgaccgagaagaagccgagcgagaccgcgaggtgtctctgtccgccgtcgacaagcccgtttccgatgcggtcgctgagtctttcgggtatctcaccgcagcagcggcagcagcagcagcggcactcgtgcggttcgacgactcttgttccgagtatcacgggctccgcgacctccactacagcggtcgggttgttggtgctcatctcgccgtcgcagggtacggagcagaagctgtcggaagcctcgttcgaccggaaaatcttgacttcgccttcgccgccgtaaagtacgacagacttttcgcagacagccaagccctcaaagcactgtgtcttgccggggcatacgcaagcctcgcactcgagtctcacataatacctgacggtgacgcggaagaacccgcggctgagctgtacagggtcgacacttatagaggacgagcagatttcggcggtgcgtgtgcgtacctgaccggtgtgctcgatgagagcctgcgacgcctcgtcgaggaagaccctcgtgtcctcgaagcagtcgcggtcgcggcaggagtcgaagacctgattcacgtcgatgaggacgcttccgttcccgatctgtgtgccgttgcctccgcatcttgtcagcgtcgtgtcgccacggagggttgaggtatcgtttctgccgcggcaggagcagcgttcgttatcattcatagccggtaccatcctttctctttgatacactacatattatgccggagggcggaagttggcacagacgatggttaacgcttttgtcaaaaagtttgatttcgcgtatttttggtttcattttggatagcatatcgcgtcaggatgtggtaaaatagaagtaaagaaaaacgcatgggagcgtgaaatactgatggaatacacaataagaccgagaagcgtcagccttgacgacagctatgacgttatcgtcgcgggcggcggaccggcgggcgtcgcggcggcgtattcggcggcgcgtgagggcgcgagggtgcttcttttagaggcgaccggggctctcggcggaatgagcacgatgggaatggttccctcgtggtgcccctactcggacggtgagagaatcgtctatggaggaatcgcggagagaatgctgatggcgggcaaggacgagacaaggttcgtcgacccgaagatggtcaactgggtgccgataaacccggagacgatgaagcacttatacgatgacctgatggtcactggaaaggttgacgttctcttcggcacaaccgtatcggcggtggatcaggagcccggtaaagtaggaactgtaatagtgactaacaagtccggactgacagcgtatcgtgcgaagatatgggtagactgcactggcgacggagacctcgcggcgtatgccggagcgaagtttgagctgggcgctgacaacgacccgaccgaggtccagatggcgacacactgctttgagatcggcggagtgaacgacgagacgtacttgaaaggcataaggctgcacaacggaaacccggtgtccccgatattcaggatagttgaagacgcgaaatatccggacgtgaccgatccgcacttctgcaacaacaagataggaaacggagccgtgggcttcaacgccggtcatcttcccccgttcaatccgaccgacccgaaggcgctgtcgaaggcttatatcctcggaagaaggaaagcgagagaggtcacacaggcgctgagagagtactatccggaggcgttcggcgattctttcctgctcgcgaccgcgccgctgatgggcatacgtgagtcgagaaggatagtctgccgctacaggctgacggcggaggattacctgtcaagggcgaccttcagggatgagatatcccgcaactgctactacctcgacgttcataaaacagagaaggaaaagcagagactgaaggaatcgggtatcgccgaaaacaccttctgcgcgaggttcggcaagggagaatcgcacgggatcccctacagatgcctgacgccggagggcttcgacaacctgctcgtcgccgggagaatgatagactgcgacagacggatactcggctcggtgagagtgatgccgaactgcttcacaaccggagaggcggcgggacttgccgcggcgatctgcgtgaagaataatatcagcgtacatgatatagatacggatgagctgagggagaagctcaggggctacggggcgtatataaagtaagggttgagtccggagcgtcacaatttgttcaaacataatcgcaaatatttcgaaagtggaataacatttctgtatactataaacaataatataaaggagacaaatacccatgaacaagaaactcatatcactgttcctgctggcgtcaatggcggcggcatccctcgcgtcctgcggcggagacggaagcggaacgaacaacgacacgacggcatcctccggcgagaccacgaccgaggcggttgacacaaacctcgactctcacggtttcctgaaggacgagatacccgctgacgcgaagttcggcggcgccgaggtcaatatgctcattcgtgaggcaatagcgaacaccgagttcttcgttgaggaggcgaccggagacatcgtcgacgacgcgctcgtgaaccgcaacaacaaggtcgaggagaggctcggcgtgaagctgaacttcataaccatgcccggagagtggggcgaccgcgacaacttcaacggagcgataaagcagagcgtcctggcgggcgacggagcgtacgatatctgcgccgtgctgtcgaatcagctggcgaccctgacgcttgacggactgctgacgaacctgaacaagctgcaatatctcgattttgagaagccgtggtgggcgaagggactgctcgacgagctggcggttgacgacaagctgtatttcgcgtcgggcgacgcgtctctcggtctgataaacggaatgatgtgcgtgttctacaacaagaagatgtgcgaggacttccaggttccggatctctatgagatagtgaacaatggcgagtggacgatagacaaggtagccgaactgacaaccggagtgtatcaggatctgaacggcgacgacaagaagggacccgaggacaggctgggcttcgcgaccggaagctacaatcagctgtacggctttatcgattcgttcaacctccagatactcgagagagacagcgagggtctgccgtcaaaggtggtctttgattccgagaaggttgttaacgcggttgataagctcgtgtcgctgttcaaggacaacaacgagttcgcgacgctggacaaggacgcgacggattattcggacgctttcaaggcgggcaacgtgctgttctgcaccggagagttcaaggacacgtcggtgtatcgtgacataagcgcgttcgactacggcgtaatcccgttcccgaagtatgacacggcgcagaaggattacagaacgacggcgagagcgacctattcgagcttctgcgtaccggtgacggcgaataacgctgatatgtcggcggctgtgcttgagtgcttcgcgtcggagagctaccgtcaggtgagcccggcgtactttgagacggcgctgaaggtgaagtactcgagagacgacgagacctcgcagatgtttgatcttatcaagtcttctgtcacgttcagcttcgcgacctcgttcacgatggcgataaatgacccgcagaacacgttcaagcagagggtatccgagcttaagtccgactgggcgtcctacatggcgacctggaagcccgcagctgaggaaaagctcgcgaagacgctggagacgataaaggaactgccgtaagagcgctgttcataaataatttacagttttacctgtgaatggcgcgcagatatggttgacaatccgggcggtttggtgtatactatagataggatagggatatcctgacggcggcatctaacgccgggtgcggttggcaccgaaaatccgaaactaatgccgggcgtacggaccggagcgtcggcgggcgacagaaaaacccgaagcaataccggactttgagccggagcgttggcggacaacagaaaaaccagccgaattgggggaggtaggtgatacttcccctttttgttattgtgtagtatgctattgacaaacagatcataatgtgatataatattatcggaggtgataacatggcgacatcaagcatttttacgaatataagaataaccacggaagaacaagcaaaggcgttcatagccgcgcttgaaaaatcggaagagctcgcgaaaggcgaggtaatcaagatgccggacaacatccgcagagttaccgaccacgatgagatacgacgtatgtacgcgaaaagattcgagaaaaaatgagcggatattctgtgcaaagcattcctgaattggttgattctataggagaagacggaataaggactctgatatctgaattttcatgtccgatcaatcttgaaatcgaaacgtttgttaagaacagctccatcgacttcgcaaatcaaaagatatcagttacccattttctgctggacgaagattatcacatcgtagcaatttttacgttggcacataaagccatagaaatcgatgtatccaaaatgtccgctacatcacggaaaaaagttgcaagatacgctgagattgacaaaaacacagggaaatacactgtttccgcttttcttattgctcaattcgggaagaatatgacaaacggtatcagctcagacatcccatgcggaaatgagattatgaaatgtgtaatggatacattgaaagatgttcagcgtatggtaggcggtggtatcgtctacctcgaatgtgaagataaacccgctctgcttcatttctatcagaacgaaagcaacaagttccagcctttcggcgcacgcacatcgatacaggacaacacaagctacatacaactcctccgcttcttctgaaaaggacgccccatccccggacgtcctttttcatatcctataaccttttcagcaccttcagaatccccgcgattatcggcgaggcgttcagcgcgaagattatcattatcccgagtacctgcatcagtatccagccgggggcgtcagacatcattgtcaccgcctgtacactcaggatgatcgtgttgacggcaagctttctcgaatgcagagggaacctgatgaaccgcctcgtgtccctcgcccgtatgataaacactacaaaatacgagaagaacgtcgcgatggcggcaccgatcgccccgagctttgtcggtatcagaataaggttcagtatgacgttgattcccgcgccgatcatcgaggtcacgagcgactgaacgctcttcttgtcaacgagatacacgctgcccatgaaggtcacaagccccgaataaaccgtcgcgatgatcagtaccggcatatacatccacgccgtgtaataatcctccgcgaagagtatccgcgagaagatcttcgagaacgcgataagccccgcgcccgaaatgaacagcagtccctgatagctgtcaaaaaccttgccgaagaaggcggcgtgcgcccttttcgtgctctcgtccctctcggatatcgccgagaactgccacgcctcgatgaatattccggacagcagtatcagcattgtcgg

SEQ ID NO: 3135 - DNA, 4392 bp, Unknown
  16S sequences of unknown bacteria
tcagcgttagctgactgagagattgaaaacattatatttgtattcgatattcgcttttaaatcaagctgttttatgtcaatccctccgatttttctccgagaaaaatcacctccctttaccaaagggcggcaatattgctggcttttggggctgttatggcaacctaaaagcgcaaaccggcaaaagaaaaagcggcatttctaccgccttttttcaattcgacccgacttttccgtcgggcgtttttatctttgtaaaatcgtctctttcagggcaaccaccttgtcggctatgcacaaaatccaggcctctcttgaagatggtattctctccgggtttaacggccacatatggctgtatataacgccggcggttttttcatcaacattaaaatattttatagcgttttcccttgcggttttggcgtgagtaaggccgtgcaggcgatgtttaccgtcgtccttatggtgccaatcgtataaataaaaatcgtgcagcatggcgcctaccagcaaaacccttaaatttgctttgagagaaaaccttttgtttattttatagcaaagtatcgcaacgcttaaacaatgccgatatgtagtcacttttccatgttggatatattttttcataagctgaaccctgtcgtcagcctgcaaataggagataacatcggatatttccttgttttgtaccattatttacacaaccccgcaataataatttgtcgttttctgtcatgttattataaatacttttatgttatatttcaagacttagttccttaattttttgtgaataaatttttataaaaattctttgtgtttactcaacaaaaaacaccgccgaagcggtgttttaattttgcttatttgctgtctaaacaaggggattttgccttaaaactttatttattcgtcactttcgtcttcgtcgtcgtattcaacttcaaagggagtgccgcagttaggacaagtacaatcagggctgaaaagcatatcttcgtccatgcaaattacctcgccgcacttcgggcaggtaatttcatagattgggttctcttcgtcgtaaagatcggtgatgtcctcatcgccgtcttcaagcatatcgtactcatcgtcgtcatagtcccaatcatcatcatcttcgtcttcgtcatagagagcgtcctcaacatctgtcaagtcctcgtcaatggcgtcaatttcatcataaacccggtcaagttcgtcaaaaatctggttgatatcaccttcgttttcgctaacctgttcggtaacatcgccaagcaagtcaactactgccaaaagaattttaccctcttttgaagaatcgtcaagtttaaggccctcgcaaagacctttaatatatgcaagcttttctgtaattgtcataagtgttttcacctttcaaaaaataaagattaagctctttccatgtattcgcctgttcttgtgtcgatacgaatttcttcgccttcgtcaataaacaaaggaactctgatttctgcgcctgtttccaaagtagcaggtttcaatgtgtttgtggctgtattgcccttgaagcccgggtcagtctttgtaactttcaaaactacaaagttcggcggttcaataccaaagattttgcccttgtatgaaagaaccttaacaacttcgttttccttaacgaatttgaaagagtctgaaagttcccttgcgttaatcggaatctggtcataagtttccaaatccataaagatgctgagatcgccgtcatcataaagatactgcatttcttttctctcaacaaacgccgtagggaatttatcggttgggttgtatgttctttcaacaacagaacctgtaattacatttctgatttttgttctaacaaaagctgaacctttacccggttttacatgctgaaattcaacaatctgcaaaacctgtccgtcttgttcaaatgttacgccattgcgaaaatcgccagctgttatcatatattcaacctccatataatattacataaatatgatatattacaattttacattatatcttacaatatttcaatagcaaatttttatttcaagtaaacaatttgcctatttttacaaaacttacctctcttttgcccaaatgtattcttattttggcaattaaagagatgcctctttccccacactttacagtattatcagctctttcggtgactttgtaagatttacacagccatcggcggtaactctcacggtgtcctcaattcgcacgccgaatttgccgggcaggtagatacccggttcaacggttatcataacgccctcctcaagtatggtgctgtcacttggagcgaaaaagggtctttcatgtatttctatgccgtagctgtggcctaagctatgaccgaaacagccctcaaagccgtgggaataaatatagtctcttgctattttgtccacatcacagcattttacacctgcttttatgccgtccaaagcaagcaattgagactgcaaaaccgtgtcatatacatacttcatctcatcgctgactttgcctatggcaacggttcttgtcatatcggagcagtaacccttgtatgaagcggaatagtccatggtaataaaatctccggtttcgataattttatcccccggtacaccatgtggcatgcttgtttttgcaccgcttatgagaattgtgttaaaggcaaggccggttgcgccgtttctcttcataaagttttcaaggtcgagagccatatctatctctctcttgcccggcgcaagctgggtgcaaataaacttaaaggcttcatcggttaatttttgcgccgtgcgtatgtattcctgctccttttcgtcctttatgctgcgctgttttgccactatggcggtaaggggagaatcggttataatattggcggaaaggcacttctttaaaccgtttaactctccgatggtcaggctgtcctccacccaaacttcatctgtgccgttttcttttaaaatttcgtttacctggctgtaaagcttgtcttgaagaataacctttgcgcttgtgatgttattttgcgccacctcgatataccttgaatccacaatgtaataggcaccggagggcaaaattatcaaagtgccggcctccggggtctgtgtgccggtaaagtaatacttgtttgcctcgcttgtaacaagcgccgctttaaaattttccttttcggcaatttccaaaaatttttctattctgttcattgttcttcctcctgtaaagattttataatttttaaaatttttgaaataagggtatttacatctgcggtgttttcaaccacataatcccgatattttaggtacaaatgcctgcgccggcggctcagttcgtaaattttgcccgggccgtcttttaaaagagggcggttttgtatgtctatatccgccgctatatgccggggcgggcggtcaataaagattgtaacgccgttttccctaaggtatttcatattttcttctcgcagtataactccgccgccggtagccacaataagcccctgcattttgccgatttcctcggcgcaggcggtttctttgtcacggaaaaatttttccgataccaaaaacatttctcttacggacatggaatacttgctctctgcgtattcgtcgcaatctatgtattttctgtttaaaatctgtcctaaaataacgccgctggtggttttaccgcagccggacagacctataagcactatgtttttcatatattcaccatatccaaaactgccaatgccgccacggattctataaccggcagagcacggtaaactatgcaccggtcatgcctgccggtgacggtgagtttttcctctgtcatggtttttacatttacagtgttttgtggtatggatattgagggggtgggctttatccccacggtgaaaaccaccggcgatccgtttgtgataccacctaaaattccgccgttgtgatttgtttttgtaattatctttctgttttctatggcgtattcgtcatttgcccggctgccgtccatttggcagaggtcaaatccgtcgccgaattccacagccttaaccgcaggcacagaaaaaaggattgaagataatttgctctccacagagtcaaaaaacgggtctcctatgccggccggcaagccgattatagcgcattgaatactgccgcctactgaatttcccttttcttttgctcttgtcactgtcttttccatatcaatggatttttcccggcaaataagagggtactccatagctttaagtctttttattaaatcatttgtaatcggatggggaaatttttcgtcccttacaccgcctatgctttgtatatggcttattaccacaatgcccttttgccgtaaaatctgccttgctac

SEQ ID NO: 3136 - DNA, 2019 bp, Unknown
  16S sequences of unknown bacteria
aaatggaatgcagcccgccagtctgagggcgagaacaaattccttatctgcaacgccgacgagggcgaccctggcgcgtttatggaccgggccgtgatcgagtccgatccccacagcctgatcgaaggcatgctcatcggcgcgtacgccatcggcgcctccgaaatgatcgtctatgtccgcgcggagtacccgctggccattgagcatctgaacctggccatccaggaagccagagagcggggcctgctgggcaagaatattctgggcagcaatttcagctgcgatatgcgtatcaaggccggcgcaggcgcgttcgtctgcggcgaggagacggcgctgatcgaatccctggagggcaagcggggcatgccgcggctcaagccgccgttcccggcccagtgcggcttcctgaatgagccgtccaatatcaataatgtagagacctttgccaatgtggcctggatcatcgaaaacggcggcgagaaattcgcggccatgggaacagaaaactccaagggcaccaaggtctttgcgctgactggcaaggtccgccgtggcggcctggtagaggtccccatgggcatgacgctgcgagatgtcatcttcgacatcgccggcggtatcaagaatgaccgccagttcaaggcagtccagatgggcggaccctccggtggctgtatcccggcctccctgctcgatacgatcatcgactacaaggccctgggcgcgactggcgccatcatgggttccggcggtatggtcgttatggatgacagcacctgtatggtcaatatggcccggttcttcctgagctttacggccaaggagtcctgcgggaaatgtacgccttgccgcgtcggcacgacgcgtattttggagatcctcgaccgcatctgccagggcgagggcaaagagggcgatgtggagctgctggaagagctctgcaagggtgtcaaggacggcgcactgtgcgggctgggtcagacggccccgaaccccgttttgacaacgatccgctatttccgcgacgagtacgaggcccatatccgcaataagaagtgtcccgcccaggagtgcaccagcctgctctcctaccggatcgacccagacaagtgcaagggctgcaccctgtgcgcccggaagtgcccggtgcaggcgatccatggcgagccgaagaagccccatgcgatcgaccagaatgcctgcatcaagtgtggccagtgcatcacgctctgccgcttcggcgcagtgtctgtggactaatgggaggtgcgtatcatggctgaaatcaaaatcatcatcaatggcaaagaatgcaccgggactgccgggcagacgatcctgcagatcgccgcgcagaacgggatcgagatccccaacctgtgtgaaaacggtcagctgaagcattacgccggctgcggcctgtgcgtcgtcgaggcggagggctgcccgaagctgctgcgcgcctgttccacgattcctaaggacggccaggtcatcatgaccgattcgccccgggcggcgcagtcgcggaagatcaccatggaactgctgatgagcgaccatgtgggcgactgtaagggcccgtgtatgctcaactgccccgccgggacggaatgtcaggcctatgtcaagcagatcgccctaggcaatgaccgggaggcggtgcggatcatcaaggagaagatccccatgccctcctccatcggacgggtttgtccccatccgtgtgagacggcttgccgcagaaagtatgtcgagcagccgatttccatcgcgtatctgaaatatttcgcagccgaccgcgtccgcgcggctggcggctatcagccggaggtcaaaccggccacgagcaaaaaagttggcgtcatcggcggcggtcccggtggcctggcggcggcttattacctggcctgcaagggccacgacgtgacggttgtggacgccatgcccaagatgggcggtatgctgcgctacggcattccggaataccggctgccgaaggcaatcgtagac

SEQ ID NO: 3137 - DNA, 23907 bp, Unknown
  16S sequences of unknown bacteria
aattagcccaaacttatacgcctgtggacattgtgtaagacattgagttgcgtaacaccgcagccaacgcagtagtggttgaagcaggaagctccgacttctataaatcggagtagttcacaatcgggttactgttgataatatttcgatgtaaaaaccataaaaaataatattaaataatatattgacatagtttacaaaataatgtaaactattgtcagcaaagccgaccgaatgaatgttaacaggaggtaacatgatttcggacaaaaaatacagaaaaggcacaccggtatacgatgccgtatactggctgctccggattactatgcgattaaattctataacattgtggggaaaaatcaggtactcaaagatatacaggaatcggaggaaaacagcagctattccatcagagatgtaatcatattcgccgaaaaggaagaaagctgtatccgcaggagcagagaggttttagactatgttcggtcagaatactgcgccgacctgattggagttatggacagagcatatgaacttcttgcccagcgcggagggcatcatatcatatattcggagcttctgcgaaaacgatttatgactaagaacgtagactgctgcctgcttgaagatacatattgcagctactacgaacagcttaaacattctattgaaaaatacagcgagctgtttgcctctgtcatcaagagaaatcacagacagttttatgacgttcgcaccaatgaggatatcgtgagagaagtggagatgatgcaaaaggcctgtaaaatacacgaaaagagcggcgtatgctataaagataccctaaagcttcttaaatgctacagagaaatcaaatattcaggtattcagaaaagaataggcgattcctcaaaggacattgaagattttttgagtaaaggctccggcagaaaaaatgaatatgaaaaggcccttgacaggatagagtacaccaatctgcccaacagtatgaaaaggtggctgtattcctcaatggttgaaaccaccaacgcgtatatatcctttgtagatgaagcgatgagaagaatgggctggcttggaaatgacagcagagattattgcagaatacttgaaattctgttcatagacccggagtggcacagcaggggaaccgaagaaaggttaaaggaaacaggactgacaacaaggcagttttatgacagacggcgcaaagccatagagatgttttcaaaaatactgtggggtccttttggacacagacattgtgactctgttttttacagaatgtaataataaaggttcagaacttgcggagagtttctgaacctttgatgatatattctttaaatttaaaaaaaacgggtttaacttatttcactgcggtttcgagagccagtttcatcatatcggtgaagttcctttccctgtcctcaagagaggctttttcaccggaaatgaagtgatcgctgattgtcataatcgcaagcgcatttctgtggttgtaggctgcgttcatatagagcgcggccgcttccatttcaactgcaagcacgttcattgaagcccattttttccaccagtcctcgccgatttcataaaaaacatcgcatgatacggtattgcccgccttgatatttattccctctgcatcagatatttctttaagtctgcatagaagttcccagcttgcgcagggcgaaaaatgacccggaagtccgaaagtatgctcgtagtttgaatctgttgatgccgcaaggcttacaacaatatcaccgatatttatatcactgctgaatgaaccggcagttcctattctgattatattttcgacatcgtaataagtaaaaagctcccatgaatatattcccattgagggcatacccataccggagccctgaacagaaacaggaactcccttgtaggtgcctgtatatccgtacatgtttcttgtttcattgtataaaacaggggagtctaaaaaattctcagcaatatatctggctctgagagggtctcccggcattaaaactgtttttgctatatcgcctttgtttgctgaattcgatactgttcccataaaaacttctccctaaataaattctatatagtcctttgatgtgtcaagtacagcctctgcgcccataggtatggcaggctgaggatatatatgccctgcatgaaatcctgttattacaggcttgccgcaggggagtaccacttcctctataatccggtcaagtgtaaggctttcctgtgaagtatctttgctttcacagtccgcaaatattccgaatactataccggcggcttcgtcgaatttgcctgccagagcaagcgctgtcaggtttttgtctatacggtaaggctcttcggatacatcttctataaacatgattttgtcttttgtatctatctcatatggcgagcccagtgtgcctgcaagaagcgacaggttgccgcctgtgataatgccctttgccttgcctttcactaaaaccgatattgctttgccctcagggttatataccctgtgcggcatataaccgaatatgttctctttgagagagtctaaggtgtagctgctgtgaaccgtataatcagtgcttggcataggaccgtgaaatgtcataaatccgcatacattgttaaagactgtgtgcagcgccgttatatcgctgtagccgacaaaaaccttggggtttcttttaatcatgtcaaagtcaagcctcggcagaagccgcattgtaccgtatccgcctctcagacagaatatgcctttgatactgctgtcggcaaaagctctgtttatatctgaggctcttgttatgtcatttcccgcaaggtagccgtgatgaagtctgcagctttcgtatacttccggtacaagaccgagaaattctattgactttattgatttctcaagaacatctgcaggtacaggtgaggagggcgcaaggagtgcgaccttatcccccggattaagaggtacaggctttatcatttcatattcctcccgaataattaaattctgcttaataattatatattgcggcagctatatatattccagcgaagcctttggactgttctcagttatattttctccgatatcagttgtattcctgctgataagcactgtttcaagctcatcgcagtcggcaaatgcttcatcgccgattgagagaagactttcggttccctcaaatcgtctgattgaagaacccttaaatgcaccgtctcttatgcgtactactgtaggcggaagtacaacctctctgatatgagtgttttcgcgaaaagcagttttgccgattttttctacgctgagaagtcttgtctctgttatattatgaagctcatcggtaatttcagcttcaatatgagacgggatttcaacccttttgtctgttcccagataggtttttactgatgctgatgtttcaaaaatatagtattcgaaatcgccctgtactttaagataaaatttcttatgcgcaatattggaactttcattgatatcagtgccgaacaatctgtcaatagaggcgccgaggttgatgtcgtgagaggccttaaagagaacaaggtcttcaggacgtattgtatttaatatttccgattcaagttcaatgcggttttcaaagtacttcgcttcaataccaagctttgaggcttcgcttactgtgaaacggatactgtctccgtatcccagaagaagatcgatcttgtggtttgagagcacttctgcaatctgcctgtgagtttcttcgcttatatcaccaagccccagaatatctccaaggactgcaatgcgtctgcctcccggaggaactaaaatatcgtccattgcgccaagcgtgttttcaatggccagcagggaactgttatagcagtctgcaaatatgttgtatccgcatgggtgtataatattctgtcgcatgccggcaggtctgtatgccgaaatgccgctgaggatttcttcgggtttcagcttaagagctttgccgactgcatatgccgctacggcattgagtacattatgacggccgggaacgaaaacctctgctctgtgttcttctcctgccgggcggtcaactattgtgaatttaagccctgcattttcggttattgtaatatcttttgcaaaatacatggcgttttcgttttcaaggctgtatgtaatgacattttgcgtaaacggatacgctgtaagaatttcatcatcatagttaataaaaaccgtaccgtcaggtttgccgtatgtggaaagtgaaagcttatcctgtgcaagcgcctcgcggcttccgtaactttcgatgtgagaaactccgatgtttgtgtatagagtcatatcagcctcaagctgtcttgcagaggctgtgattgttcctctttcgaaagctcctacctcctggagataaacattggtcggccttttgagcttctgaatgtttcttgttacagaaaacatcgaattgttattgcctttggagataacaggttttttgtaatgggcgcgcaggactgattcgagcatttcctttgccgaggttttgcctacggagcctgtaactgcaattacttttgccttatgtattgaccttatatagtgggaagctctgatatatgcttcttttattatactgtcaccgttttcggcagtgtctgaaaggataagactgttaggataagaacactgcatattagaaattatgaacaggcatttcttgttcattgccattgtaagagcatcttcgggacttcctactgatttgggtgatttttgccagtgcataaaaacagagttctcggtgagtctgcggggatctgcggtaaaatcgctgaccgggcggtctgcaagggatttgaatttttcaggaaaaggcagctgcgctatatcaaaaaactttgaaagggtaagatttcttttttctttgtattctcggctatggcagcctctttttttgcctgtttttctgcctgcttttccgcctgaactttcgcctcgcgtgattttttgctgaataaaaacatttactgtattccttcctgaatataaataagtagatatataataagataaattattggtaagaaaaaaaccatgggagacacatccatggtttttcgtttgctcatgctgtgtatttaacttatacacgggtggggacgggtgagacttaagcgttcgctttgttgaatctctttgctaatcttgaaacttttcttgaagcagcgttcttgtgaatagttccttttgcagcagcctgcataagtttcttttctgcaagggcaagctttgccttagctgtctccatgtcgcctgcttctaaagcagcgtcaaagctctttaaaactgccttaagatgatttttaattcttctgtttcttgcagttttcttgtcgataacacggattcttttttttgcggatttaatatttgccatttaaattcaccccactttattattttttagctaaattcgcagatttagtatatatgaataaaaaagaaaaatcaaggggaaagtaataaaaaaacgggagggagcttgaaattatgaggctcaaggcaggttttgccgctgaaaacaggcagatgtgtgaggaaacttccaaataataaaatatgtcaggaggaatagtacaatcaaagaatttgtgatacaatacatttaggtcttatcctaccgggctatacacgagcataaacgtgcagggatagttgcgataatttcgcagcttctttgtacgttttttgtatgcataattaattgagataggaactgaaaaaatgaacaaaaatataaatatcatcaccgatttagatggaagaaaagttgttttaattaatgatattcgttttaaaagcaggaaatcgtttgactgggatgacatagaaaaatacctgaaagaaaacattggaaatttttatgaaattatagaaacttgtgagaaagtatatataggttcggatttccccgatgaatttactaattcagatgacagaattaaaacgaaaggtgccaatttaagggctaaagcaaatgcatctgttgcaattggagagttgattcagattgcaacaaataagaaaacctatcctgactataagaaaaaacacggtgcaaaggcacaatttggctggtacagatatgataccagatttggactgcctgtttacgacgaggtcggagagcttatcaggtataatattttttctgcaaggatgctagtaagatgtgataaaaacaagaagttatatttatatgatttaataagaataaagaaagagacgtgcagcccgcctaggtaaaaaccgtacggtagtaaacatcgtctctttcaactgatataatacagtattgcagtcgcaaagtcaataataatttgaaaatattaaactctgtctcatctgctcacggacctgtaagtatgaataaaaaagaaaaatcaaggggaaagtaataaaaaaacgggagggagcttgaaattatgaggttcaggacagatcttgccattgagaacaggcagatgtatgaggaaacccacggtaaaagcgacattgagggcgttacaataacaaaacgaagctacggagaggatatactggcaacagaaataaccatcgaaagtgaaatcggagcaaggcacctcgaaaagcctgccggcagatatataaccatcgagcttgacagactgcttgagggcagaaacgagataaaacgcagagcctcgcaggcgcttgcctcagagcttgaaaaaatgatcccgttttcatacgagctaaaggtactggttgcgggacttggcaatatacaggtgacccctgacgctcttgggccgagaacactgcaaaaggtggatataacaaggcacctcttcatagcctatgaggcggagggcgatgaggaaatggcgtgcgtcagcggcatagctccaggagttacaggcacgacaggccttgaaacagccgaaataattaaaaaaacggcagagatagcaaagcccgatgtgattgttgctgtagactcccttgccgcaagggacattaagcgggtaagcaccaccatacagataaacgatacagtaatatatcccggaggcggtatgggcaacaccagaacagagctttcaagagagactgtgggagcaaaggtggtatccataggagtgcccaccgttatagactcaaaaaccctgatacttgaggcaatgggagatgagcaggcggaggaatatttccggaatcgggatatggatatgatagtgacatccactgacatagaccagattataaaggatttttcagatataattgcaaacggaattaatattgcgcttcaccccggcatatattcttatgagaatatattggaggaaaagcaatgaaaaaacgacaggcggcagtgctggcggtaatcgtgtttgtaattaccgcggtacttcttgtaaatgtatcttgggagaaaaaagacagagaagcaaggcttacggaaagtcagctcggaataatgtgtatgagcagcgtgttttcgactatggaagcaacaggcgacaaagatgccgctatagagaaaacctctgtgacatcagacaagaccggcaaaaaaagcgatggagagggcagcaaaaagaaaagcaaaaaagacaggaaaaagatgctcaaaaacggagatcctctcgtaattatatatcacactcacgccagcgaaagctaccagccgtcatcagagggcaactttcacagggagggtgagaaggacacggtcagagaagtgggagatataatggaggacgttatggaggacgcgggcatcaatgtaatccacgacaagacaatgcacgacagaccttcctacaacgagtcctacgccagatcccttgaaacaatccagaggcttatgaaaaaataccctacggccaaatacgtgatagacctgcacagagatgcggcggcctatgcgggaaacaaaggcgccacagtcaaaataggtaaggatacggttgcaacctacagccttgtggtaggctctgcctgcgacaactatcctaagctcctgtcctatgccaaaaccgtaaacagcagggcggaggcaatgtatccgggatttggagggcgtataatcgaaaaggaatacaaattcaatcagtgggtatgcaacaaccatatactgcttgaaataggcaataatcagaacgacatatcagaggtcaaaaacaccgcgcgctacataggaaaagttcttgcagaggtgatatatgaaaaggagaaaaattaagccgagatacagaaggattaaaagcctgcttgtgattgcggttctgacactggctatgatgggagtgctcacagttgaccagcagtgccacagaattacgggcgagggcggtatgctggggttttcgggagagaaagccgaaagcggcgatataaaagcttacttctttggtgttgatatttccggtgtttttaggtaaaatatattagttaagtaattacacaaaggagaaaccatgaattcttatcagaagtatatcagaaatttcagcattatagctcatatagaccacggcaaatcaacacttgccgacagattaatagaaaaaacgggtcttgtggcggagcgtgatatgaaggaacagtaccttgacaatatggacctcgaaagagaaagaggaattaccatcaagcttcagacctcaagacttgtatataaggcgaatgacggcaacgaatatattttcaaccttattgacacaccgggccacgttgactttacatacgaggtatcaagaagccttgcggcctgcgagggagcggtgcttgtagtcgatgccactcagggagttgaggctcagacacttgcaaacgtgtatcttgctcttgacgaaaacctcgagataattcctgtcctgaacaaaatggatcttgcaagcgcaagacctgatgaggtcaaggacgagattgaagaggtaatcggaatagaggctcaggatgcccctcttatatcggccaaggcgggacttggaatcgaagaggtgctggaggctgttgtggcgcgcatacctgcgccgtcaggcgatataaacagcagactcaaagcccttatattcgactcatattacgacaattacaaaggcgttatcatatacaccagaatatttgacggcagggtcaaaaaaggcgatatgataagaatgatgaatacaaaaacagttcacgaggttacagaggtcggcacctattcgcctacacctgttgcctgcagagaactgagagccggagaggtaggatatatctgcgccagcatcaagcaggtttcagatgccagagtcggcgataccataaccttagacagcgaacctgcggacgagcctcttccgggctacaaaaaagttcagtcaatggtatactgcggcatatatcctgcggagggtgaaaaatacgaaaacgtcaaggacgcccttgagaagcttcaggtaaatgacgcggctttcaacttcgaacctgaaacctcatctgcgctgggctacggcttcagatgcggcttcctcggacttctgcatatggaaatcatagtcgaaagactcgaaagagaattcaatctggcggtaataaccacatcgccgagcgtaatatataaagttgtgctcaaaaacggcacagaggagtttatacagaaccctacaaacctgcctgacccgcttgaaatagagcatatcgaagagcctatagtcaaagcggatataatgatacctaacgaatatgtaggcaatataatggaaatctgtcaggacaggagaggcagacttctgcatatggaatacatcactccgacaagagtgctgctgcattacgaaatgccgcttaacgaagtaatatatgacttctttgacgctctcaaatccaagaccagaggctacggctcactggactacgagtttgtcagatacgagaaatccaacgtagtcaagcttgacgtgcttttaaacaaggagcttgtggacgctttctcaatgatagtacatgagtcaaaggcgagagccagaggcaaattcgtatgcgaaaagctaaaggaaataataccgagacatcagtttgaagtgcctattcaggctgcaatcggcaaagatgtaatagcaagagaaaccgtcaaggcataccgtaaggacgtaatagccaagtgctacggcggggatatatcaagaaagaaaaagctgctcgaaaagcagaaagagggaaagaaacgaatgagacagttcggtactgttgaagtccctcaggaagcatttacggcagtgcttaaatatgatgacaacaaataacgacaagacagagctggggatatatatacatatccctttctgcgtatgtaaatgcagatactgcggatttctgtcctttgaagatgcagacgaggatattcacagcagatacactaaagctttaacagatgaaatcagactgtacggcagtctttacagagatgaatacattgtcgatacgatatttatagggggcggcactccgtctgtgatgaagcctgaatatacagagcagatactggccgccgtcagagaaagctttgaccttgcgaaaacttgtgaaattacaatcgaaacaaatccgggcacgctgagcagagagaagctgtcagcctacagaaactgcggcatcaacagattaagcatcggcgttcagtcattaaacgacaatgtgcttaagactctaggcagaattcactcggtaagagagtttgaggaaaatttcacgctggcaagagagcttggctttgacaatataaatattgatctgatgtttgcggtgccggatgcgacgatgagtatatggaaagaaaccttagagaaagcattacagctttctcctgagcacatatccttttacagcctgcagattgaagaggacacgccatttgcgaagatgtacgaggagggcatactcgaagaaattccggacgataccgacaggaaaatgtacagagctgcagcagagcttctcagccgaaacggctatgtccactatgaaatctcaaatgccgcaaagccgggatttgtgtcacgtcacaatctcaaatactggaccatgaaagagtatctgggatttgggcttggcgcatcatcatactttaaaggcaggcgttttcagaatacggaaagccttgaggaatacatgagaacatcgggacagagcctgcttgcagacagctgctgctgctttagggccgcaggctgtgcggaggattttcatatcaacacagagtttgacaacgcctctgaatttgtatttacaggacttcggaggctttcgggaataagccttaaggaatttaaacgatttacaggcaggagcctgtttgaggtgtttccggaggcggagagcaatatagacagatggcaggccgcagggcttgtcagatatgacggacaggctttaaagctgacttatgacggaatagatatatcaaacgacatattatcggaatttgtataaggagcggaaaatgaaaaaatacataatggcacttgatgagggcactaccagctgccgctgcattctatataacaaaaaaggcgaaatggtaagcgtggcccagaaagaattcagacagatttatcccaatgcaggctgggttgagcacgatgcgatggagatatggtcaacccagataggcgtggcgcaggaggcgctctacaagataaactgcacatatgaaaacatagaggcaataggcattacaaaccagagggaaactacggttgtctgggacagagaaacaggagagcctgtatataatgcgattgtgtggcagtgcagaagaacggcggaatactgcgacagcctcaaggcaaagggactggagccatctttcagagaaaaaacagggcttcccattgatgcatatttttcggccagcaagctgagatggatactggacaatgtagagggcgcaagagcaaaggcagaggcgggaaagctgctgtttggaacaatagaaacgtggctcatatggaagcttacaggaggcagagtgcacgttaccgactattccaacgcctcaagaaccatgatgttcaacataaatgagcttaaatgggacaaggatatattagcagagcttgatatacctgtatctatgttgccggagcctgtgccgtcgagcttcatatacggtgaaacagaggagcatattttcggcggacctgttagaatttcaggagctgctggagatcagcagtctgcgcttttcggacaaggctgctttgaaaagggacaggctaagaatacatacggcacagggtgtttcctgcttatgaatacaggagagagccctgtgtattccaaaaacggacttgttaccacaattgcctggggaatagacggcaaagtcaattatgcgctggagggctccgtatttgtggcgggagccgcaatacagtggcttcgtgacgagcttgagcttatagacagttcaccggaatcagaacgccttgcactaagcgttcccgatacaaacggcgtatatatagttcccgcatttgcgggacttggagcgccttactggaacccttatgcgagaggcgcaatattcggacttacgaggggcgccgacaagtgccatctgacaagagcaaccttagagtcactggcatatcagacaaatgacctgctggaggccatgaaagaggatataggctatgagcttttatctttacaggtggacggcggcgcgtgcgccaacaactttcttatgcagtttcaggcagatataacggcaaaacctgtcaaaagacctgaatgtatagaaacaacctcgctgggagcggcctatcttgcaggacttgccacaggcttctggagcgatatggacgatataacagaaaacctcaaaacagacagagagtttacagcgtcaatgaatgaagaaaagagaaccaagcttcttgcaggctggaaaaaggccgtaagatgcgttctggaatggagcagataatatgggagagataaaacagagagattatatgtttgacaccttcagaggtattctgatgctgtcaataccaatgtcgcactttaccaaaatgtcaggcaatctgtattcggagctttatctcgtaggcggatttccgcaggcaaccttcggcggctttatatacataacaatcaacgtatttgtaatgcaggcatttatgttcctttcgggatatttttcaaaaaagcccgagagagcaagagaaacggcattcaaaacctttatgtggccgtatctggtatttacagtaatttatttcggagtgagatatttcttcttcggaaatgctcaccttgattttctgtcaccgccgtttgcgctgtggttcctgtttgccctgttcttctacagatttttcttaaaggatatggttaagctcaaatggctgctgcctctcagtcttgtgatgtttctggtggcgggacaggtatcggagttcggtgattatctggcgcttggcagagtattttcatactttccgtttttcctgctgggcttttactgctcaaaggaaagactggcgtggataagacagctcaaaaaaaagccggcaatccttgtcataatgggaattgtgcttgcgggaatatcggtgctgctttgcatgtatggaccgaatgtgggctggtatctgctcagagagtctgttgacaacttccctcgtatggcgtggtatgaggatacgctgcttagaatagcgctgtttttcatatcaagcggctggataatatttatggttaacatactgccgtcaaagcagggaattttagcatatgtgggaacaaacacaatgcctgtgtatgtatttcatctgactctcagatatgtgatacagttttacggtctttacatcggatttatatcgtgccttgctgtatgctggttcggaatgctttcgcttatacataaaaaagtacagaatacagcagtatatatagcagcgatagttgtatcaattgcagggctgtattttctgttttcgtcaggctgcctgtcctcgctttacggactgtgtcctgaaaacagactgttctattatctgcttgtatacggcggagcccttatagcgggcttctcgtttgtaactccgttctggataaagctttacgatattcttgtggacggaccggcaaagcttccggcgattacaaagtggctcaagggacccggatttaaagaagatgaagaaaaacagatatagatttttaatatgtattgcagcatttttatgctgcatactgacggctgcctgtaccggaggcggagatactgtatatgattatgacacctgtgattttatgctcaaaaacagcaggggcacatatacggcagggcagataacagtgcccgaaacagacggaagctgccccctcgtatttatagctcacggatttaaggggactatgaacagcggcggcgcaggggagctttcacagaggctttcacggtgcgggattgcggccgttagaattgactttaacagcaggcttgcacctgatgtggactctgccagaacggatgaatatactctttccgatatgacagacgatgcggtgcttgccatctcgtactgcattgataaatacaatatagatgcaggcagaataggcctgtacggcagaagtatgggcggcagggccgtaatgataatggcaaacgaaagcaaaggctatgagtataaggcgctggcccttgttgcgcctgcgggaaacgacagcgcaatgatatactatatgggcggcagagacaaatggaatgagatgaaggacaaggctgcaaagacgggatataccgtcaagcagggccttaagcttacaccgcagtggttcagagaatttgaagagtacaatccggcagagacaggatataagttcggagataagccggtgctggtgttttacaatactctcgacaatgtggtgctgccaaagacaagccttgaatgtgctgacgcatatgagaactgtgagactgtaaaggtcaccacagaggacggtcacggctatgagatgagctacagggagtcacagcttaaggatatgatgatggacagaattgcagagcattttaaaggagcattatgtacgaattaaacagactgggagataaaagctggtatataaactgctatgccaaagtgggaatatatcagcagacagaaacagatgtatatataatagacagcggcaatgatgacgaagacgcaatagaaatagaaaaaatacttaaacagaaaggctggaagctcaagggcatactcaacactcacgcccatgtagaccatatgggcggcaacagctatattcagagcgtgtacggctgccctgcgttttcaaagggagcggaggctgcgatagcatcgcatacacagatagagcctgttataacctatggggcgcaccctttcagagatgccagaagcagaagctttttcgcagagtcgagcctatgctatgatgtgacccacagtgagtttccaaaggaagtggaggtaatagatctgcccggccacagtatagagcatgtgggctacaggcttcccgacaataccgtatttataggggacagcgccgcaggcgacagcctgattgccaaataccctatactttatgtgctcaatgtggggcagtatcttgagagccttgagaagctcaaagcgcttaaaccggggctgtttgtgctttctcacggacaggtgacatctgacataggaccggtggcgcaaaataacatagacaacatcagaaatatacgcgacagaattgaaaatatatgcagcgagccgaagaatatgggcgaaattctcaaggctgtattcgacagatacggtatgaatatgaactacaggcagtacgtgcttacccttgcgattataagggcgttcgtttcatatcttgtagacagcggaagaattgagggcgttgtggagaataatgtaatgctatggagaaagacactatgagagaactgatacaggcaggacagcagacttattatataaagggatttacaaatgcgggaatatacagacagggtgaaaacgaagtttatgttatagatccgggaaccgatgaaaacgagggcagggaggttgaagaggtactgcaaagcaaagggtggaagctcaagggtatcctgtgcacccactgtcattcggaccatacgggagcaaatgcgtatctacaggacaaatacggatgccctgtatttgcatacggcatggaggctgtatttataaacaactcaatacttgacccgatggttgcatacggcggacatcccatagatgaaattctgggaagcgacatatatgcggaaagttgcgtatgctttgacacagatcatgcagagtttccaaaagagatagaggttgtaatgctgccgggacacagcatggagcatgtaggctacagacttcccgacggtacattttttgtaggtgacaccctcatagaaagccggattataaggaaatatccgctcagctatatatacaatcccgaggaagtacttaaaacgctggataatatgaagtctatggaggcttcagtatttgttccatcgcacgcggagccggtatctgatatatcggagctgatagaggccaatacagagaatatatatgagatttccggtatggttttagacatgtgcgaaacccccgcagatatggaggaaataaccaacgggatttttaaccgctgcggtgtcaggatgaactgcgaaaaatatatactcataatgggaatagtgcgaacctatataggctggctgaaaaaaagcggcagacttgaatattttgtgcaggataacagactgttatggagaactgtaaaatgatactggttataacatttttactgggactgttttttgcagcgggagccgcggctgcaaggctgtctgacaatacacgaaaaatagaggaaatttcaatatcggtggctgcgggagccatgagcgcacttgcggcggctgatattattcctgaaatacttcacgaaatgagcggcacaggtctgataaaggctgtattgtttacggcggcaggcattgtatttctgaagcttctggacagatttgtgccggagcatcacggagatgaagaaagtccgggcgctatgatacacataggcattatatcggcccttgccataatgcttcacaatataattgagggaatggccgtatatgagcttggcgcagactccctcagacagggcgttatatttgccataggtgttggacttcacaatatacctatggggatgctggtgtactcaaccctcaaagacgaaacaagagttaagaagtatatggtgctttttgcggttatgatatcaacctttgcaggcggacttgttatggcggcgctgggaagctgtatgagtcatacccttatagacctgcttacctgtctgactcttggaatgataatctatataatttcatcagagcttgtaccgtatatggcagctcacagaaactacagggtatatgcggcaggcattgcggcgggagcggcgattgttgcggtatcgcttctgtttgaatgataaaaatgataattcgcacacacagagatgacttatgcgtgtgcgaatttattaaagaaaaaacgtatgggctaaggcggcagcggggattttgttcctgctgccgctgtatgtttgaacagacataaaaattttacaaaaaatattgcaaaatctattgacatagctgctcacaggtggtacattatacttgtaattagcactcgaaccaagtgagtgctaacaggaggaaaaagatggaactaagtgaaagacaattgaaaatactgcaggcaatcattgcagactttgtaaatactgcggagccggtaggttcaagaagcctttccaagaaccacgatcttggagtaagcccggcgacgatcagaaacgaaatgtctgaccttgaagagatgggatatcttactcaccctcatacttcatcgggacgtgtgccgtcagagaaggcatatagactgtatgtaaatgagcttatgaacaagcaggagcttaccgagagcaccaagaatgtaatagcagggcagctcagacagaatatgtacgaatttgacaagacgatcaaacgcgcggcgcgtatactgtcggagataacaaatcttacatcgtttgtactgacacctaaacaggacgaagatgtactcaaatatataaacctgcttcccgtagacgacaagacggtagtgcttatgatagtttcagagagcggcaaggtttcaaatacagcgcttaacatcaaggcgccgtatacagaagagggactgcagcttcttgccaaaaccatgacatacaatttcagaggcaagacaataagcgaggcgcttacatcggacatcatatcgagcttcaacaatgactttgatgcaatgagtgcgctggcagcaaatataatgcctgactttatgaagaccctcgaagatatgttaaatgtaaatctttatatggacggtcttacaaatatattctcgcttcctgaatataatgacatagacaaggcaaagacattccttgaaatgctcaacaaaaaagaagacttcaccaaaacccttataaacagggacaatggtgtaataataacaataggtaatgagaatgatgaggagataatgcctgactgcagccttataaccgccacatatcatgtggacggcaagctggccggcaagataggagttatcggtcctacacgaatgaaatacagcgaggtaacgtcagtcattgagtatctgacggataatataagcaatgcattcaaaataaaagaaacagagggagaggatactgatgagtgacgaaaaagatttaaaagaagaaattcttgaagaagaaacagaggaaaccaaagaaccggcagcggaggaggaaacaaaaccgcagcaggaggagactgccgaaaaagacgaggccctggaaaccagatatctcagactgatggctgattttcagaactacaaacgaagaagcgaaaaagaaaaagcagatgtttatgcatacgccaatgaaaaaatcgtcatgcagctgcttgatgtaatagataattttgagagagctttagactgtgccgatactgcggagaaaggctttgcagagggtatggagatgattttcaaacagctcaaggacgttttgaagaactccaatgttgaggaaatcgaagctctgggacttgactttgaccctaacttccacaatgccgttatgatggaggataccgatgaatacgaaagcggcaaggtaagcgccgttcttcagaaaggttacactcttaacggcagagtaatcagggcatcaatggttaaggttgccaattaataactgtgttaaaaatgtaaattgtaaatagaaaaggagaaaagaaatgagtaaagtaataggtatagacttaggtacaactaattcctgcgtagcggtattagaaggcggcgagcctacagttattgctaacgcagagggttcaagaaccactccgtcagtagtgggatttgcaaaaaacggtgaaagacttgtcggcgaaactgccaaaagacaggcaataacaaaccctgacagaactatttcatctatcaaaagacatatgggtgagaactacaaggtaactatagataacaaggattacacaccgcaggatatttcagcaatgattttaggcaaactgaaagcagacgctgaaagctaccttggagagaaagttacagaagctgttatcactgttcctgcatacttctcagatgcacagaagcaggcaacaaaggatgcaggtaagattgcaggtcttgatgtaaagagaattatcaatgagcctacagcagcatcacttgcatacggtcttgaaaaggacgaagcttcacacaaaattctggtatacgacttaggcggcggtacattcgacgtatcaatccttgaactgggtgacggagtatttgaagttcttgcaaccaatggtgatacaagacttggcggagacgactttgatgaagcgcttcttacattcatggcagattcatttgccaaagaaaacggcgttgatttaagagcagacaaaatggcgctccagagattaaaggaagctgccgaaaaagctaagaaagaactgtcatcagcacagacaacaaatgtaaatcttccgttcattacagtgaacgaaaacggtccgcttcatatgaatatggacattacaagagctaaattcgaacagcttacagcaggactggttgaaagaacagtagagccgatgaaaaaggcaatggcagatgcaggtgttacaaacgcagatatcgcaaaggttatcttagtcggcggttcaacaagaattccggcagttcaggaagttgttaagaaagttacaggcaaagagccgttcaagggcatcaaccctgatgaatgtgttgcattaggcgcagcaattcaggcaggcgtactgacaggtgaagtaaacgatgtacttcttcttgatgtaacaccgttatcactttcaatcgaaactttaggcggagttgcaacaaagcttatcgaaagaaatacaacaattcctacaaagaagagccagatattctcaactgcggcagacaaccagacagcagtagacattcacgtaatgcagggtgaaagagaaatggcagcaggcaatatcacactcggaagattccagcttacaggtattccgcctgcaccacgtggagttcctcagattgaggttacattcgatatcgatgcgaacggtatcgtaaacgtaagcgcaaaagatatgggaaccggcaaatcacagcagattacaatcacttcatcaaccaagctttcagatgatgaaatcaaggctaaggtaaaagaagcagagcagtatgctgaagaagacaagaagagaaaagaagaggttgaagtaaagaaccaggctgaaactcttatctacgaaacagaaaagaatatgaaagagcttgagggttcactttcagaacaggaaaagaacgatatcacagcagccaaagacgaattacagtcagcgcttaatgcaggcaacattgatgatatcaaggctaagactgaggctcttactcagcagttccatacaatttcagctaagatgtaccagcaggcccaggcacagcagcaggcagcaggcggagcaggtcctgatatgggagcggcagacgcaggcgcagcacctggcggagacaacgttgttgatgcagactatgaagttgtagatgacgacaaataatcagcagtaaatatgagatattaaggaatgcccgttagaattctgacgggcatatcccgtaaaagagagggtaaggcttatggcagaaaaacgtgattattatgaggtattgggattacagaaaggcgcctcagatgacgagataaaaaaagctttcagaaaaatggctatgaaatatcatccggacagaaaccccggtgataaggaggccgaagaaaaattcaaagaagtaaatgaagcatatgctgtactgtcagacccggacaagaaaaacaagtatgacagattcggtcacgcgggcgtcgatcctaatgcgggctttggcggagcaggcggtttcggaggttttggcggagcaggcggctttgatgacatctttgatattttcggtaatatgttcggcggaggcgggggatattcccagtcaagaagaaacggaccgcgcaagggcagcgacctgcagcagtccattacaattacatttgaagaagcggcattcggcaccaagaagcagatacacctcaataaatatgttgagtgtgaaacctgcaagggtacaggtgcggctccgggcacaagcaaaaaaacatgtgacaagtgcggcggcacaggtcagattaagacatcacaaaagacacctttcggtactttccagagtgcatcgccttgtgataaatgcggtggcacaggtcagattaacgagtcaccttgcaaagactgtggcggcacaggcagagtaagaaaaagcgttacaatatctgttgatattcctgcgggtgttgacaatgactctgttgtatcaatcagaggccagggagagccgggtataaacggtggtcctgccggagatttatatatagttgtaagggttaaacctcacaagatgttcaggcgcaagggcaatgacttatggcttgatatgcctatttcattcgatcaggcagctctcggagcagaaattacggtacctacgctggacggtaaggtttcatataaagtgcctgccggaacacagcctgacactgtattcagactgaaaggcaagggagtaccgtcagtaaaaacaggtcgcaaaggcgacctttatgtaaaggttattctcgaaataccgacaaagctcaacggcaagcagaagaaagctattgaagctatggcaaaagaggtaaaagaggactgctatcagaaaaaaagcggctttgcacaggcaatcaaagacctgttcaaatagagattaaaaaggggtaagaagaatagatatgtatgcgtctgtcgtgatatgcggcaggcgcttttttgaaataaaataaaactctgaaaattcaaaaattattattgcatatgcactttgtttctgttaaaatcatagagaaagttttccccaatataacttgaggaggttatttatgaagaaatatttgaaattattagctgtagttttaacactggcgcttgctttctctgtgacagcctgcggcgacaaagaggaggctgttgccgatgaatgctgggcagacaagtatgtggcattaattgagtcgggagaggcaagagactttgctgattatgatgcgctcaaggcagagcttgacaaaatcagagaagaatgcggagcaaactatgtgtatgcgctttcccctgaaaaggacggagaacctgcgcttgaatgtgacacatcagataaagttgattttctgattactgttgatggttctgccgatcctgatgactgggcagtaaactacggctgggagatacagtttacagaggcttgggacggagctcctgcggcggcaagatctgcgtgggacgatgaagacggccagtgctggtcagcatttgcacctgtatacggcgaagacggaaaagtaatatgcatactcggcatagactatccttgcggagatactattgctgattatcctgagtggaacagagatgatgcatcatggaacggatttgaagaagaaatcacaggtgatgtacctgaagcagtacaggctgtaatagacagcaccactgagctcgctgacaaatatgcaaaacagctcagtcacaaataaacagtatgagttaaaaggctgcacacaagcggccttttagtgtgcaccttaaaaactgaattaaggaaatcttatatgagcgttgatatttgaaagcagtctgtgtattatatctgtatgaacagattaaatttcagagaaaaaacaggatacagctttgcggcgctgggcgattcggccgcatatatgtttatagggacatttctgatgttctttttaactacagtagcaggccttgcgccggctgtggcagggactattacagccattggtgctgtatggaattcactttttaaccccgtaatgggatatatttcagaccacgctatgactagatggggcagaagaagaccgtttatgtttgcatttgcgtttccactgatgatagcggtatcgctgcttttcacaacctttgatataccgtacggcttcaaaatactgtattacagtttaggcgtaatcatattctggacatcatacacaaatctttattaaaacgcttggatccgatcacttttttg

SEQ ID NO: 3138 - DNA, 4772 bp, Unknown
  16S sequences of unknown bacteria
cgaacctgtgaccctctgcttgtaaggcagatgctctcccagctgagctatgcttccatctagctggtgtgctacctgtttggcaactgaaaaatattataaaagatattgactaaaaagtcaacccttttcttatagttaaaataatgtttttgtaaatttgcaaatttataaaaatttttttgaaaaaaagttcacaaacctcctatttttatggtatgatttgtacataaatttaagaattactattactgttccaatatatgtttttattctaaggagagataaaattttatggaaaaaattaagattggtattttaggatatggaaatttaggcagaggtgttgaattgtctgtcagccagaatccggatatggaattggtaggtgtttttactcgcagagatccttctcagcttacattaaatacaaagggtgctgttgcgtatcacattgaccaagcgtctgagatgagagataaaatagatgtattaattctatgcggcggcagtgcaacagatttacctgtacaaactcctgagtttaccagatactttaatacgattgacagttttgatacccatgcaaatattccgggacattacgcaacggtagatgctattgcaaaggcttctaataaagtttctattatttcagttggttgggacccgggtatgttctctttaaatagaatgtatgcaggcgctattttgcctgacggaaaagactatactttttggggtaaaggtgtaagccaaggtcactcggatgcaattcgtaggattgaaggtgtacaagatgccaaacaatacaccattccagtgccgcaggctttagatgcggtcagaagcggtaaacagccggagctgactaccagagaaaagcataccagggaatgttttgttgttgccaaagaaggtgctgatttaaagaaaatagaagaaacaatcaaaactatgccaaaatattttgcagattatgatacaacagtacactttatttcccaagaggaattgaatgaaaagcacagtggtattccgcatggtggatttgtaattcgtaccggagtaaccggtaaggatttagaacatcatcatgtgattgaatattctattaaattagattctaatcctgaatttaccgcaagcgtattggtggcatacgcacgtgctgcgtaccgtttatcaaaagagggaaactacggtgcaaaaactgtattggatattccgcctgcttatttatctataaaatcaggtgcagagttgagagcagaattactgtaaggcgttttaatgaagcaaacaacagtttgtaatgaaatatttcaaaaaagtctaccttttggcaaaaaaggtagactttttttaacacctatatagttacaaaaaacagtaatttttttatgtaactacgtaattcttgggagtattattatgttatcatgttatctataaaaagtctacttatgttcacggcagaactcatttgatttatttgataaatttagattgctgcaggttagatgtaagaagaaaaatacccttttccacattttgttttgggatgatatgctatacagaggcttgatttgctagaagtctattttttctaaatgatatcagttttttcacatatctctcacatggtatctttaacataatatattaatagaaaatactctaagggaataggaaatataaattatgcagttacatattaaaataatatatggtgttttagcagttttattggtttgtacgataattttcctatgttattttatacctcagaatctatctgcagaagttgctgcgtgtaaaccggtattggagactgcaaataatacaagtgaaacttccaagaatgatatttttttagaagaaaatatggaagaacaagagagcgttattgcagaatcgcaacatcagattaactcatttgatattatatttcaaatgcctgagttaccgaccggttgtgaaattactgcattgactatggtactgaattattatggtatggaagcagataaagttgagatggccacaaaatatcttcctacccaggagttgaatttgtattacggaagcgacgggcgattgtatggaaatgatttgaatcaatattttataggaaatccaaccactgaaaatggttatgtatgcggtacaggagcaattgtaactgccgcaaatgcatatttgcaagatcaaggaagcgacttgacagcggtggattatacaggagcagatgtggatacgctatatgagattgtcagtcaagatattccggtagtagtatgggtcacaatttctatgacagatagaggagaaacggaaggctggtatacacgttcaggagaatatgtggactggagtacatatgatcacggagctgttttaattggatatacacaagataccgttacaattgctgacccaatttcaggaaagatggaatacagcagagaagactttgaacgtgtatttgcttccagaggaaatcaatgtgtctttttacaatcctaaaaaatgttgattgtcaatgttcatattccatgatggaaaaaagcctgcatgcagaaaacatgcaggcttttttcaaagattttatgacatctataaaagtaagcagggtagttatttagacatactttgtgcgtatttgcaaaacgatttcatacagcaaatatcacattttggttttcgagcgtcacaaacagctcttccgtgtaacacaatacgatggcaaaagtcactggattcttcgggcggcagcagtttacgcaagtcctcctccacttttacaggtactttattattcgtcagaccaagcttaccgcaaatacgaataaaatgggtatccgttacaacggccggttttccatatacatctcccaaaattaagttagctgtttttcttccaacacccggaagggaaagaaggtcttccatattatcaggaacaataccattaaattcttcttttagttttttacacattgcaaaaatatcgcgtgcctttgttttaaacaaaccgcaggtacgaatatattctgcaatttcttcttcagagctgttaataaaatcgtctattgttggaaaacgttcaaacaatgcaggcgttaccatatttactctggcatccgtacattgtgcggataatctggttgcaattaacagctgaagtgggttagaatgaattaacgcacattctgcgtcaggatattctttttttaatgcctcgattgcggcaagtgctttttgtttttttgtcatatacattcatcctcatagctataaaaatagaaataagtattatttttctattttatcttatctttcgacaaactacaagagatttcttatattttagtagaatttggtgatattttgagtggatttcaattaaaaatgattgctttggttacaatgttaaccgaccatattggtgccatattctatccggatatgattgcgttgcgagtcataggcagaattgcatttcctatttattgttttcttttggtacaagggtttttacatacgagtaatctaaaaaaatatatgattcgtatgggagtgttcgccctattatcagaagttccgtttgatttggcaaggacaggatattggttagatttaggcaggcaaaatgtatttattactttatttttaggtttatgctgtatgaccatataccgtctgtctgagcaaacacagcagcctattcttatggtcagcggtattttggcagtctgtatcctctctcagctgatacgtgcggactaccaatggcttggcattttactgattatgattttttatatttggaaaacatctaaactgatttgctatgctgcttttattacagttacatctgtttattgtttaacagtcatgtcatggctgcaagcagcttctatttgtgcattgatacctatttattggtataacggcaaaagaggaaaatactcgtttcgatatgtattttattttttctatcccgttcatttgtttatattatattttgtttctttttattgcaaataacagtgtcaaatgataggtcgttgcaaacaaaaaagtgtcatgatacacttatcacataaaggaggggcatgcatggagtttcaattatattatacagagcaaggacaagggactccctttgtactgttacacggaaacggagaaagttcggattatttttctcatcaaatagaacatttctccaagacatatcgtgtgattgctgttgatacaagggggcatggaaaatctccaaggggagacgctccttttacattggcacagtttgtggaagatttaaaacagttgctggactacctggaattgaaaaagattattttgctaggttttagtgacggcggtaacattgcgatgatgtttacattgaaatatccccaatatgtaaaaaaactcattttgaacggtgcgaatttaactgccaagggagtgaaatcttccgtacaaattccgattatatttgggtattggattacttccttgttttcccttttcagtaaaaatgctaaggcatctcaggaaatgctgcgtcttatggtcaaagaaccaaatgtttctcccgatgagttggaacaaattgctgttccgaccttagtaattgcgggtaaacaggatatgataaaagaacatcatacaaagctcattgccaaatccataccaaagagtgaattgatattgatagaaggagaccattttatcgcaaataaagaatcggctgtatt

SEQ ID NO: 3139 - DNA, 19058 bp, Unknown
  16S sequences of unknown bacteria
tgatgatgagtacgtatatcaatcgcccggatttagtggtaattttaaattactttctgggattcttgatattcgcctgcgccgcggacagtcttgcgatgggaacgcggtaaggagagcaggaaacgtagtcgaggccgatcttatggcagaactcgatggaagaaggatcgccgccgtgctcgccgcagatgccgcagtgcatggtcggacgggtcttcttgccgagagtaaccgccatatccatcagtttgccgacgcctgcctggtccaatctcgcaaacggatcggattcgtaaatcttgttctcgtagtacgaaggcaggaatttgcccgcgtcgtcacgcgagaaaccgaaggtcatctgcgtcagatcgttggtgccgaagcagaagaactccgcctctttggcgatctcgtcggcggtgagcgccgctctcgggatctcgatcatggtgccgacttcgtatttgaggccgctcttgctcttttcgatgagttcgtccgccgtggcaacgacgacctttttcacgaacgccaattccttgacttcgcccgtcaagggaatcatgatctcgggaacgatgttccagtcgggatgctttttcttgacgttaatggctgctttgatgatcgcggaagtctgcattttcgcgatttcgggataagtgaccgtcagacggcagccgcggtgtcccatcatcgggttgaactcgtgcaagtcggcgatgatctgtttgatctgcgcgaccgtcttgttctgcgccttcgcgagcgcagcgatgtcctcttcggtggtgggtacgaactcgtgcagaggaggatcgaggaaacggatggtcacgggatagccgcccagcgcctcgtacagtttttcaaagtcgctctgctgcataggctcgatcttcgcgagcgccgcttctctctcttcgacggtgtcggagcagatcatctcgcggaacgccgcgatcctgtcgggctcgaagaacatatgctcggtgcggcaaaggccgatgccctgcgcaccgaaagaggcagcctgtttcgcgtccgcgggggtatccgcgttggtgcgtacagccaaagccttgtatttatcggaaagttccatgatccttccgaagtagccgctgctcgtatccgcggcaacggtgggaatgccctcgccgtaaatgttaccggtcgagccgtcgagggaaatgacgtcgccctctttataaactttgccgttcagggtgaactgcttgttctcttcgtccatcttgatcgcgccgcagccggaaacgcagcaggttcccataccgcgcgccacgacggccgcgtgagaggtcataccgccgcgcacggtcagaatgccctgcgcatagtgcataccctcgatatcttcgggagaggtctccaaacggacgagaatgactttcttgccctttttgccttccgcaaccgcgtcctcggcggtgaagacgatctcgcccgtcgccgcgcccggggaagcgggcagagcgttgccgatgggttttgcctttttaagagccgccgcgtcgaactgcgggtggaggagcgcgtcgagcgttttcgggtcgatctgcatgatcgcgtctttctcgctgatcataccttcatcgatgaggtcgcaggcgatcttgatcgccgcggcagccgtacgtttgccgttacgggtctggagcatatagaggtgcttgtcctcgatggtgaactccatatcctgcatatcgcggtaatggttttccagcgtgttgcagatcttctggaactgctcgtacacttcgggcatgatctctttcatcttgtcgatgggcatcggggtgcggacgcccgcgacgacgtcttcgccctgcgcgttcatcaggaactcgcccatcagtttcttttcgcccgtggcggggttacgcgtgaacgcgacgcccgtaccggaagtatcgcccatgttgccgaacgccatcatctgcacgttgacggcggtgccccaactgtaagggatatcgttctgcattctgtaatagttcgcgcgggggttgtcccaggaacggaagaccgccttgaccgcgccgaacaactgttccttgggatcgtcggggaactcctcgccgatcttggatttgtattcggctttgaactggtttgcgagcgtcttcaaatcgtccgcggtcagttcgacgtcctgcgtgacgcccttttcttccttcatcttgtcgatgagttgttcgaaatattttttgccgacttccataacgacgtcggaatacatctggataaatcttctgtagcagtcccaggcccaacggggattacccgacttatcggcgatgacgttgacgaccttctcgttcagaccgaggttcagaatggtgtccatcatgccgggcatggaagcgcgagcgccggaacggacggatacgagaagcgggttttcgttatcgccgaactttttgccgcagatattttccattttggagatatactccataatttccgcctgaatatcgggattgatctgtctgccgtcctcatagtactgcgtgcaggcttcggtagaaatggtaaagccctggggtacgggaagtcccattcccgtcatctccgcgaggtttgcgcctttgccgccgagcagttcacgcattttcgcgttaccttcggaaaagaggtaacaatatttttttgccataaaaacttttcctcctaaatttggatatatagttacgaattaacatatctattttaatataaaacgcagataatttcaagcaattccgtcccgaaaatcaaaactttacacaatttttacgattccgagccgagcaggcggatatattcgtcgagcgagcggagttcggtatccgtcttgtcgcggaaatagacttttaaaagtttgagcgcgcggctttcggcggccttgtcgatcttttcgggaagataggataaatccgaacatttccgcaaaaagttataagtattttcgcccgtgcccgcgcccttggcgcattccgcgcagtaaaagcagccgcccgcgacgtcgaaatacacccgcccttccagaatgccgccgcagtctgcgcaggcctccaacgagagcatataccccgagaggcgcagcgcgccgatgagaaagcggacgagttcttcggcggcgtcccctccgcacatatttttgagggcgttcacggcgtagagaaagagttcctcgttgacgatgccctcgaagagcagcgcgtcgcacacctcgcacaccgcgcaggcggcgtagaatttttcgatatcctcgcggagggcgtaaaatccgtcggtattggcggcggaaatgacggtgcggcgctcgccctttttcgcgagcacgtattcggcgaaacaaaaaggctgcgcggcgaatttcagccgcgcgcccgcttttttcacccctttcgccgccgcggtcactttgccgttttgcagcgtgaagagcgtgagtattttgtcgttatccttataatcgatgctccgcagcacgagcgcgtctactttttcttccatagattttcctttcgcagtttattataattgaaacgcgctcgattggcaagtaattttttgtcttagaattctaagactccatgcaaaaatgaaatctttatattataatattaacaaatcaacttaaggagcacaaaatggacaaagaatgtttgaattgcaatcattacagggcatactatgtcaaagcgaatttccgatttgactgaaccaactgcggtttatgcaaattgagcggcgaaacctgcaaaaagcacgacgaatgcgaaaaatgggaaccgatcgattggcgtttacagagaaaggaacgaaatttcgctttaaaaaaatgatacgatttaatgctggaaacgaccgccgtacggcagattttggcagaagaagtggacgagttcaaaatcaaatgaaaagagcgcccgaaatcgggcgctcctttttactttttcagttctttgtacagcatgtaataggaaagatttcccgttttttcaaacatgtcccacgcgagtttcgacgcgtcgttatctctcatgaaattggccatattctcctccctataaacagtatgggaagggaacgcgccgtctattcataaaattacagcgaatctttcaaatcttcgtagccgtactcttttaacaggttcgccttgtcgcgccagtcgtcgcgcactttgatataggcggtcagaaataccttggcttcgagaaactcttccataccctgccgcgcgaacgagagcgtttctttgagagccttgccctgcttgccgatcagaatcgccttgtggttgggcttttcgcagatgatgtccagatcgatatcgtacaggtttttcccctcgcgcttttcgaatttgttgatgaggaccgcgacgccgtgcgggatctctttgtcgtatttcagaagaattttttcgcgcatgatctccgcgatcatgaacttttccgatttatcggacaccacgtcgtcggggaacagtttgtccccttcgggcagtctttccagaatcaacgctttcagtttggcgatgttcttccccttgcgcgcggaaacggggcacacgtcgcagtcgatgcccgcctcgaacaaaagtttcgcgtcggcgggaattttttcttcgggcatgatatccgtcttagtataggcgatcatcatggggatcccgaaatttttatattttttcatgagggaaatatcctcttcggaaatccccttgtgcccgtcgtgcacatacaggacgagatccacgtcctttgcggaagtttccgccgtgcgcatcatcatgtcggagagcgcgtttgccgaacggtagatgcccggggtgtccacgaacacgatctgcgcgccctcttcggtcagaacgcccaaaatgcggtcgcgcgtggtctgcggtttgggggaaacgatggcgatcttttcgcccaccagtacgttgatcagcgtgcttttgcccgcgttggcgcgccctacgaccgccgtatatccgctcttcattctcttgtaactcccaatttctgcaaaattttctcttccttttcccgcatttcccgcttttcgtcctcgttcacgtgatcgtatcccagaagatggcacatgccgtgcacggcgagatagtaatattcgcgctttaacgaatgcccgaactccgttgcctgctccgccgcccgttcgcggcagatgatgattgaacccaaaaacaggttgcccgcctcgtcgcgatcgaaagggaaatcttcccctttgatctccctgtttttgatttcgtctaaattcggaaaactgagaacgtcggtcacggcgtccacgccgcgcgcctccgcgttgagtttttgcatggccgcgccgtcggtgaatacgatctccgcggaaagggcggtatcgctattcgcctcgtccgaaagagcggcggcgagcgcctctttgtctatttcttcgtcctcgcagtcgagtatgaatcgcgccatttatttttcctcctctttgtggggttcggggtgtttgattttcaatttcgggtactgcacgcggctgtggtacacgcccgacaggcagtttacgatggtttccttgatgatgctcagatccttcatcgtaacgtcgcactcgtcgaactgttcgaggtccatgcgctcttcgatgatctcgcgcaccgccgtttccacgttttcgggcgaacggtcggggagcgtgcggctgatcgcctcgctcgcgtccgcgatcatgatgatcgccgcgatcttcgtctgcggcttggggccgggataggaaaagtcctcgatattcagttcgccgtcggtcattttgagtgcgcgcgcatagaaatatttgatgggcatggtgccgtgatgctgcaacgccacgtccgcaaggatctgcggcagatgcttggaacggatgagttcgtacccgtctttggcgtgcgaacggatgatatccaccgaaagttcgggcgaaagttcgctgtgcgggttgaatccaacctgattttccgtaaagtattcgggctggcgcagttttcccacgtcgtgatagtacgccacggcgcgggcgagcgcggtatcttcgttgagcgcgatggcgcacgcttccgcgaggtgcgcgacgacgatgctgtggttgaacgtacccatggcgcggtctttcatctctcgcatgagcggcgcatcgtggtcggtcagttccctgagccgataatcggtgacgcagttgaaacacatttcgtacacgggcaaaaacgccataaagagcaccgaggagagtatgcccgcctctaccccgaacagaaggagatagaccatatcgctcccctttccgtattcgaggcataccgccatgatgagtatgggaatgcagatgacgaaaccgagcaaaaaggagcgtaggcgcgttttgactttgctgcccgcgaagatggcgaccatgcccgccgtaaaggtgatgagcggcgtgcagttgagcgcgaccacgtaatcggtggaaaaattcgtgaagttatcgatggaaaacatcatcagcgcgaagatgatattcaggaatatcgcgtcgcgcatacccaaaaggaggagcgccagaagcgctaaaagcccgatcggacgggcgtagatattgaaaaaataactgaaaaaatagcaaaccacgatgcacacgcccagaaccgaaaagagcagaaagatatttttcggcgtggcgagaaaattcttatcctcgaacagatagtagaggtaaatagcgagatacagcatgaagatgctggacgccagatagataatattattgggctggttgctgaaaaaaccgatgaaactatccgcttgcttttccagagaattcaaaaagataaaaaaagtgatcacgagcagcaagagcacgtaattgaacaaaaacagaaacgcgctctgcacgcccgatttgcgcgtgaactttttcccttcgaccatttccgaatacatcatctttgcgttctcacatcctttgtactttccttttcataggcacgcacgatctgcatgacgagcgggtggcgcaccacgtccttgctggtcagcgtcaccgtttcgatgccttcgatattcttcaatatggaaacggcgtgctttaagccgctctttttgccctcggggagatcgatctgcgtgacgtcgcccgtgatgaccatttttgaaccgtcgcccatgcgcgtcagaaacattttcatctgttctttggtggtattctgcgcctcgtccagaatgataaaggcgttggacagcgtacggccgcgcatataggcgagcggcgccacttcgatgacgcctttttccatatgtttctggtacgtttccagaccgaacagttcctgcaacgcgtcgtataaagggcgcaggtagggatcgactttcgtctgcagatcgccgggaaggaaaccgagtttttcgcccgcctccaccgcggggcgggtgaggatgatcttttccacctgcttgcccttgaacgcggagaccgcctggcacacggcgagataggtcttgcccgtgcccgcgggaccgatgccgaacacgaccgtgttgttgcggatggcgtccacgtattttttctgccccaccgtcttgcacttgatctgttttccgcgcgaagtgatcgccaccacgccgctcatcaccttttcgatgccctcgaatccgccctctctcgcaagttcgatgcagtagacgatgcggctcttgtcgaaaggctcgttcgcggcgatcagtttcaacagcccgtcgaacacctttttcgccacttccacgtcctcccgctgccccgaaaggcggagcgtcgccccgtccacggccgcggatacggaaagttcgcgcgtaatgatatttaaattttcatcgaacgtgccgagaagtttctgcatggcgtcaagagttcccgcgtcgacgatcgctttataaagttccgtaaaaaattcctccgtgtcaatccatattcaccgcaaacgtagcggcgtaacggatatgtatttcatatacgaacgcgccgttttccgcgcgcacgtccgcgcttttttccaatatttccgcgtcgccgatctctaacgtcgcggcggcatacgcgtctgcgagcgccttgtcgctctcttccttgctctcgtactcgtaggaaagctcgcattcgagcacggctttggcgatcgccgcgacctcgcgccgcacggcgccgctctccccgtaatcgacgtagcccgccacgagcgtggcgcccttttcgaccgtatcgccctctttataaaggggcgtgccgcggatacagacgagttgtaagatcttgcccgaaaaggcggcttccagcgagcgcgcggaaacttttgcgggcgtttcggcgttgacttccacgccgacgacgatgacgccgccctttttctgcaccgagcagaaactgacggcgggcagatcgagaatgcccgcgcgggcattttgcgcgcgttcctccgaatagggagaaaatggcgaaagtcccgcccgggataagagggcgcagacctcctcgcggtaatggctgccgctgccgaccacttcgactttgaaaacgagggcgcccgaaagaaagacggtaaggcagaagagcgcgatcccgacgagcacgcccacgcggcagagcgcccatacggcgagtcttttgagtcccctgtctttcaatttatttatagtataacacgaaccgtgaaaaattgcaaaaaatttttcggaatcttttgcacggatggataatcttatgcgggttttgcctgttttgcgtacgttgaagacctctatgcccgcgcgcgcgagtttattgacggcgcggtttacggtcagagaggtgatctcgtaacgatcgaacatggtcagcgctttcattccgccctcgcgacgctttcgatctgcccgtacacggcgaggtcgccttcgacaaagcggcggatgtataaatttttgcccgacacgagcagttttccttttttcagtaagatctccacggcctcgccggaaaaatcgccgatgccctttacgttttcaaagtacccgcagcggccgtcgaacactacgtatttcacgccgttgaacacgagttcttcgtcggcgccgagacggcgcatgatctcgtcgaacagtttcataagatattcctccgtatatattagtgtatgcgcaaaggggcgtatttatcataaaaaaacccgacggcatatgccgtcgggttttttattgttcgtttgaaagggaaacggcgatttccgccggagcgttaacggcagccgccgcacgtcttacagtttccgctgcattttttgctcttcgtacccgttgcggaatagacgcagccgctgtaatcgcgcccgcagcgctccccgcaccgcggacatttcacttcgtccgtgtacgtctttaccaactcttcgaacttttcgccgcattttgcgcacttgtactgcaacaggggcataatcttcacctcgaaattttttattccgcccatctattgtaatacaaattttcggatttgacaaccgaatttaaatgaccgctttcccctcgacgtaggaagcgaagaatcccgccacgtctacgcccactttttcgaaacaggaaaccatatcttcgggctttgcgattttataacagaattcgttataatagcgctttaacgcgttcgtgaactttttatcgcccagggcttcgcgcaggttatcgaacaggatgagccccttattgtaggtcacgttgacgtattcgtactcgccgccaaattgatccagtttgcggttcatcgtggtgtccgtttcgccgaacaactgggcgtacacgtcgaaaaacgccttatatgccgaatatgccgactgcacgagattcttgcgttccagtccgtacgcgggatagttttcgaaaaacatgaccgtggagtattccgccagcccttcgtccatccacgcgttttcaagttggttactgcccaccgccgaataccaccactggtgcgccgtttcgtgcacgatggtgtatttgttgttgagatcgtcgagcgcgtcgctgatcatggaaagccccggatattccatgccgccgtagcaaaagcccgtctgcaccgctgcgtaggtggaatagggatacgcgccgaaagtctgcgagaaatattcgatgctctcgcacgcgatattcaaagattcttccgctttttcgtcgcggtaatagtaataggaaacttccgctttgcccgtatcttttttgagcacctgaaaatccttgctcatgacgaaacagaaatcgcgcgcgttttgcagttcgtaactcctttcggtgttgccgcccaaagcgcgctcgcccgtctgtttgccgctggaagcgacgacgtagtcggaatccgcgaccagtttcaccgaataatcggcgcattcgctgtaaaaaggatcgcccgccgcataatattcgcactcgtaaaatccgttgtcgtaggcgcacaactggggatagaaattggaaagattgaccgcatgttcggtgacgcccgtgcggtgattgaccttggcaagttcgagcgtatagacgatctccagactgcactgctcgtcggggaacacgctttcggacagcgtgacggtcagaatattttcgtccagccccgcaatgtcccattcggaaacgtcgccgcgcacgtcgttcactttcatattgccgtaactcgcgccgtcgtaatacgctttggcggtatagcccgaagaaacggggcggtacttggaatcctcgcggaaggcgttgccgaacagattgaatttcagttcggatatttccgtatcggtgtagttataataggtgaacgccatttcgcccgaaagcgaacgggacgcctcgtcgtacgtggcgtaaatatcgtactcgcagcgctccgcgtcgttcttcttgcaggcggtaaaggacagcgcgcctaagataagcgccgccgcaaacagtaaactcaaacctcgtttcaacaaaacagaaccctcccgcccctattgcggggctttgtcctcttatttattggtatattgtatgtcgcggtttttcaatatatgaaagagcgggggcgcggaaatttccgcgcccccgctctttatttaagaagggagaaatgaggattggttttatgcaaactgtcgtctgttccaaaacccgatttcgtgtatgcgattatttttcttcgatgtcgaggtaggccgtgggattgataaactggtcgttttccatcgtttcgaaatgaaggtgcgaaccctcgttgtattccttgcccattacgtccgtcgttgccgaaacggtgccgatctgatcgcccgcgctgacgctcgcgcccactttcatggaagagttgacgtcgatggacgaatagacggtcttcaacccgtcgccgtggtcgatcacgatcttgccgccttccagaagatcgtccgtgatgctctcgatcttgccgccgtacgcagcgcacaccttggtgcccgcttccgccgcaaagtcgatgcccgtatgcaggcaatacttgttgagcgtcgaattataccagaacgaataggtcgtcttgaccgtggcgttcgcgacaggcatggagaatacgatctccgtatccgtaggctcgtcgggaccgggtccgggttcttcgccgccgtttccgccgggattatcgatactggtaccgggacggtccgtcgcgatcaaaacggtaaatacagtcaccgccgcgagcaaaagcacgcagaccgcaatgatgataaagtaaaggtttctttttttcaccgctgcgtcggttgtctttttttctttcataacattcctccgaaaaatttttgataggtagattgttgacacaaattttttatttatacgcgatccgcaaaattttttttaatatccgccgaagatgagcggactgccgatggcggagccgcgttcggaaacggcgacgtgtacgttgatccgctcgccaaagagcgttacgccgcccgaaaggcggggggaatagccgtaataattggtgacgcccgccgcgctctcctcgatgagaaagcgggtttcgagccgctccgcttcgaaaaaagccgcgcctttgtcggcataggcggcgctttcgcccgtgacctctctggtaaagagtttggtcaaaaattccttcccctcgccgcacacgatcatccgcgcgttggaactgacgctgcccgcatagagggtataactcgtaccttttttgaagagcagggatttattcataatctgcggcagcgccgcgagcatgaggcacattgcggcgagcgcgaacaccgccagtcgttttttaagcattttctgtgttctcccgatggatttgtcctctcctttatcgtcagatattttcggatttataccttcatcgcaaaaaaagcgcggaacgaattttcgttccgcgctttttacgtattattgttttccttttttgccgagcgggatatgcgccgccgcgttgagggagagaggcgcaaaattccgccgccgatactgtacgagcccttccgccgcgatcatggcggcgttatccgtgcaatagcgcttttcgggcaggatcagtttcagccccgcctcgccgcaggcgctttgcagccgttctctgagatatccgttggcgacgacgccgccgcccgcggcgatcgtgttcaccttatattccttagccgcgcgcacggcgcgctccacgagaacgttcaccgcgctcgcctgaaaggacgccgccacgtcggcgcggcatataggttcgcccttctgctctttggtgtggcaatagttgatgacggcggtctttaaaccgctgtaagaaaattcgtagccgctctcgcctttcagcattttgggaaagacgatattgttctccccttcccgcgccagcctttcgatattcggcccgccgggataaggcagtcccagaacgcgcgccgccttgtcgaacgcctcgcccgccgcatcgtcgcgggtagagcctaaaatggtaaaggaatcgtatgactgcgtgtacaggatcgcggtgtgaccgccgctcgcgagcagggtgacgaagggcggttcgagcgcgggatcggcgagatacgccgccgccatgtgaccgcggatatggttgacgcccagaagcggcaccccaagcgtaaaggcgagcgacttggcaaaggacagccccacgagaagcgcacccatcagtcccgctccgtaggtgaccgcgaccgcgtccacttcgccgagcgatacgcccgcgtttttgagcgcgcggcgcacgacttcgtcgatcgcctcggtatgcgcgcgggaggcgatctcgggcacgacgccgccgtattccgcctgtacggaagcggaagagatgatctcgtcggacagaagcgtgcgtccgcggacgatcgccgccgccgtttcgtcgcacgaactttcgatgccgagtatgagcggcgcgtccttcaaagaaacgcgcgcggttttttccgaatacgtcatgcagacctccgcccttgcgggcatgcaaaatgcggcgtgcgccgcatttatttttgtcccgcgttcccgcccgtgcggcggaacaccacggtgttatccttgttttcttcgcttaagagcgcgtcgaactgcgcctgataggaaagatatacgggttcgttgatataaattttacccgcgaatcccgcgtttaaaatttgttcgagaaagcggaaattcaaaaacatttcccctttgagcgtttctttacagcagattttcgcgttgcagcgggtatcgcacagttccagatcgcgctctttcacgccgccgagcaataaaagcgcgggcacgatcttccgttcgccgttcaccgtcgtatagacgggtttgaaccccttccactgtttataggcgtcgtacacggtgataagcagtacgggaatctccgccgctttcatttcgctcaccgagaaaaagcccttattcacgcggatgacaccctctctgtacgtgtagccagcatggatggtgaactgcggaacgagtacgacgagcgcgccgacggcgacgaatacggcgccccatattttattgagatagagaagttccaccgttccgaggatcagaaacattccgcccaaaacgagcgaaagcgcggtttgcgcgccgcggcggaagttggaaaaataatgtgttttcatatcaactcttcttcagataatccacgatgaattgttcgatatcgccgtccatcaccgcggaaatgttgcccgattcgcagcccgtgcgatggtctttgacgagcgtgtacggacagaatacgtaacttctgatctgactgccccactcgatctttttgatctcgcccttgatgttctgttccttttccatgcgctcgctctcgcgaagttcgatgagtttgcttctgagcatcttcatcgccatttcgcggttctggatctgcgaacgctcgttctggcaggaaacgacgatgcccgaaggaatgtgttggatgcggatggcggattccgtcttgttgacgtgctggccgcccgcgcccgacgagcggaaggtggttactttgagatcttccgcacggatctccacgtcgccgtcgtcctcgatctcgggcatgacttccagcgaggcgaacgaggtatggcggcgcttgttcgcgtcgaacggggaaatacgaacaaggcggtgcacgcccttttccgctttcagatagccgtaggcgttttcgccctcgatcttgaaatccacgctcttgatgcccgcctcgtcgccgtccagacggtcgagttccacgaccttgaaaccgttcttttcggcataacggcaatacatacggtaaagcatggatacccagtcgcaactttccgtgccgcccgcacccgaatgcagcgttaaaagcgcgttatagttgtcgtatttgccgcggagaagggcgcggatacgcaattcctcaatgtccgactcggcggcggcgatcaggccgtccagttccgccacaagttcctcttcgcccgtttcttcgacgaggtcgatgacttcgttcacgtcgtcgacggcctttttgctcttttcgtaggaggcgatcttggattccacggacgaaacttcgcgccctatttttttggatctttccagatcctgccaaacttcgggatcttcctgctcggttttgagcgcggcaagttgcgaagtaagccccccgatatccaacgcctcggcagtttcttccaacgtggcgcccagcgccttgatcttcagtctgtaatcgtccgctttaaacatatttaccaatctttccaaattttttattcagaccgattatagcacaatcggcacgggttgtcaataaaacgaaagacggcgggtattcccgccgtctttcccgcctttacagcggattttttaaaaagtaactctgcgcgtcgatggtctcgcccagcgtttccactttgcggtatctcccatcggggcaaagttttttcgccttgacgttgtccgccagcatgatcctgaggattttttcgatcttgtcggcgatctgacggtcgagcacgggcgcggcgatctctacgcgcttatcggtattgcgcgtcatcagatccgcgctggaaatgtacgtcgtgcgatcttcgcccttgccgaaggaatagacgcgcgaatgttccagaaaccgccccacgatactgatcacgcggatattatccgtcttttgcggaatacccggaagcagacagcatatgccgcggataatgaggtctatcttcacccccgcgcaactcgcctcggcaaacttgtcgatcatggtcttgtcggtcaggctgttcatcttgcagaggatggcgccttcgcctcccgccttcgccttttcgatctcgcggtcgatgagcgcggtcagcccgcttttcagcgtttcgggcgcgaccagaaggcggttatacgtaaactcggtgttgcagatggctatgttgcggaaaaacgccgccgcgtcctcgccgatcttttcgtccgcggtgatgatgttgagatcggtgtactgtttgctcgtcgattcgttgtagttgcccgtgccgaggtgcgtgatatagcggatctgttccccctctttgagcacgaccgaaacgatcttggaatgcaccttgtagttttccatgccgtatatgatggtgcagcccgcctcctgcaatttgcccgcgaaatacatattgttttcttcgtcgaaacgggcgcacagttcgatgactacggtcacctgcttgccgttttcgctcgccttgcacaaaagttcggcaatgcgcgaatggtgcgccagtcgatatatggtgatcttgatggatgtcacccgtttgtcgagggcgcattcctccaacagatcgacgagaggcgtcatgctgtcgtagggataggataaaaacacgtcgcggcggaataccgtttcgatgagcgagggcgcgccgcaaagttccttggcgacggcgcccttgaagggcggatatttgaggggaaggctgcgttcgggcggcagatatttatccagcgaaaacatgaatttatagtcgaaaaaccgctcgtcacaaaagcagaaacggggatgcagtttcagaagtttcaaaacgaattctttgagtttttcgtcttctctgtcgatttccagccgcaccacgttgaggcgggcgcgcgactccacctttttttcatgatctcggaaaaatcgcgctcgacgtcggaatcgtcgatattcgtgtcgaaatcggcgttgcgcgtgacgcgcatcatcattctgccgcccgcggtgtaaccggtaaaggcattgtgcccgaacgcgcgcacgagttcttcgagcggcacgaggcgcgccttttcgcccccgccgatacggtacagcctgtcgagcgcggcgttgaacgccatcacgcccaccatgcgccgcccgtcccgttcgagatcgtacaacatatagtttttcatgttttcgaactgcatcagcgggtgtttcgcatccagcaccatcagcgacaaaaggggcagaacgtgcgtcatgaacacagttctcgcctcctccttctggcgcggcgtcaactcgtccgcgcgcagaatgcgcacgccgtacttggaaagttcctttttgagccgaaaatagcacacggcgcgctcggcgtacagatctctgaccgtctcgcacacgccctccaactgctttgcggcggtcagttgcgtcttattgtcgcgcgcctgggcgtcggacaggctctcgttgtataaactcccgacgcgcaccataaaaaattcgtccagattagaactgaatatggataaaaatttgcaccgctccaacagcggattcgaaagatcctgcgattgctccaaaacgcgcttgtcgaacagcagccaactgtattcgcggttgacgtaaatatcgttgataaatcggcttctcgtcttttcggtcaccttttactcactccctttttgttccccttccgtatcggcggtctttttcgggcggccgcgacgctttttttcgccgccgcagatccgatcgctcgtaaaatcataatatcttcccgactctttcccgtcgaggatcagttgtaaatatccttccttgacgccgcgctcgctcaccacgatattgtccgcgtcgaaccgtttgaagagattgcgcagaacgatcgccgcgggcccgatgagaaagagtttttccggcgcgttgttgagaatgaggctggaacggtcggcgccgacaagcaaatttttggtcagatttttgaacgttttgcggtcgatgatcttgctctcttcctcacgggaacacttcgcgtaatcggcgtacacgtcgtagacggcgcagttggtcgcgcccaccagaacgacggtggaaaaggcgccctttttgggaatgcccgcctcgtcgaaacggcccttgatatattttttgatctctttcgcctcgttttcgtcgggctgcaactttttcacgaatttgcggttgagatccagaagcccgaaatcgagatacgccatctcctctttcgcgttcttggaaaaatcgcagatctcgatgctcttgccgccgaggtctacaagcaccgcgcgctcgtatgtctgataataggcgttcgcagccagatcgcagtacgcctcggtggcgccgtcgagaaaattgacgggcaggccgagtttttcttccaccgtcttttgcacctcgttgaaattttcaatgaggcgcagcgccgccgtggaaataacgtaacagcgctccgcatgaaactgcgcgcacttttgctgaaattctttcagctcgcccgtcagtttgttcagcccgtgctcggacagattttttccgtcgaaatgcggaaaaagaaagagagggacacggtctttgaatacgatctccgcttttgcgccgtcgatctccgcgacgatcatggaaaggctgctcgaactgatatcaatgatggaatatttcataaaatccttctccgttatgaaatcttttgcgcgtcgccgaagcgaatgccgatgctctttgcaaagcgcacgagttcgccgtcgggctccacgagtttgtagcgtcccgcgatctccgccagggcgttgtagacgatgcggttccccgacacggcgacgctcacgccgaatacgccctttgcggcaagatcggccgcaaaggcaccaaggcgggaagatagcagcctgtcgtaggcgcagggcgtgccgccgcgctgcagataacctaaaacgctcgtgcgcgtttccacgcccgttcgttcttcgacgatttccgcaaggtgctgcgtcaccgtgctttcgccccgctcgatgcgcgcaaatgcgcggtctttctttttatacgccgcctccgaatcgagaacggcgccctccgccaccgcgatgatattgtagggccgctcccagtcggacgccccttttctttccccgctcttttgcacgaattcgcatacggcgtccagcgaaaagggaatttcgggaatgaggatcatatccgcgcccgcggcgagccctgcgtgcagggcgagccagccc

SEQ ID NO: 3140 - DNA, 1773 bp, Unknown
  16S sequences of unknown bacteria
cggcagaggcgtaaactgatatttactaaattagtaatttagtaaataagtggttgagagaaggaataaaaatgccgtcagaagcccgcaagcgggaattaaaagaacaatataaggccatgcgtcccgagatgggagttttcgttttccggtgcgttcccacgggcaaaaattatgtgggctggacgcacgacctgaaaggcacgctcaacagcctgcgattccagttggagttgggcagctgccgggaaaaggcgctgcaggaggcgtggcgtgttcatggcggagcggcgttttgtgtggacgtgctggaaaagctgccctatgacaaagacgatgaaacaaagaccgattattccgaggagcttaccctgctgtgccggctgtggcaggagaagctgccggaccacgaggaagtttggaggaaccgcacatgaagatccccaccacattaaagcacaagcctgtcattgttgcggaaaattacgacagtatcgacgggcgcggcgcataccattccgatgcgaagggcctttccctgggcctggcccaatggaacgaccggggcaaggtggatatctcggccaaagtctggcggcataccggggagaaatggtcgcgccagtcggaggagctgcccatgcaccgcgttctggaccttgccatcctgctgtgccgcaccaacctgtattttcgcgatgaagcgtaccgccatccacgatattatgacccggagcatccgcggatcgaccgtgtgggcctgcagggcgacgcgatggacattgaagtatgcacggaaaatcccatgctggaagaagatatccgcctgttttacaatgtgctgggcgaggacggcgagctgctgggcgagcgattttccgttctggcccggctgctgcgggagatgggatattgattcctgagcgaggccttttttaaaagttgtaaaatttgacgagccgtgtcgaatcggcttgaaaatccctgcaaaatagtgtaatttattattactgcgcaaaaatctgtttgggagaccgcggttcgtcccaggaccgcagggcgaacaaacagattgagccgttttgggatatcgattgaaacgccgggaaacggcgtgcctgcggggaaagctccggaggcagaaacacggagggattttcatgaaaaaaatgacgaaacgcatcgcgctggcgctttccatggtactgtttgcactggcgttcacagcctgcggcccgaacctgctttccggcggagacggcggctcgaaggatacggagggcggcatcggcgatacgctgtccaacatgttcttcgattatacggtgctggaggccacgagcccggcggaatatgacggttatactgccgcggagggaaaccgtctgatcgtttgcagcgtaaaggtgaagaacacctttggcgaaacgatccccatgtatgattccgactttcagctgcagtggggcaacatcggcggcgacgacgatgattacaccttctcgctggatgcgttcaacgacacgatgatgccgctggaatatgaactggccgacggcgaagaagtgacctatgacctggtgttcgaggcccccgcagatgtgaaggacttcggcctggtttatctggaggaatactacacgggcagcgaatccgagtccggcacgggtgatttcttcagtgtgaacttcacggtggagtaaacgtacatcccgcatgtgaacagacgcaaacgccccgggcggcctttcggccgcccggggcgtttgagtc

SEQ ID NO: 3141 - DNA, 32759 bp, Unknown
  16S sequences of unknown bacteria
acggtttgtatctttcgggaagtatatctaaaacaattttgttttcggggtcggtcaatatgcattggtatttttctccccaagtgttgcccttaaattcatcaatatataatactttgggcagttcggcttttggatagctttatcttattttttcttcgaaggctctacttgcttaccccaacatttattatagagcccaaatttcaaaagataattatagggtacaaaaccctatagaatgttcgattaaaagaacttggaccgggggggggagcatatctttcctgaaattaagttccgttttttatataagaagttcttgctgcctcaccacccgaactcgagctaaagttatttatagaccgtaatttctttattacacacaaagattttacggtccttttttggaagcaaagaaacataaatcacccttttgtcggggaaaataaaccgacggaagggtgattttttgaagaattacaatgaatggattgccgaaattgacagcgagctgaagccggataaaagctttgatattataaagcgaccgcttaaaatcggggaacggcgggcggtgctttactttatagacgggtttataaaggatgaggtgtatgaaaagatcctcgaatttttatacaagcaaacagccgaggacatagcggaaattaacgatatgagccgctttgcggaaaataagctgccgtatgttgaaaccgacgcggtatataccgcagcagaggtcgtaaccgcggtgctttcggggccttcggtgcttataatcgaggggatacacggcgcgctgacggtagatgccagaacataccccatgcgcggagttgaagagccgcagaaggataggtctcttcgcggtccgcgcgacggctttgttgaaacgcttgttatgaacacggcaatgctgcgccgccgaatacgcgacagccgcctgcgcatggaatatatgcagataggcaatgagaccaagcttgatatctccatagcctatattgacggcaaggcagacaagcgggtgcttgaaattttgcggcagaggcttcgggcaatacaggcgggcggaatttccatgacgcaggaggcgctggcggaatgtctgcagaaaaatgcctttttcaacccgtttccgaagtttaaattcaccgagcgcccggattacgcctctgcctgtgtgctggacggcaggattgcgctgatagccgataattcccctgcggtaatgataatcccgatatccttttcagactttttccgcgagacagacgactactattttctgccggtggtggcaagctatataagaattatccgtatgctcgtagccttgctgaatgtagttataacgccgctttatttgctgcttgtgagtaattccgccgctgttcccgattggctcggcgttctcattcccgaaaaggtgggagaggtgcctgtatttgtacagctgcttattttggaattcgcggtggacgggttaagacttgcctcccttaatacgccggacgcgctttcaaactcattgggcgtggtgggcggacttttgctttcggaatttgcggtaaaggcgggctggttttcgggtgaggcgatactcattacggcatttaccgccatagcgggcttttcgctgccgagctttgaaatgggctatgccatgaagctggaacgcctgctgctgcttattttaagcggaattttcgggctgtggggctttatcggcggacttgtgtttattataatatgcatgctgtccgtcaagaccctttcgggcaggaactacctttaccccattgtcccatttaatttgaagggcttcgcggagttttttttgagattccccatgaagtgagggaagcctatagtaaaaaattcggcttgtcggaatcgagatcatattcagttccgtacattttaagtccgtctactatgcagtacggtttatagattacgctttgaattccgttttcccatgtgtgttttccggcaggaattattaaagccccgcacatacatgttttttatgaatttcatctgtaagctcatattcgacatttgtgtgctcatcgagatcaatctcaccgtatggagtgatgcattttttcgcagcgcgcgggctcacggcaggttgcctctccgccggaatgcttgcagccgtacagacacaccctgcaaacgccgttttcatcgtaatcgtgcagctcggcaactgttttcccgcagcaatcccagtgctgcttgtggcagagcggtgtcttcttgtaatccgatggagacgatgtatgattatccggatctttctcgccgcaatattgcttgcaaaccgaacagtaagcgggttcacgacagtttgctttccaccgggaagtatcatatcccttcgcgggaattaccgtgccgtagtctacaactccgcgaacggtatcgcctgtgcagccgtccatagtgagtttggaggcggaaatcccccttaggtttgtgtaaacctttagccttgccgagcctgttacagtcacattgccgttaggattgtaaattccgtaaaatgtattatatgtatatgcgtcatcgttgcctattcgttcaaacgcatgaccgctgatgtacggctctccaatgacgctttccttaccttccagcctgatattcaggttcatgctgttttctacacgaataaaagcatagtaatatacatgggttttcttatcatatttcatgaaagtcgcttcatccgccacatcgcttataaagccgttgagcgtcagcgtatttgtgtccggctcaaatttccggccctctcccgagagcctatcacttgtaacccgcctgccgccgacatcaagaccgtagtcaacggcggcgtttgtttgaagcactaaagctgctgcggcagtaagcgcgacaatgaagaccgaaattaagtttaaaacagccgttttctcattttaatttacctccgtgaaatcagtttttttatatttatcggcaaacattccgaccgtctgctttaatatctcggtttgactttttaaataatattcatccccaaacatggcgtagtgaacgcacgcgcggacgagaatgaagataagcggagtgagcacatcgcacggaataccgagcttaggctcaagcagcttggcgtattcggtgtatcttttgtctacaccctcaaaaaatttcttcccatattcaatatatttcggatgggtatatacctgatacattaatctgtatttttttccatgcttttttgcagtccagtaaggaatctcctcaataaaccgcataacatcctcggcgtcggtgggcgcctttgccataaaatcatcctcgaccttcgccatgcaatgtgcggttgattcgattatcagctcgtcaagatttttaaagtaagcgtaaagatttcccgttgtgcacccgcaggcagccgccagcgcctttatccccgtgccggtgaatccgttttccgcatagcactcaaagcatctttccataatctccgtttttctttcattatgctgccgttctgttttcatatgtatttatcaaccgccgttttcaattaatcgttcaagtaagtatagcatataaaaaaggcaacagaaaccttccgttttgaaacaaaaaatttccgttgcccataaagccgcagcgagcaggtttttaacgctttgcctgccacggctttatatccttcagctcttcaaaaagcgctttgtatgattcaaggcggcttttttgtatttcgccgttttcagccgccgcaataaccccgcaccccttttcgcaggtgtgcgtgcaggaagtaaagcggcagccgacgctgtattcatataaatcggggaaacaggaaataagcttttccttaaattcatagtcgccgcccgtttcaagcgaggaaaagcccggtgtatcggcaatataaccgccgcaaggcatccgcagcagctctgtatggcgggtggtgtggcggcccctgccgagcttttcgctgacctcgcccgttttaagcgcggtatttccgaaaacgcggtttaaaatgctcgatttcccgacgccggagttgcccgtcagaacacttattccgttcgaaaattcttctttaagcgtatctattccctcgcccgtttcagcggatacggtaaacaccctgaagcccgcggcgcggtaaatgctctcccaacagctgaaatctcctgcgtcgcacttgttaaaaactataatcggctctattccgtggtacacggcaatcgccgtaaggcggtctattatgtattcgttgggagcggggttttcaaatgatgaaactataaaaagcctgtcgatatttgcaacaggcgggcgggaaaggaaatttttgcgcggcaaaacagcggtgacaacgccgctgccgcccgaaaattcaaattccgccatatctccgaccaaaggggaaattccgcttttgcggaaatttccccttgctctgcattcatataccgcactgccgtcatcaatataataaaaccccgacagcgctttaataattatacctgtcaattcagcttagattctcatccgaggaggtcgggtcaagctccttataatcttcaaagccgcttaccattttggcattaccctccttgaaatcaacggttattacctgataatcaagtgcattgcttgaagcagacctgatcttcactgtatatgtgccgctgtcacgctttgaggtcacattttcaaaagtgtatttgctgagctgtgtggcgtcgagcattttgctttcagcaaccgctacgccgtcctcccaaagcgatatataatactgctccagctgcagatcgctcggcaggctgacggttatattagctgagaaacctttatttacatagatcttaactgtcgagccctcggcgatgctgctgccgcttgccggctcctgcttaatgacatagcccacgggagcatactcatagccgctgccctttgagtaataaacctcttcaacctcggcaataagctttttgtccttcaaaagcttttcggcgtccgcctgcttcatggtggtaaccgacggagcgttaacattctctatggtcttgcccgagcttacataaacggtaatcttggcgttttcttcaacaacctcggtgcgttgcggcgaggtctttataataagacccttttcaacgtcctcgctgggcatttcggttataacggtggtaaagcccgccgccttaagctctgaaacgccggcggattcggtcttgccgtaaacatcgggcacctttgtggtggactgacccttgctgataaacagggttatggtagcgccttttttaagcttttgcccctccgcctttgactgctcatagatatatccgtaagcgtaatcagcgttggactcccatttttcctcaaacttaaagttcgccttgtattcatcgtttgaggttacatcctcaagcttttgacctacgaatttcgggcaggtaagctctgaacccgtgctcgataaaagccgcggcacaaatattgccgcaagtataactatagcgataaccagcgttacggcaatgcccgccagtatcggaatcatattatttttttccttaggctcttcctcctcgcgctcgggtatctgaacactgtcgtaatcaaatgcggcgggagcgaattttgtgggagaatcgtccacaaaataggaataatcaaaggtgagcgacgggtcttttctgaaagcgccgaggtcgcacagcatttcggaagccgactgatagcggcgctcggggtttttctgcattgcgtgcatggttatctgctcaagccccaacggaatcgagccgtttatctcggtgggcagctgcgggtcgcgctgcagctgcattatagcaaccgaaacggcactttcagcctggaagggcagttgtccggtaagcatttcgtaaagaataacacctaccgaataaatatcggtcttttcgtctgtgcgctctccccttgcctgctcggggctgatgtaatgaaccgaaccgatagccttatcggttatggtgcgctgctcgctccttgcaaagcgggcaatgccgaaatcggtcaccttaatagtgccgtcgggcagcaccattatgttctgcggctttacgtctctgtgcacaatgcccttatcgtgcgcgtgctgcagcccctttaatatctgaatggtaaagtgcaccgcatccttccaacgcaggctgccctcacgctcgatgtactccttaagggtaatgccctcaatgtattccattacgatatactgtataaggtcgccgaagcttacgtcaaacacctttacaatattcgggtgggaaagcattgcaatagcctttgattcgtttttaaagcggcggacaaactcctcgtttgaaataaattcttctttcagaattttaaccgccactatacggttttcctgattatcgtatgccttgtatactaccgccataccgcctacgccgattatttccttaatctcatatctgccgtcaagccgttttcctacaaatttatccatatgtttttatcctttctgacgttactttgtaaccgtgacaaccgttatattatcgccgccgccgtttttgttggcttcttcaaccaacctttcggcaaccgcggatatatcgttattttgaaagaccgttaaaatatccttatcgtcaaggaaatttgtaagcccgtccgagcaaagcagcagcgtatcgccgtttgataaattcagacaatcactgtcaaccgccacattctcttcagcgcccagcgcccttgtaataacgtttttgcgcgggtgaacctttgcgtcctcgggggttattttcccgctctctataagcgactgcactaccgagtggtcgcgggtcagctgtttaatttcgccgtttacaaggtaaattcggctatcccccacatgggctataaccgccttaccgtcctttacaaacgctgcgacggcggttgttcccataccggcgagctccgcgttgtttaccgccttatcataaagcgatatatttgcgctcacaatagcgtttttaagcgtttttacggtgtcggtcatatccattccgtctcggtaggagcgtataatgtactccgaaatatgccgtacggcaagctcacttgcaacatttccggcattagcgccgcccatgccgtcgcaaaccaccgcgaaaaccgagtcgtcggttattttaccggcaaaataagcgtcctgattatcggtacgcacccgtcctctgtcggttttactgaatatctgcaatgctttcaccctcctttacccgttttctaagctgcccgcacgaggcgtctatatcagccccgagcgttctgcgcaccgtggcgttaacgccgtttgcggcaagcctttctttaaaacggagtattttatttctgtccggttttttaaaggaattttcctttaccggatttgcaggtataagattaacgtggcacataatgcccttgagcttttttgccagcatatccgcgcaggcgtcggaattatttacgccgtctatcagcgcgtattcaaaggaaatgcgccttgtggtaaccgcttggtactctttgcaggcggcaagcagttcgtctatattccaccgcttgttaacgggcattacggaagaacgtatatcgtcgctcggggcgtgcagcgaaattgacagcgttatgggaagattatattctttcagcttttttatgcccgacaccacgcccgaggtggaaagggatatatggcgaagacctatattaagcccattttcatccgatacaagctttaaaaaccgcaccgaattatcaaaattgtcaagcggctcgcccatgcccatcataactatattggaaacgcgtatattattatcacgctgaaccgccgttatctgcgccagcatttcggaagccgtgagacttcttgtaagtccgtttatgcccgaggcgcaaaatttgcagcccattcgacatccgacctgcgttgaaatgcaaacggtgtacccatgctcgtatttcatcagcacggtttcaataagctcgccgtcaaaaaggcggaaaacatatttcaccgtttcatcaaggcgtgaggcatatctgcgctcggtttcggcgcttgcaatatatgcgtcggctttcagcctttcgcgcagcgcttttgaaatatcggtcatttcgtcaaaatcggtaacgcccgactgcagccagtgaaatatctgctttgcgcgaaagcgcggctcgcccatttcggataaataattttcaagctcgggcagatgcattgaccttatatcgattttactcaagcggagcgtttccctcctttataagcagcgcgcagtaaaacccgtctgttttatcaatatgcggcatatatgtgtgttcatacgctttacggaacatattataacgcataataaacgaatttacaagattttcattttcattttgccttaatgtgcaggtagaatacaaaattctgccgcccgttttaacataccgcgcagcgttttcaagtattttaagctgcgttttcgtgagcgcctcgtcaaggcaaacacctttatatttaatttcgggcttgcggcgtaatacgcccagccccgagcagggaacatcacacagcaccaaatcaaattcgccgagggtttcatcataaatttcggcgtttgccgttttcggctttataatgccgattccgagtctctgtgcaccgctttcgataagtcttacgcgctgctcatataaatcgcaggaaattatttcgcccgcgttttgcataagcattgccgcggtaaagctcttgccgccgggtgcggcgcatatatcaagcactctttcccccggcttcggatctgccgcaccgaccgctctttgagaagcaagatcctgtgcgtagaagagccccgatttataaagctcgttttccgaaatatcggagcagtgctttaaaacaagcgcgtttttatcttcgcttgtttcggcagtaatttcctgttctttcagtttccccgccaattcctcggcgcttatttttaaggtatttacccgcacggtaagcggcggggtatcaaggcttgcaattaaaagctgctttgcggtttcggtgccgtagtcctttacaaacgaccccacaacagcggcgggacaggaatattttaccgaaagtgactttatatcactgccatcgggcagctttactctgtttcgtaaaatatttcgcaagaccgcgtttacaaagcctgagtttccgctctcctttgagcccttcacaagctttaccgcctcatttaccgcggcgctgtcgggtattttatccatataatatatctggtaaacggcggttcttaaagtgtttattgtaagcggcgctatttttttcacgggcgtttttataaactgcgaaataatgtaatcaagggttattttacggtcaagcacgccgtaaaacagcgcggaggcaagcgccctgtcagctcctgtcagttccgatttcgataaaacctcattgagcactatattagagtacgccgcgccgcaattcacccgcattaaggcgtttacggcggttttccgtgcgtcagccattttcgtcctcaatttcggcgcccacagctatgggtctgccgcataaatactgctttgcgctcatgggctttgagccctcgggctgtatcgtctcaagcgagattgcattttccctgcaagcgacaataagctcattatcgcttttaagcaccgtgcccgccgtgccgtgcatatttacaactcggctttttattatttttatacgcttgtcgcccgatataaagaaagcaacgggccacgggtaaaagccgcgcaccgcattgtgaacctcgtcggcggtcatatcgtgaaagcttattttcgccatttcctttttaataatcggcgccgatgtagctttgctttcatcctgttttacgggggtaatgcccccgtcttcaaggtctgcaagggtcttaaccagtaacttagcgcctataaccgagagccgttcaaaaagctcgcctgcagtttcctccgcgcctatttcggtaacggcggtttttaaaatatcgccggtatccatacccttatccatttgcattgcggtaacgcctgtttccttttcgccgtttacaatgcaccactgtatcggcgccgctcccctgtatttcggtaagagcgaggcgtgcccgtttatgcagccgtagcggggcagggttaaaatttcctccggtaaaattttaccgtaagccaccaccgctatagcatcgggtgcaatatcccttattatcctttccgcctcgccgtcgcgcaaattacgcggctgaaaaaccggtatcccgtgcgtttcggcgcatacctttacgggcggcggggtaagtatctgctttctgcccacgggcttatcgggctgggcgaaaaccgccgcaacggtgtgacccgcgtttattaacgactcaagcgttttaaccgcataatctggggtgcccataaaaactattttcatcaagaaaacctcggcttatttttttattctgtctatataaagtattccgtcaaggtggtctatttcgtggcatatagcccttgccttaaagccctcggctgtaagcttaaagggctttccgtttctgtcctgcgcgtgaaccgtcactttcataggtcttacaacatcctcatatcttcccggaattgaaaggcagccctcctgcccctcctggcttccgctttccttatctattacaggatttataagctcaataattccatcgcccacatctattatacagtatcttctgagtattcccacctgcggcgcggcaagccctacaccctcggctttatacatggtatccgccatatcgtcaagcacggttgccaacctttcatcaaagttaagctgtgtgcggcacaccttgcgcaggatgtcgtcccctattttaacaatgtttcttattgccatatgacaggtcctcctatattacggtttcggggttcatatccgccgaaacggtcgcgtcatttgtcagttttatgtcaagcgcccgccgcagcagctccctgaagcgtttgccctcgcggcactttattatcattctgtatcggtacttgccgttcacccgcggtacggaggcgggcgacggtccgagaattatcagcttaacatccttgtattcatcttcaagcatatcgcgaacggcacggaatacatcggttatcgccttttcggcggctgcgcggtctgccgcgcgggatatgaccgcgcaaatatcgcagtacggcgggtataccataaggcggcgggtcataatttcttcctcatagaagccgtcgtaatcctggcgggcggcaagctttataacgctgctttcggggttcatgctctgaattatcgcaagccccctgtctccgccgcgccccgctctgcccacaacctgggtcagcagcgaaaaggttctttcaaagctgcggaaatcctcactgtaggtagcgctgtccgcccccagaacacccacaagcgttacgttgggaaaatcaagcccctttgccaccatttgcgtgcccaataaaatatcatattcgcccgcggcaaaggcttcaaggtacatggcgtatgaatcggcagccatagtgctgtcggcgtccagccttaagagacgcgccgaagggaaaagatttttcagctcctcttccaccttttgcgtacctgcacccaaaaatttcatatgctgcccgccgcactcggggcatttgtcgccccgcggcacagaatacccgcaataatggcacataagcctgtgattcgccgaatggtaggtaagcgaaatgctgcaattggggcagctcataacatacccgcactcggggcaggaaacatatgtattatgcccgcgcctgttcaaaagaagtatagcctgctttttttcttcgagcacgtcggtcagcttttcgtaaagtcggcggcttataagcgatgaatttccgcttaaaatctcctgcttcatatccaccgtttcaacctgcggcagcaccgccccgccgaaacggtttttaagcctgtaaagcgaatatctgccgctttttgcggcggtaaagctttccaccgatggcgtagccgaggcaaggcataaaagagccttgttatattttgccctgaaccgtgccagcgttcgcgcatgaaagcgcggcgactgctcggatttataggtgtgctcctgctcttcgtcaattataataagccctaaattttcaaagggagcaaatattgcgctgcgcgtgcccacggctataagcgcatcgccgttttttacccgctgccattcgtccatgcgcttgcccatcgacatagcgctgtgaaaaaccgctattttatcaccgtagcgcgaagcgaaaataccgagtaattgcggagtcagggatatttcgggcaccataactattacaccgcggttatccgctatgactcgatcggcaagctttaaaaacacctgcgttttgcccgagcccgtaaccccgtaaagcagcgataccgcgccctcgtttttctcatactctgcggtcataccgtcatatgccgcctgctgctcgtcggtcagtgatatttcggtctgctctgcctcaagcccctgctttataaccgttctgaatacccgcttttcatagggtattaaaaagccctcggctataagcttatcggtaactcctgccgatactcccgtgaaatagcgcagctccttaatgcttatgctccccgcctcgcgcacaaaattgaatatttcgcgctgtctcggggtcagcttttcttcgttcacatcatccgtcagggcagcgcgcactcgcttttctcccgcgtcgtttacgcggcgacggctttccctgtttttgaaaagcgcctccttttcgcacatttcctccagtatatccgaagtaatgccgagcttgcgtctaaccgcaccttcctctttttcgccgctttttaaaaggtaatcgaaaaccgctttttcggtatcgtccaaaagcgagagcgccgaaaaatcctcattggcggaaaaattgtttacaaggcggtaattaagccccgcggggagtgcggcatgcaccgcgtcataataagtgcagaaataatgctcgcgcaaaaaaaggcataattcaagcatttcgcgcgttaaaacgggctttttatcggtaacggaaataatctcctttaaattatccgtctgagtctcacaaacgctgaaaatcattccctgtttttttatattgcccttgccgaagggcacggtcactctgcaccccggcacagcgccgcaatttttcgggagcgcatacgaataaagcctgtcatacgcgtttgttgcgccgtcaagcgccacctccgccgcaagccccgtcatacaatctccctcctttttaatcagtcgtttttctcgtctatctccgccgccattttatcaatggcaatgcttaccggcttttcgattgaaaggtcgccggtctcctccatttcctgtgcgatctcgcgcgcgttatgcgccacatcaataacaagacggtatctgttatcatagttctttataagcttgcctatattcggatttaacattctgaaagcacctcgtcaataattttggtttgtctgtccgttttcaagcggctgctcaaaatcacggacataatatcatcggctgccgccgtaatatcctcatttactactatataatcgtattccgccgcgcgctttatttcgccgagagcggaagccagtcgcttttgtataagctcctcggattccgtgcctctgcccgaaagccgccttttaagctcggcgaatgacggcggcatgataaatatgctcaccgcctcgggcattttttcgcgtatctgcgccgcaccgtttacatctacctctattaccatatcctgcccgtttgcaacagctctttcaaccggctcgcggggagtaccgtaatagttgcccacgaactcgttgtgttcaagcaaacggtcgttttttaacatatcctcaaacctttcgcgggtgataaagttatacttttcaccctcgcgctcacccgggcgcatagcccgcgttatggaggatattgagaaaagcagctccggcatttttttgaaaagctcggtcattaccgtgtccttacccgaacccgaggggcccgaaataataaaaactccgcccttattcatcctcttcctcctcgtcgtctaccgcattttcatcctctgtcatacggtttgcaaccgtttccgattgcaggtaggtcagtataatatggtcgctgtcggtaataattaccgcgcgtgtgcgcctgccgtgggttgcgtcaataagcgtgccgcgctccttcgcgtcctgaataatgcgctttatcggggcggattcggggcttactatcgcaatcattctgccggcggacaccatattgccgaaacctatgttgaccagcttcattaaacatcactctttcccttaggcaaacgagaataatccgaacccgttttttgagcatggatttctcgcattgccgcgttaaaatactcgttaatccgttaggattaactgcgttttgtgcctcgctctgcaaaaaatccgctactcaaaaaatcagcgacccaaaacgagcgtgattttcgtgtggatttttatgcggaggatgcgataaggctttcgccttataaagacgacaaatgaaaatacgccggaaatacgccgttttgggcggattcggattattctcgtttgcctagtgtgccaggactcgaacctgtcacactagacaatacaatcaggtcacaatgcttcccatagcggaaaatttgtccgtttatattatctattcaatattctgtatctgttctcttatcttttctatttcggctttgatatcaaccaccgtgtgcgcaatttcaatatcctgcgcctttgagcctatggtattcgcttccctgttcatttcctgaactataaaatcgagctttctgcccacgggttcgtcgctttcaagtaaagcacacagctgacttatatggcttctgagcctcaccgtttcctcatccaccgccgttttatcggcaaatatcgcggtttcggtaagcagtcgctgctcatcgacagatgcgtctgacagtagctcccttattctctgctccaatttatcacggtacgcctttactgtttcgggagattgcttttcaataaattcaaccttccccagtatcagctccgcgcggtaccgcacatccctttcaagctttatgccctctgcttcgcgcattgcaataaagctcttgagcgcctcatccgccgcgccgagaaccacttcggttacggtttcctccgccgcctgctgctttttcacattgaaaatatccgccgcgcccacaagagacgacagctttatatcattttcgattccgtaacgctccgaaagctttttcagcgctgcaaaatatgcgtcggcaaagggctcgtttatttcaataagcgtgctgtcagccccgttttcttcaaccgttaccgatatttcaagcttaccgcgcgaaattttgccgcggcaaaaacctttgagcggctcttcaaggtaggcagaacccctcggcagccgtgaagaaaattcaaaatatctgtgatttacggatttcagctccaccgtgacctcaagcccgctttcgcacagcttgcctcggccgaagccggtcatacttctgaccattgacattcacttccgttatatatattcatattattttatcaaaaaacaccgtgtaaagtcaacctctatatgattttgtaacctttttttaacctttcccgcttccgatacaccacgtatcggcggtgaattttttaattttattgttgcggttatacggaatttatgttatattaataatactaaataattcgggtgatcagatgaaattggtgatgagcatcgtttatgttgccgtattaggcgttcttgctcattatataggcgaatccctgcctcgcagccgtttcagtgaaacaggctttttttatcgcacccgcgactgggaaaacggcggcgcggtttacgaaagaatcggaatcaggaaatggaagacacgcctgccagatatgagccgcatcatgcgggatatgctgccgaagcgcgttacatacgacgccacaagcgaaagcctcaccgcgcttataagagaaacctgcgttgcggaattcattcattgctggctctgcgttttctctttcggcatctacctcatttggaaaaactatatcggaattattttaatgctcgtatttatattctgcaatattccgtttattcttattcagcggtataacagaccgcatcttataaagctgcgtgacagaatgttaaggagagaaataaagaaacaatgcgattgctgatattatcctgcaataccggcgaagggcataactccgccgccaaagcgataagagagtattttctttcgaataatgacgaatgcgatataaaggacgcgcttgccttttggtcccccggaaaatccaaacttataagcaaggggcatgttctgatgtacagaaaattcccgaagcttttcggcgtaagctaccgttttgaggaaaatcatcccccgaaggacggagatgaatcccttatttacgagcttgtgattaagggctgcaattcgctttatgaatttttgcagaccaaaaaatacgacgctgtggtctgtacccatgtcttctcggcaatgatgatgaccgagcttaaaaaaaggcgtaaaataaatatacgctcatatttcgtcgcaaccgattacacctgctcgccgggcgttaaccaaaccgctatggacgcatattttattccgcacaaaaagcttattaaggaatttgccgataacggtctgcctatgtcgcgcataatcccttcgggcattccggtacgacgcgatttttataataaaacagagccgcaaaaggcaaaacgcaccctttcgcttccgcaggataagcgcgttgcgcttttaatgtgcggcagcatgggttgcggccccattaaggatttagccgagcttttgccgcaacagctgcccgaggacgcgttgcttgtgatcatctgcggtaataatgtaaagctttaccgctcgcttacaaaatattccctgcccgaaaatgtgcgggtaatcggctttacaagccgcatgccgctttatatggatgctgcagagctgattttaacaaagccggggggactgagcaccaccgaagcggcggtcaaggggctgcccatgatatttattgacgccgttcccggctgcgaaacgcggaatatagaattcttcatttccaacggctgtgcggatatgcgcgagggagccattaagctgtgcgatgcggtttgcgattatctcgaaatcccgtcaaagctccacaaaatgtcgcaaacgcttaaggacgaattttccggctgtgctgccgaaatcatcagagaacatattgttaaggatgcagactgtgtatatggtagactatagaaaattacgaccgggcaatttaaattccccggaattcaagcacctgcttttgctgctttactggccgatttacggcgcggtattttggctgctcgagcgtgggctttcactcaactatcacgccgtggaggcggaccttgacgcaaaaattccgttttgtgaattttttgtttttccgtattatttttggtttgtctttttggtggggatacatctttacaccttgttttttgacattcccgcctttaaaaagctgatgtattttatcattataacctacacaattaccaccgttatatatattttttaccccacaaagcaggaactgcgcccgaccgaatttgttcgggataatttctgcgtggatattgttaaggcactgtataattttgatacaaatacaaatgtctgcccttcgctgcatgttataggctcgtttgcggtttatttcaccaccctttactgcaagcccctgcgaactcccctgtggcagaccgtccttattattttaacggtgcttataagcatttccaccgtctttttaaagcagcattccgtaattgatataatagcggctttggcggtatgcaccgcagccttcccatttgcgtatattctgcccgaccgcattaaaaaacgcaagcccgccgaggaaaccgcctgaccggagaaaataatggattttataaatttaagaaaagaagttataaaaaaatattttacacatatgaacgatatgcagttcgaggcggtcacaaccgttaacggcccgcttttgatacttgcgggcgcgggcagcggaaaaaccaccgtgcttgtcaaccgaattgcaaatctcgtaaaattcggggacggatacagaagcacctactgtcccaccgttaccgaggatgatattaaagcgggcgaggactatttaaacggcgttacggattttgttccgaacggcgttttttcggtgcgacaggttcgcccgtggcagattttagccatcacctttacaaacaaggcagcgggtgagctaaaggagcgaatagccgcgcgcttgggtgaagacgcaagcgatatatgggcgggcacctttcactcggtctgcggcagaattttaaggcgctatgccgaaagcataggctatacctcgcattttaccatatacgataccgacgaccagcgccgccttatgaagcagatcctgaaggcgcacgaaattgacgaaaagcttttaccgcacaagcgcgtgctttcgattatatccgacgcaaaggaaaagcttatatctcccgtcgaattaaaggaacaggcagggaacgatccgcgccttaaaaccgtagccgagctttacagaatataccaaaagcggcttacagaagccgacgccatggattttgacgatatgatattcaacaccgtgcggcttttgcagaccgatagtgatgcgctcagctactgcacgggcaaattccgctatgttatggtggatgaataccaggatacaaaccacgcgcagtatgagcttgtaaggctattgtcctcgggtgaaaacaatatctgtgttgtgggagacgatgaccagagcatttaccgtttccgcggcgctactattgaaaacatactgaattttgaggatgaatacgggaatgcccgcgtaatccgccttgagcagaactaccgctccacctcaaatatattagatgccgcaaacgcggttataaaaaataaccgcggcagaaagggcaagaccctttggacagataacggcacaggcgaaaaaataagcgtattcacagcagatgacgaacgcggagaagcaagatacatagccgaccgtattcttgaaaatgtgaaaaacggcgccaaattttccgatcatgctgtgctttacagaatgaacgcgcaatcgggttctgttgaaaatgtttttgcccgcagcggcattgcctaccgcgttataggcggtctgcgtttctttgaccgtaaggaaattaaggatgtaattgcctatttgcagcttataaacaataataacgacgatttacgcctgcgcagaattataaacgagccgaagcgcggaataggcgagacgaccatgtcaaacgccgcgcagatagcggcagaactcggcatatctctttttgaggttataaaacgggcggatgaattcgccgccttgtcccgcgccgcggtgcggctacgcagcttttgcgatattattgacgagctcaccgaaatgtcggcggatatttcggtatcggagctgcttgccgagattcttgaaaaaacagggtaccgccaatatttgaccgaaagcggcgaagaacccgaaaagcaggaggaacggctgcaaaacgtggcggagtttgcctctacaatagcccagtatgagcaggacgcgcaagagccgagcctttcggatttccttgagcagaccgcgcttgtaagcgatatcgattcgcttgatgagtcggaagaccgcgtagtgcttatgactatacattccgcaaagggtcttgaatttaacaatgttttccttataggtatggaggaaggcattttccccggcaatcagtcgatttattcgggagcagaggaaatggaggaggagcgccgccttgcatatgttgcgattacccgcgcaaagaagacccttaccgtcacaaacgcctatatgcgtatgcttttcggttctaccaaccgcaatatgccatcccgctttttaaaggagattcccgaggagctttgcagctttgagggatacaggcattcgtccgtaaaaccgtcctacgataccgtacacaaatcatatttggataaaagcccctattccccgccctctcccgcacccaaatccgacgctgtgaaatatgcggcgggacagcgtgtaagccacaaggcattcggcgagggactgatactttccgtaaagcccatgggcggcgatacgctgcttgaggtggcatttaacactgtgggcacaaaaaaacttatggcggcatatgctaaattaacagttttgtaatcaaatcttcattttcaggcggtatattataaataatgtgtactgaataattgcattagcaaatgcaattatataaaatcgagttaaaatctcgattttatgggtcaaaacctttgttttgaccgtcagtttccattaattgttcagcaggcattaaataagaagggtgtgttgattaccatgacagcgtcaagctcggtcgttaagctgaccgcacggacggcacttaaaaacaattggctaaaagcaattgccgcctgtatgtcggtcatctccgtatttataataatttccggcatagcgtcgctcgtaagctttgtaggcggcgatattgccgcgtatatctgcgaggctgttctcggctttttgctgcttttgccgctttgccacgggctcataagatttttttggcgcctgctcttcggagcggacgacagcccgctctcggtattttactttttctcgggcaaggcagaatatctccgcgcaatgcatattataaccgcgctctgcctgcggctggtgttcttcggtataattctttatatccccgcacttatagtcgatatattcggcggagtcaaaatttacgatctgcttgatattccgataccgctttggacttcaaacctttattatctctcgcttttcttaaaaatcgttgcgacggtgctgcttttctttgttatgctgcggtattacgcagctccaatcctctcggttgccgatgaggatatggatgccgccgaggcggtgcatatgtcctcggtgatatataaaagaactatgcttgattttatatatttgtttttcagcttcttaggctggctcctgctttccctcaccgtaataccgattatttttgccatgccgtatttcatagcttcggtttgcgttcatacgcgattcgccgttgcggaatacaattcgtttgaagagcttaaaaggaattccgatatcccgaaatatgtaaccggcgcataaaaaaccttgggcgagaatgccgctcgcttgaaaaccacggcgttaccgccgcaaatacaaattttaggtttatcaaaagactgaaattcccctgcaaaaatagctgcaggggaatcttttatactcttaatttttcaagctcggaaagcatcatatcgtgtattttatcgcccaactccacggtgtgcatatccttataatcctcatacggaataacctcaagcacattgagctttatttcggttcgacgccaaaaaagctctttgggtattgagcgggtattatttatcacgcagaccgcaataggcgcctcggcgcggtaagccaccttgaaagcgccgtttctgaaaggcagcagctcacaggttttgcttgtgtacccctcggggaaaagccctaccgacaccttgcccgattttaaaaggcgcgacgcctcaataatagttttagccgccgcacggtcgttttcgcggtcgataggcaggcaataaagcctgtgcattgcctttgctataaatggcatatccttataaatatcctttttgcctataaagccgatttcagcgctcggaaatgcggaaagcagaattacgggatctaaatcgtgctggtgattgcagacaaagagcattcgtgcgccctcgggcaccttttccgtaccctcggttttaacggttacccttgcaagctttaaaagcattggtattgttatgttcgcaagcaccctgaacgcctttgtgccgcgcggcggcttattaacattcgctgtagcaatccaaatacaggtaacaataaggtgcagaataacaaacccgaaaaagaaggcgataaacagcaccggcaccagccaccacgagtagggctgccgcaaaatctcaaaaaaattattaagtacaggtataagcgccgcgcttaatactaagtataaataaaacatattgccgctcctaattctgttttcttacgattttatattcgtcataaaaatcataatacggacaattataggtctgtgaggttaaaaaacgctgcatttcgtcctcatccagctccatatcacagtacatttcgtcgctctcgggatcgtaaacataattagcgcagctttcacacgccgtctttttcattgcctttttccgtcacctttaatttcaattcgcttatgcggtcaaatatcgctttataacgcccgtttttaagattcgggaacgccttgaaaattcgcctttgaacaaaatttctttcaagcattgccgaaagctcttttttcttcttttcatattctgcctttaattcttcaagccgaggcttgttttcctcggctaaggcctctcccttttctttagcggctattgtggtatcgcttatgttctcgccgattttgtccgacaccgcgcgcagcgccctttccgcctccgccatagctttaagctttttaggcagctttacaagagcggtgagcgttacagtaaagtcggcaataaacgctgccgaaaataccgcaagcaatataacacccaaaacaaacggcgttttttcaataagcatataaataaagcgatgtatcgcgcctattataaacgatgccgccaagccccacagaatagtgaatttaaggcagacatagccctttatattaaaaggcatatccgaataatcccaccatttatcgtggaaaaacctttcaagcacaaagcctgttacaaattccagcgcggtggtaagcaaagcggagcccaaaaacagcagcagcggtctgtcccgaagattccaaagacaaagcaccactataagcatgcccacgccgtaaatggggcagacaggtccgtttaaaaagccgcggtttacaaatttacccttattaactgcggcaaacgcaacctctgagcaccagcccaaaaatgcgtaaataataaatatccataccgcctgatatatattctgaggcatctatattccccctattccgttttatccggtgaagagctctcgtcaggctttgagtcctccgacggtgtaacggcgctcgaatcggaggagctgtccggattatccggcacggacggctccgagcttgaattactcccgtcagacggcagagacgatgaagaatcggtatccgatgacggctcgggcacggtaatcgtattatccgaagaggcagacgacgaattctgcgatgagcttgacgatggattttttacggttgatgaattggaagacggccttttgaccgaagagcctgtgtaccagtcgtttttctcaacgccgttggcttcaatataatcctcgggctttatatcgtcataaataaatgcgtgaataagctttgaggcatagtttagatcgtaataaacgcacgaacccacgccgcgtatgcttttagacggcatctgatacgaaaaatcgggtattcgtgtctgctcaaaggtgggcgactgcaaaagtatattaaccgcaaggcttaaaatttcggaataggaaagtgatgtctcactgcagggcataagcgattttgcaagctttacatactggcttttgccgagctttattgccttattgaaaagctgctccataacatagcgctggcggtcggttctgccgtagtcatcgttagtaccctcaatattggcggcgtggcgaattctcgcgtatgccactgcctgaacaccgttgaggtgctgcacgcctgccgttctgatgtaatatttatttgcgtccagccccttgtgctcacatatttcggaaatgcacccgttaagaccgtagtttactctgtgtccgttttcatggccgataacatcaagctcaccctttgcaagctctacatcgattccgccgacagcctcaattatatccgacataccgtagaagtttaccgttgcatactcggaaatatcaagcttaaatatggtattgagcgttttaatggcaagctcgggccctccctttgaataggcgctgttgatcttcgcatacgttgttttgccgttataggttataggcaccagcgtatccctcattacagacataagcttgacctttttggtttcggtattaaggctcaatatcattatactgtccgaaagtcctttaaatgatttcgggtcgcgggtatcaatgccgaaaagcgcaatattaactattttatcgtttataacgctttcaaagcccaaatcctcgggttttttcgtaatattattatagttgtagttaaacactatccgcagagcacccacggcaatagccacaaccaaaacaagcgaggtgacggttatcatagaaacccgctgccactttttacagccgcgccaccatttggtaaaggcgttgccgcgctttttctttgcatagtgctttccgcgcattttactgctgcttacaatgtcctcgtattccttcgcatttcctgccgaagaggaaaaaatatcttcacttccgaaatcaaaaaaatccttgttttcttccatatccacacctgattatatcaattctttgtaaatttcgctttttctgtattttgaaacctcggcagcctcttttgcggcggctgaggttgattttccgtcttttataagcctttttgccaaattgaccgcgtcctcaaaggaataaccagcggtctcctcttccttttttccctcaattattaaaacgaattcaccgcgcggcgtgttttcaccgtaatactccgccgcttttgacagggtcgtattcataaccgtttcgtgaatttttgtaagctcccgcacaagggatatcttcctatcccccaaataagctgacatgtcgcggagcgtagcaggtaatttatgcggcgcctcgtaaaaaatcatagtccgtttttcgtcttttatctcctccaaatgctttttacggcttattttattcaccgataaaaagccctcaaagcaaaatctgccgctttccatacctgatattgcaagggcggttataagcgcgctcggccccggtacggactcgaccgttatgccgttttcatgcgcctgccgcactagatcctcgccggggtcggatattgcgggcatgcccgcgtcggataccagcgcgcagctttctccctttaaaatacgctcaattataagatttccttttgtgcttttgttatgctcatagtaagagagcatttcctttttaatttcaaaatgattaagcagcttcagcgtaacgcgcgtgtcctctgcggcgataaaatccgcctgccccagtattcgcacggcgcgcgggctgaaatcctccaaattgcctatcggcgtaccgacaacataaagttttccgctcattattataagtacgcctccttatacggtccgtaaattcttatcatttcgggcgagtattcgccgttttcgtaaacatacagcgtgggctctatgcgaagccccgtgtttccgcactttcgcgcctctgtaagcaccagccacggttcctcgcccacttctttgcagacaagccgcaggcgcttcggttctaatttattcgctcgcattaccgtaattatttcggcaagcctttcgggacgctggcacatacaaagcctgcccgaggtctgcagcagccttgcagataccgaaattatatcgcttaaggtacaggcgacctcatgccgcgccgcagcagttacgccgtcggggtttttaagtcccgcgcccggcgctttatagggcgggttgcaggtgataagcgtgtggcacccgaactccaccctaccctttaaatcgttaaggtcggcgtttagggcggtaaacctgtaggcgccgttttcttcggcggtttttgcggcaagacctattgcctcggcgctgatatcaacccccacggcggtttttaaattaccgtcgcgcagcattaaaaacggaattattccgcatcccgtgccgagatctataagcctgtccgcctttttagcattagcaaaatcggcaagcaaaaccgcgtccgtgccgaaggtatggtgctttgatacgtttatgaaaaagccgtttccgagcggctctttttttattatgctctcgtccatttaacgccctgcggtgtgtcctcaagcacaatgcccatcgcctttaatttatcgcgtatttcatcggcggttttaaagtccttagcctttcttgctgccgtgcgctgctctattaaagcctcaatgtcgctgtcaagcgcctcggttttacggttgtaaacaagtcccaaaacgcccgttaattggtcgaacatatcagcgcaggcttccagcgccgttttgcccgctccctcggctataagagtattgatatcgcgcacaagcataaatatcgcagcaagcgcgtcggcggtattaaggtcgtcgtccatagcggcaataaattcctgcttgcgcttctctatgaattcgggcgcttcgccgccgtccgccgcatttttcagcgcaaaatcaatattatcgcggcaggtgtaaagcctttcaagcgagtttttagcctgctctattacctcatatgaatagtttattgggcttctgtactggcaggataccatcatatagcgtatcggctcatagccgtatttttcggcgacatcgcgcacggtaaagaaattgccgagcgactttgacattttgtggttatccacatttataaagccgttgtgcatccagtagtgcgcaaattcgcagccgtttgcagcctctgactgcgcaatttcgttttcgtgatgcgggaaaataagatcaagcccgccgcagtgaatatcaattgtcttaccgagatagcggcacgccatagccgagcactcaatgtgccagccgggtctgcccttaccccaaggtgaatcccaatagggctcgccgggtttggcgcccttccacaggcagaaatccatgggatcctccttaatctcggtaacatctattctcgcacccgcctcaaggtcttcaagcggctggtgtgaaagcttgccgtagcccgaaaaccttttagcgcggtagtaaacgtccccgcccgactgatacgcataacccttttccacaagcgccgaaataatgctctgtatctgctcgatattttcggtagcgcgcggattaaccgtcgcgtgctttacattaagcccatcggcgtcagtccaaaattcctttatatagcgctcggcaatttcgggcacggtggagccttcctcgttcgcgcgctttataagcttatcgtcaatatcggtaaaattctgaacaaagcttaccttataacctctccactcaaaatagcggcgtaaaacgtcaaaaacgcaaagcgggcgcgcgttgcctatgtgaatgtagttataaaccgtaggtccgcaggcgtaaattttaacctcaccctcggttaccggcttaaattcatccttttcccttgtaatggtgttaaatatcctcattggtttcctctcccggtatattatctgttttcaagcgaatgaaggtaatctatacatatcttcgcctcggtaataccgtcggggttacaggtttcgctttcaaccaccatatgaatattgtttttaaccgtataatcgtaaaccgccgcaaccggtgcctcgccctttccgagcggtgtgccgtgaccgtccgacgagccgtccttaatatgtatgcaggcaagcctgtcgcctaccctgtcaagcagggctatcgggttcttcatacccacaaatgcccagtaggtatccacttcaagctttaaatcagtgcggtaaaggagctgatcgtatataagcgagccgtccgcattcgggataaattcgcgcgcatggttatggtaggaaagcgttatgccgtccgctgccaaacgctttgaaatttcagatgctttctttacaaaaccgtccaatttttcctgcgagcctaaatcatatcccggaataatataaagcttattgcctatcgccttatgaaaagccacggtttcttcataattatttacaaggtcgtcaaaccccgaatgtgtgcttgatacacgtaagttattctcacgcagcatttcgtttacttcatccgcgctgtgcccgaaaaagcccgcaaattcaactgatgaataaccgagttctgctacgcgttttaccgccgccgaaagatccttttccgctaaatcgcgcacactgtaaagctgtatgccgtaatccatttttatcacctttttatattttatttttcttcaagagccttttcaagctctgaaatgcgtttttcaagacattccatcttctgcttaaccgggtcgggaatgtgaatctggtcaaggcttgcgcagcctacctttttgccgtcctggcggactattcttgccggcacgcccacaacagtacagttcggcggcacctcttcaagcacgaccgcgcccgcagcaacgcgggaattatcgcctatcttaaagggtcccaacaccttagctcccgcgcttatcataacgttgttccccacggttgggtggcgcttgccggtatcctttcccgtgccgccgagcgtcacaccctggtaaatcagcacatcgtctcctatttcggcggtttcgcctattactatgccggttccgtggtctataaccagtcttctgcctattttagcgcccgggtgaatttcaatgccggtttttctaaccgcccgctgcgatacatagcgcgctaagaaaagccacccgtgggtgtagtaaaaatgtgccctgcggtacattcttattgccttaacgcccgggtaaagcagtaaaatttccaaaaagctgcgcgcggcggggtcacgctccttaaccgcacggacatcctctcttattctgtcaaacaaacgaaagccccctatttagtaggatcgatatactctttgctgtcaagcagatatatgatacccgatataatacataatacggcggatatccagaaaagaatactgataattatatcgcacccggtaacaaatgccgcgttgccggcgtgaaaatcgattataagcgcatatgctgccagcgcaaatattataccgaccatctgacttaccgttttgcacttgccccatatattcgccgctattaccttgccgccgcttgataccacaactaatcggagcgaggaaattaaaaattccctgaataaaactataaaggcaatccaggtgacctgccagcctatatccattttaataaagcccaaaaacgccgcggtagtcagcattttatcggcaagcgggtctaaaaatttgccgaaatcggttatcatattgtatttgcgcgccattttgccgtctatcatatcggttaaagatgcggcgataaacaaaataagcgccacggtgtagtggtatggaaaatcaatcataagcgccgccataaaaaacggtgttgctattattctgccaattgtcagcttattcggtgtgttcattcttcaagctcccccaacaaatcgtaatcaagcgtatcgtttactcttacccttacaaactcgcctataacaagcgggcgcgtggacataaagaatattttgccgtcaacctctggtgcgtcggcgggtgttctgccgaaatagcactttatataatcatcccagccctcaatcagcacctcggtgaccgtgccgaccttttcctcgtttttctcggcggcaacagtaagctgcatttccataatgttttccattctgtcctgctttgtctgctcgtctatctggtcggggaaggcagccgccacggtatcctcctcggcagagtaggtaaagcagccaagcctgtcaaaccgcttttccttaacgaattgcgcaagctcgcagaactgctcgtcggtctccccgggaaagcccgttataagcgtggtgcgcagcgtaacgcccggcacttttgtccttattttatcaataagcgccgaaaggcttgcgtaatcgccctttcggttcattcgccttaaaatatcgccgtttacatgctgcaggggtatatcgaaatattttacaagcttttcttcccgcgccaccgtttcaagcaattcatcggttattctgtcggggtaggtgtaaagggttcttatccagtgcaagccttctattttgcaaagctcgctcaaaagctctgccaacataggtctgccgtaaatatcctcgccgtaggcggtagtgtcctgtgccaccactgtaagctcctttaccccgcccgcagccaatttttcagcctctttaacgcagtcctcaatagtgcggctgcgcattctgccccttattttcggtatcgcgcagtaggtgcagcagttatcgcacccatcgcctattttaagatatgtgctgaacggatagccgcccaaaattctgtcactgttcaggttgagctcgtatttatctgcaaaaacattttccttgcttccgttcagtgcgtcggtcactattttggctatatcgccgtccgcacctatgcctacgcaaacgtcaacctcgggtatttcctcggtaacgtcgtttttatagcgctctgcaaggcagccggttacgataagcgccttgcacttacctgtctttttatactccgcagcctctaaaatattttcaatagcctcttttttcgcgtcctcgataaagccgcaggtgttaataattatcgcgtccgcctctgcctcgggtacacctatttcaaagcctgccgttttaagggttgccagcatcatttccgcgtcaacctgatttttcgggcatccgagcgataccatactgattttatacattgccacactattcctcgctgtattcaagctcttcgctgtatttttttagcacgcttctcaccgcagaaaaggaaaaaccctttcttataagcgcggcgtaaaccttttccgccccgttttcaagctccagctttcgggcgtatttcttctctataagggcgcgtatctgcgcctcctcgtcggtttcggtctccgagacgatttcctttgccatatcgtaggaaatacccttttcgtaaagctttcgcaccgtctcgcgtggggatatgttcgcgtccttacacctttcggcaaagttttccgcaaagcggcggtcgtcaagcagaccgacctctgcaaacctcgccaccaccgcggcggaggcttttttatcgaaccccgcctcacagagctttttgtataagcccttttcggtgcggtccgcacggtccaaataccacagcgcgcgggattttgccctgcggtattccgaatcgtatatcagctccctgagtctttcctcggtaatttccgttcccggctttaggcaaaaatccgagcaggtttcgttatcgagcaagacttctctgccatctgacagtataagcgccgtgaggtgctttttttgctttttaaaagcctcaataagcatcagtcttcaaccgctatatcgatatccacgcttttgtgcgggcgaatactttcgggcgccacaggctcgattcccggctcgtcgtcatcctcgccggctccggtaatttcggcacccgctttaactgcctcaaatatcttatcctcaatttcctgcgccatttccttattttccgaaagcagcttcttaacattgtctctgccctgaccgagccttgtctcaccgtagtagaaccatgcgccggatttcttcaaaacatcggtttcaacgcctacgtccacaagctcgcccacatgggaaattcccgtgccgtacatgatatcgaattccgccgttttaaaggggggagccaccttgtttttaactattttaaccctggtgcggttgcctataacctcgctgccgtcctttatcggctcgcccttgcgcacatcgatgcgcacgctcgaatagaacttaagcgcgcggccgccggttgttacctcgggattgccgtaggtcacgccgatcttctcgcgcagctggtttataaatattgccgcacaatcggtttttgaaagcgcgcctgtcagcttgcgcagcgcctgcgacataaggcgtgccaactgaccgacatgggaatcgcccatttcgccctcaatttccgccttggtaacgagcgccgcaaccgagtcgataactataatgtcaatagcgcccgaacgcacaagtgcctcggcaatttcaagcgcctgctcgcccgaatcgggctgagataccaaaagactgtcaatatcaacgcccagctttttggcgtataccggatcgagcgcgtgctcaacatctataaatgcgg

SEQ ID NO: 3142 - DNA, 8678 bp, Unknown
  16S sequences of unknown bacteria
cctgccgcagctcgtccgccgtgaagtcctccgtccgcacgacgttcgggaatcttgacgcgagcccctcgttcacggcgaacagcctgtccatctgatcctcgtacccggcgatgacgacggcaaactgtcccttgtatacctcgagatcgttcacaagctgcccaaccgcctcttcgccgtgaccggacatcgcgagcgtgtacgcctcgtcgatgaagagggttccaccgagagaatcgagtatcaggtggtttgtcttctcagcggttccgccgacatattcggatatgagatcccgccccgtgacggcgcataaccgcgtcgacggcagaagcccgcactcatagcacagcctgccgtaaagcctcgcggcggtcgtctttccggttcccttcggaccgaccaggcacatattcatcgcgaaatccggaatattcgccggtcttctggcgttaatgagccgacaggaatccataccgccgatataagctgaactccccggcgcgctccttccgagagcggtcattccgtccctcgcgcggtggaagaattccttgaaattctcaagaccgacaagcccgtcaagctcatcgaacacactccgcccgcaggaaaagagtgtctttaccgcgtcacaggtcagctttacgccgtttccgccgcgctcaagcacacgtctgatatcacgcagtcccatgcgccgcccgccgcatattccggaaatcagcgcggaaataccgtcaagcgacgagtaatcgaagcttacaggctccgggcggtgagacagatacatgagtaggttgcggatctccgccgcgttcggcgctccgatcgtcacgaccccggattcaccgcgcgcctccgagtccgagactatcccggcgagagttccgttcatgaaagagtaccacgccgccgagccgcgatctccgagatcaagcagttttccgcggtcgctgtccctgaagatatagaccgctatcgagcgttcctccggagagcggctgtcaagctcctgcaacgcctgaagcgcactgtcgggaaagctgttctggagcgcgtttatgttcgagaagacgaaagcgcagcgcaccccgcgctttttcatgatccggataagccgctcccacatctccccgacaccgccgcgcgccgagaattgcggacgcaggctcttcatctccacgagccgcagacgctcagatgtctcattgtccggtatcgcgatgtcacggatgaggcacgccgaccgccagtcatatgcggacagcccgcgcagcctgtcgaaaaagacgaccgcgtcaaagccttcatcccgcagacgccccgcgagcatcggaagtatatcggtgcaacgcagcgaatccgagcagaactcgtcgttcgtgtttccggttataatatagtgcgttctccgcgtgtcggaaaatacagtcgctgtcatcatctgcctccgcggtcactgtccgccgttccgctcagtctgtccgcgctgctgtccgggtctatcaggcgcagggtttcactgtgatcccgctcttccgccgcgacgcagtcagaaagcatcttgtcaagccttgtgagagccttctcgatcaggtcggaattctccgtgatttcccgcagagccgcgtcgtcgagcttttccgacagctcgtccgagacggcgccgcttatctctttctcacgccgcattgcctcaaacggcttcgataccgcctcataccatgctttgtattccctcgcgcgggaggtcagagaagaaatatcggtatcaaccgcggtcacagtatcgtttttcaccgccatatcccccggcgcgagcccttcgcgctccgccatgcggagtatcgccgagagcagtttgtgtacgtaaaccggcagcgctgcgtcgtccgcgccggcgattctgtctgcgcagttctttatctccctggcgaacctgtgtctgtttctctcttccatcatgaatcactcctgaccgcggctccggcgcgaggtatcatcagcgtggcgcgcgagcttccgttttgcagcagtatattattgtcctcggagcagcacgcgaacacgaatccgcggacatattccggtacgtcaagcgtgaacagctccccgcccgcccttacgttcagaactcctccggcgcagtagaatccgttctccgtgttctcatccccggagtcagacagcctgatctcggtctcgtttccatccttatcgagaagaatgagaaaaatatcctcgttctctcgtccgcgagacgtatcggaaaaagccgcgcgccgtccggcaaggatcagatcacggagcgtccccggaattctctcaaagcgcctgtcaaagcaggcgagctcgtcgtcatacgcgagcgccgctctgagattttcctcaagccgtcccgcgtcgtctccgacaactattatacgcatagtgtcctcctcgtcgggagtgatactcatgacgagcctgtcggcgcactccttcatgtcgtcatacatgagttccgtatacgcgatcggtatacagccgcacggactttcatttttatgccgtacaagagctgcccgcataccaacggcgtcagcgatcagcataagcccgccgtacccgccggatatgatatcggctccgacagccgcggatacaagctcctcggcgccgcacgtcatgtgtttctttttcgttctctgcttcacggattcacctttacccattttgtccatgttcattgattcttccgacagtgaccgacgcctcgatcagaacctctggcggctcgccgtttccggtcaccagaagtactcccggggactcaacggtcaatatcctgagattcccgccatcctcatccgcgtccgccccattggtatccggcgccgaatgcagcgccgggtcaaaacgttcccccggctccggctcgatcactctcagccccgcgtcctccagagccccggcgaaacgttcgcgtatccgaccaagcttcgccgagaccgcgcgcatctcctccggagcgtccgcctcgagcactctctttccaagaaatgacgatataccggcgagatttacgaacacggcggcgagccgtccgtattcgtgcctgaaaaggctgacctgccactccctgagcgcgcttatcagctccgcgcggcagtcgttcagtgcgtttatcatcctgaactgcatatcgttcgtcagatccttcgccgctttgcggagatcaccagcctcgtcggcgcggctctcttccggcacgatactgcggcagcgctccgaaagttcgcggcgcagggtctcgttcttctccttcagctctccgacctcgcggcgcagagcgttaatttcctctgtgagccgtgtccgggagcgtttctcatcgttcagacggtcaagcacgtcctcaagctctgtctccgcgcactcaaggcgcatcgacagatcacagttctcgtttctgagcgtttcgttttcaactctcagcttgtctgtgttgtcagtcatacagcgcctccttaacaactgtaatcggtcctgaagctctcggtgagacaggtaccgctcctcagtctcgccctcaccgtgacaagtccgtcggctccgagcagcatggaaatccacgccgtctcgtccttcggtatcccgaaagcgacgcgtcggacctcggtgcagtcgcgcgtgtcgctgatatcggtcgtcgctctgtccgtcctgcgaaacacggttatcaccgtctgcgcagcgctgccggtcacggcaagctcaccgctcaccgccggaagccgcgtcccggcgccgaccatcgtcaggactccgagcctgccgccgcggtccggcgtgacggttattccgaagcagtgcccgagcctgcggcattttctcttttcggaggctatcagcgccgcgccgaaagcctcagcgccatcaggacgctccggaacgaacaccttcttcttcggaagaccgagagtcgagaggtacccgcacatacgcttcgtgaccgctccgagtagcattccgccgcccgtgagaattaccgcgtccgggctgtgtccggcgtcccgcgcctcctcaaagactgttccgatgacctcgagctgttcgtcgtatgtcatcaccgccttatccgtgaactcctcccgcattattgtgaccgggcagaccgaatagttgtgccttatcttcaccgtcgcggttctgtgactgttcagattcttcatgagcgaaacgcaggcgctgcgtatactcttcatcgatgtgtcggcggttatcccgtgcgcctcgtacagcttttccgagatgagcagaccggcgatggcgcgcagcttcccgcacccgtccgcgcactcacgcgacgacacaaccgtatacccgagatcaggtctgaccgccacggcagacacacggaacgccgaatcaccgaagtcgacgacaaggacagtttcctcactgccgcgcgtaaccccgctcgtcacaaagtggcacacggctgacgccgccgcgccgggcagcacacataaaacatcgattgtccatccgtttccgacgcgcgctccggcgtttctgacggtatccataagctttcccgcggtttccgggtctttttcgagtccgccgcggcaggtgagaacgacggtcgctgagcggtcagccatgtcagccgccgtcctcgcgtcgaaatcgtgtatcgtctcgcaaagcagtttctcggatatatcgtctgccgactttactgccgtttgcagggacaattccccgccggcacgaaagtcagccggcatcaccctcactctctcctcaccgtcatccccgcgcgcggcgatgcccgccgtcgccgttccgatgtcaatacctatataaagcatcagtgttcctcgcgctccttgtcatcatacatcccgactccgcgggtgtttatctcgggcggcagcgagatcactccggaaacgctccggttaacatcgtcgtgcagccacgcctcaagcctgccgagtcccatcccgtcgactccgaaaagatagtgtatctttgtcccgcgcggcatctctccgccgaaaccgagctcgagctcaagcctcgactcccagtcgcgctcaggcactgtgtcgtccgggtcctctgtcgtcgcctcgaaaagctttatgcgtatacggtcggagtcttcgttcaggctgcacgttctgacctcgtccgcggcgcacggtatcacggtaccgcggcgtatcagacgatggatgtacagatatcccggctctccgggcttcttcgtctcgtcgcagtactcgattccgatgtccgctctcgtgcgcttcagcactgtcagcggtctgtctgccgggtcgccggacaacgtctcgtcggcgtttatttccatcgccgcgtatctcgccgttccgtagcagaccgacagctccggttcaaagacggcaaacctgtcggcgtactccggcagagccgccctcagagtctcaccgatcatcggcatcttcgacgccccgccgcagagaaccacgtgctccgggataaaatccgggttgcgcctcagcagcgccgacgccctctcgccgatacgtgatagcagatcacgcgactccgcctcaaactccgcgcgggtcacgtttatctcgagaaactcgccgccgtgcatcaggtcgctgacatccgcggactccgaaaccgaaagtctccgcttaacgtcctcggtcatcctgcaaagcatcgtgcgctcggcgttcgtcagctttccgcctgcggcgttctccgccttcgaaaggagcagtccggtcagtcggtccgaaaagtcgagaccgcctatgtccggtatcccgtcgcacgcgacgatatcgtaatatcggaccgcgccgccgctctccatcccgtccgggtacgccgtgagcagcgccatgtcgaacgtgcctccgccgacgtctatctcaagcaccttcgattccggcttcttctcccgcatactcgcgagaaagttcagcgccgctgccgccggctcgcatatcgtgcccctgaccctgaaatttgtcccgtcctcaagcgtcgccgaattaatgagtctgacgaatctcatgagcttcgcgagcccgaaatccgcgcccgccggatatgacaggaagatatccctcaccggtccgatgcccatataaccgagccgctcgttcacaccttgcaggaacgcctcagccgtcgccgtcaccgccgtgtcataccggaacgacgtatcattgacgagaaaaggctttccgtccgctccggctatcgcctcgcctatgtggctcttgagtctagccaccctcgcgaagccgttcttcggtctctccgcgtccgcaccgaagcgcatattcccgtgccggtcgaccgcgaagaaggacgagaccccatccgggtgctcactcggatcgagatttctgcactcgcccgatccgtccggtccggtccgtgtccggtcgatataagcggctttcagcttatagttgccgaaatcgagagatatcgcggtatccgtatgttccgtatgttccgtatgttccatatgatcccaaatgactcctttccgaccgccggaaactcggctgtatcacaaaaaaataacggaacggacatcagagcaccgggtctcatccgcacgttccgctaaaacgacgtctcacaatgataccgacgcttcaaaactttaaaacattccgcaaagcatgattttgtaccatacttttccagtatattataacactcaggcaatgttctgtcaagatgccgcgtgaaatttcgtcataaaatacatttttgtcccacatttatgtcaatttgtcacagttaacgcgaacttttttgccgcttcgaatatgatgttccctgactattgacttaagaaagaatatatggtaaaatattagcatacagctcgcggcatctcatacacaaaaaaggaaggcagggatctcatgtacgacttccgcacaacacgcatatattattcagacctgtcggtgcagctcggggactacacggcgacgctcgactacgccggctgtgacgagccgtgggcatggaacacggtcaggcactcacacacgaactatgaactgcacataatatcccgcggcaaaggcactcttgtcacagacgaaggaaagttcgagataaacggcgggacgatatatatgaccggtccgggagtctaccacagtcagtattccggcgacgacgacccgatggacgagtgcgcgctgagattcaaccttgagccgcgccctcagcagtcgtccgaccgggagctgacggctctgataaaaaagctcgtcgacgagccgttcttcttcaggcgcggcggcggagactgccgggagcttatcggtgaaatgatgcgcgaggcggggacgaggcttcccgggttccgcgaaaagacttccgggtactttgtcagtctgctgataaatctcggcagatacacggcgggggtcggtgacgagccgatgccggagaaccgcacgatcaaggtcggaaagatcgacctgcgcgccatgctcgacacatacttcttcggtcttgtcgacttcgcgacgccggagcggataatcgacgaccttcatatcacccgccgccacctgtcaaggctgatgagacagtactacggtatgtcatacgtcgacaagataaacgagctccgctgtgagcacgcgaaagagctcctgcgcgacaatgtcgtcccgatatccggcgtctggtccgcggtcggctacacgtcacagcagtatttcagccgcgtgttcaagaaacatgtcgggatgacgtcgtccgagtaccgcgcgaagttcgcgaagaaacaatgattttgccaaagaaaaggagaccgccgcgtatggcaatctcccttttttattcttcgttttcgagtatcagtctctcaagctccttcgcggcgacgctgagcgtctggtcgcggcgcttcagcagacatatgtcgcgcgtggggagcgcgtcctcgaggtctataacattgacgcccgtcgctccggcaagaaactctctcggcacaaagcctatcccgaggtcagcctcgaccatcggcagtatctgatccgccgtcgccgcctcgatctccggcgcaaatctgaaccccttctcctcgaagaactcgctgtaaagctcgtatgtctttgtctccgccccgagcgagatcagcggcagagacgctatctcaccgagcggcacgcgccttccgacaagctccgggaacccggcgccgcagacggcgacctcgttcagccgcctgaccttcttctctatgagcgaggcgacatccatagtcggcgtcgtgacgaccgcaatgtccgcgaaaccgttcttcagagcctcgatcgcctgcggggtagagtggtttccgatacgcaggcgtatcttcgggtacagggcgcggtattttctcagcacgggcagaagatgacagcgcagagccgtctcgctcgccgcgaccgacacggaaccggtctcgagattcttcgctgagatgatctccgactcgcccgcctcgatatgtccgaccgcggcgcttatatgcgcgtaaagcttttccccctccggcgtcagccgcattccctgactgctcctgaaaaagagcgggcagccgagctcggactcaagcgtctttatcgtccgcgtcaggttcggct

SEQ ID NO: 3143 - DNA, 16760 bp, Unknown
  16S sequences of unknown bacteria
ccgaccttccgggtatgaaccggacgctctagccaactaagctacaccgccacaccagttagatttaagcaattttgcttttaatcactgcaagaaatatgttaccattttcaagccgctatgtcaacaacttttttaatctgcaagcatattttcttacatcaagctgtcgaagcgacagcttgattatcttaccaaaacagacctcaaatgtcaatagttttatgacaaatttcttactgttttttaattaattattcttcttactccgagaattgtcctgtaggttgccgaacctgttgtaattcctgttctcggggagcttgcatgtattatcatgccgccgcctgcatacagagctacatggttaggatatatgattaaatctcccggctgcgcctcgctgtatgaaacagccttgccgcagttaagctgcgcatatgagttgtgcggaagtgaatatccgaaatgcgcatatacagacattgtgaaacctgaacagtcagtaccattggtaaggcttgctccgccgtatacatacggatttccgataaactgtcttgcatagtcaactactgcgcttcctcttgtctttgttcctttatatacgaccgcatcaacaggctctttgactgtttctgatgaaagcacttctttatctacagtttctccgttttcttttgttacaaccgcagtaaccagttttttaccctgcttaccctcttttttaaccttggtttcacctatataaagcttgcttgatttaacatatttagtatcgtagtcaatctttttggtatatgttatttcttcaacgctgtttactgtaacaagcggttttgcttcataaagattaataacatcaccctcgtgaagatcttcaaggtcgactgatttgttccagtcctcaatgtcggtaaccgaaatattattgtcatcggcaatctcccatgctgtatcgccgttttttatttcataagtgaccttttcttcaactcctgtcattatatagtcaagggtttcctccatatcgtcaacaacgggagttttcattcctcttttgagctctgtaggctgagctgttatttcttctttaacctccaccttttttacatctgaatcatcggtcagataataattggttatatcgtctataagctggttggcttcttcttccgaagccgccatacaaactgtttctccgtctattgtcacatcccatggctcttctacaacatcaccgtcagcagttatggcataaggctgtgtaacgttgagtgccaccaaagtgcccgctgcaattaccattgcgcccagtgcaactccgatacctatttttatctttttctttctgttcatattttcgtttttaaagaaatttttaatgtccataagtcattgttctcctttacacaaatacaattgtatccataattgtggcaaaagtcaatgaaagtacggatatttcactcaattttcacataaaaagacgaagtttcaatgcttcgcctatatattaatactatatatcggggcatataccatatttatttaatgcggctccaatcttcaaaatgcttatcaagtccgcctttacgatttctaacaccgtaaaatccggtatgaaacagcggataaacagtactatgtacgtcaccattgatatatgtatatactttttttgaatctacgagacttccataatttttatatcttggaacttttccaaacagcatctttaacgttgcatttgcggttttctgccccagacacaaaatcttttccggtttgattatttctatcagtttttttatataaggcgcatcctggttcataacacgaccggtcattcctccggattggctgcctgttctatagcccaaagaaaaattacagaaaaacaaatctgaatatctttttttgtctatctgcggatatcctattgacttaaaaagctcaaccagatttttatcagtcgttacttctctcaaagtcaagtcacaattatcaaggtactgtgtatccgtaataccctgattcagcttccttatatttttaacagtttccatattataattatatggattgccccagtcctgacccagcagcaatatctttatttcaggctcatcttttgcatactgccagccctgccagtatgtccagaggttaatctcctgacataaatctttttcggtttcgctttcgcaccacttcaattcaatcttagaattttttcttggattgttcaaataatcatcacgcacatcttttattaaattagtatattgaactgctttttctgccatacagcattccaccatcaatcctatgtatgtttatactgcaagtgcattcaatgcctttgcagttttcacctttctatattttaagactatatatcggggtatacacagtcctcccgtttataacctccgactgcatcagctctattgatttgacggtcatgctctcatcaaacagcccgtcacagtagtattcctcatcaaaatcctcataaagcacgcagcttcgcgccagtgtgatatggggcttaaacggcttctcatctaccggtatatcaagatatgcaagctgccttacaatactcctctgcagcacattgagttcctccgactttgccagtcctctccagtacagatactctccgcctcttcttcctttaaatctgccgaaatcccccagcaatatttcaaaaggaccgtactcaaaattagatactgcataaatcatagcgtcctttaccgtctgtaaatttcttttgtcaagctcccctatgaaggcaagggtaaggtgcagattatctataagggagaagttgcccctctttgcttcgtctttgagatcctctatgttgttttcgagttcttctttaatatcgtcgttaaaatttatggctataaataatctcatcagtctgttatctccttataatatagaataaagcctgcacctcgtttaaaagtgcaggctgtgatatcgttaacagcaaccgctgcagcagccgccacagccgttttcgcctccgcctccgcagctgccgccggctccgccgcagccaccgtcagcaaagtcatattcaagagttccgtttacaaactctgaaataaccttgtcggcatctcccttaactcctgggaagtacattattccggcagcagcaagcatctctgccgctgtatcaccgatattgccgcagataactatctctacgccgtttttccacagaacgtccactgctcccgcatgaccgtttgcggagtcgttgtctataacctccgaacctattacctcaagtccctttaatctgtaaatcttgaactgaggcgcgtgtccgaagtgctcacaaacctgaccgttttcgtaaggaactgcaattttgcctactccgtcctcatatgccggaccgtcctctgccggtgccgcgcaaggggctgcgcagtcctcgcatactccgtcgcaaggctcaacctcaacaccgtcaagactctccagcatatcaactacaggtcttaaagcctcaacatccgcaagttccatcatacctctgtcgcaggctgccgcaaccttaggatttataggaagctttgctatggtttcaacgccgtatttaaccgatacggcttcaatattgcttatgccgaatattgcgtgctgcttgccgcagtcagggcattcatagtatgacatattctcaaccattgcaagaataggcacgttcatcatatcagccattttggctgccttttcgactatcattgataccatatcctgaggtgttgtaacaactatgataccgtcaacaggaagtgactggaacactgtaagcgccacatctcccgttcccggaggcatatcgacaaacataaagtcaacatcgccccatacaacatcagtccagaactgcttgacagcgccgccgattaccggacctctccataccaccgggtcgctgtcgttttcaagcaacaggtttattgacattgtcttgattcctgtcttggttgcaacagggattataccctcatcatcagcctgcgcttttgctgttatgccaaaagttctcggaattgaagggcctgtaatgtcagcgtccattacggctacttcgtaaccctcacgattcatcgcaactgcaagcatcgccgtaaccgaggatttacctactcctcccttgccgcttactacacctattacctttttaacatgtgttgattcaagcggtttctccatgaaatcagttctttcttcgcagttactgccgcagctttcgcagttatgtgtacaatctgccatattatcctcctctataataacattatgatgttttgtttctaaaaaaaatatactgtccggaatgtcggactatgttgtagtatatcacttttttaattacttttccactattgcttttaacatattcgagagttataatatttttgttatgaataaattaaaaattatattatcagttgcagtatgcaaactgtcaagaaacttaatacgcctgatgggcagaggcggtaccgatatgccgggcagactggcactcaaattctgtcctgatcttttaaaatatcttgcaaaagacgtcacgactctgattgttaccggaaccaatggcaaaaccacaagttcaagaatgcttgagcaatgccttgtaaacaacggttgctcatatatagccaacaaatccggggcaaatcttctcagtggtattactgcggagtttgccgcaaacgcaagccttacaggcaaaatgagctgtgattatgctcttatcgaagctgacgaggccgcatttaaaatggtggggctttatacaaatcccaagtatgtgctcgtcacaaatgtattcagagatcagcttgaccgctacggcgagataactcacactcttaataatataaggattggacttgagcgttcaccggaggcaacagtatgtattaacggcgactgctccctttcggcatcactcaaagacgatatcccgaacaaagttattttctttggtgtaaacgtacctatatataaagaaatggttgcagaggtatcagatgctccgtactgcatcagatgcaagacggaatataaatacgaatacagaacctatggtcacctgggagggtattactgtccgaaatgcggctatagaagacctgagccgtctgttgcggttaccgaaatcatttctaccgacgaaacatcttcaaaggttgtaatgaacgttgcgggaagagatatgacagtcgatatcaatcttccgggaggctacaatatatataacgcggcaggagttatgactatagcaaccgctgcgggattttctcctgagtcggcagtatccgcgctttcggatttcgagtgcggcttcggcagaatggaaaagttcgagatgaacggaagcgatgttcagatgatactcatcaaaaaccctgcgggctgcaatcaggtgcttaacttccttgcaaaccttgatacaccgtcagctttcactgtatgtcttaacgacaattatgcagacggtacggatatatcgtggatatgggacgttaattttgagggacttttggagtgcgatgatatgcttaccgatatatttatatccggcaagcgcgcagacgatatggctctcaggtttaaatatgcgggctttaatacggacaagcttcatgtaatcaaggattatgacagactcattgatgcgatagagcagcaggaacacccttgctatataatgccgacatatactgcaatgcttgatttaagagaaaaaataagcaaaagatacggtcttaaagactactggaaataaggagattaaatggaacttaaaatatgccacctgtatcccgacattctcaatctttacggagatcagggcaatataatatgtatgaaaaagcgtcttgagtggcgcaatatagagtgcagtgtcacagaagtatccataggtgaaagcgctaaattcactgattttgatatattctttatcggcggcggacaggactttgagcaggagatactgcttggggatcttgcaggcggcaaggcagatgagattaaagcggcggttgcagacggcaagacattcctcactatctgcggcggatatcagatgctgggcagctactacaagacatgggacggtcagatgtgcgatttcatcggcgctatagattactataccgtcggcgcaaaggacagaatgatcggcaattttatgtataaatgcggcgctgaaagcggcggcagcactgttgtcggttttgaaaatcacagcggcaagacctttttaggttccggagtttcacctcttggaaccatactttcaggctatggcaacaacggagaggacaagacagagggtatcagatataacaatgttttcgggacctacagtcacggtcctgtacttccaaaaaaccctcagcttacagatttcatattaaaaaccgcactcagccagaaatacacaagctttgattttgagccgcttgatgacacttttgaaaacaatgcaaatgagtatatgattaagaggctgtcaaaatagccgcacctgttatcattgacaggcagcgtgcatatattgtataatataactgaacagagaaacggctatgtatttgttcaagtcaataaaaaaccctgaagctgctttttcagggtttttgtttaggctagttgtctttcttcgtatgactgtctagccatttgcacagcaaatatgctatcacctgtgccgcaacaatcacagctatagtgaatatgtaatccataccattccccctttctattgtctgtgtaggggtgacaacacaatcatcataccacatcttcacttttaagacacatattcagactatacgttctttagttgtcaaaataaaatacaaatctcaacacaaaaaccggacaagaaaatccagctctctggtttcttatccggcatagcagttacgactgaaatccctccgaatacaacacattatattcctgaaattgtatgagtcaactattttacagcggcaaatccgttctcaagatctgcaataatatcatcaatatgctctgtgcctattgaaagtctgatagtgttaggcttaattccctggtctgcaagctcctctgcactgagctgtgaatgagttgttgttgcagggtgaataacaaggctcttcacatctgccacatttgcaagcagtgagaaaatcttaagattatcaataaacttatgagcttcctcctgtccgcccttaatctcaaatgtgaaaattgatgctccaccgttagggaaatatctgttataaagctcatgatccgggtggtccggaagtgatgggtgattaacatgctcaacctgcggatgctctgacagatattttactacctttgcagtattttcaacgtgacggtcaagtctcagtgacagtgtttccacgccctgaagcagcaggaatgcgttaaacggtgaaatagtagcgcctgtgtcacgaagcagtatcgctctgatatatgtaacaaacgctgccggacctgccgcatcaacaaatgaaacgccgtgatagcttgggtttgcatctgctattgcaggataattgcctgattttttccagtcaaatttgcctgagtcaactataattccgccgagtgtagtaccgtgtcctcctatgaacttggtcgccgaatgtaccacgatatccgcaccatgctctataggtctgataagataaggtgtaccgaaagtattgtcaacaaccagcggcagattatgtttgtgcgcaatttcagccactgcatcaatatcaggaatgtcactgtttgggttacccagtgtttcaagatatatagcgcgtgtatcatcctgtattgcattttcgatttcttcaggattgtgtgcgtctacaaaggttgctgtaattccgtagcccggaagtgtatgagccagcagattgtatgtaccgccgtaaattgtcttctgggcaacgatatgtccgccgcctgctgtaagagcctgaattgtatatgtgattgccgcagctcccgaagcaagtgcaagtgccgcaacaccgccctctaaagctgcaattcttttttctaaaacgtcctgtgttgagtttgtaagacggccgtatatattgcctgcgtctgcaagtccgaaacgtgcggcagcatgcgctgaattcttaaatacatatgatgtagtctgataaataggtactgctcttgcatctgttgccggatccggctgttcctgtcctacgtgtaactgtaatgtttcaaatttatattcactcatttttctgtcctcttttctttctgtattattcatcttaaattcaattttgtgtttcatcgaatctgagcgaaaaaaaaaccgggttttatccttaactcccgggcagatggcattacagctcatatccgaagcgtgatatcaggcacaatgcagctcaaagtacctggccatacagcaagcccgggagaaaaacattcgacagcaacacatgacaagattaaaaatactgtttgcatattttctcattgcattggcctcctttcttaaaaatcactgctcaaattctatgaccctataatacagccttttacccaccttgtcaataggtaaataaatattttttcatttttttgtttgaaacaaacaaaaaagcacgtaccgacagctttcgatatatgcttcttcaacatatttgtcctaatattcaacatcaagcccgaatacttctctgatttttcggctttcatcctctttgttttcaaaggtgcaaagggactccggtatcccctcatgctctgcaaaaaactcacgctctctcaccgcaaaaaactctccgtctatatactgtgacacctttgcggttttgttaaatttggaaccctcgtaatgtatcgccatatagagagcctgtatatagtcaaggtcgatattggggttctcggtaaagcccagtttttttctccattcggttcccggtctctgctgccacagcacccagccgaagaaatcatctttttccagcttgtagtcgcatactccgtcattttgcacaaggctgtttttaagcctcagcggtatcctgtgatgctcatagtttacgcccacatctgttatgtatgaaacgccgtctatattaacactgattactctgtgacctgtcgtctgcaccggatttgccctggctataatccgcgaattgtagcttacggtatcataacccagactctcaaggagccagttatacaaggtatttatttcggagcacactccgccccgcttgtttaatattatcttttcaaacagatgctctctgtcaagggatatctccctgcctgccagtatgtcaaggttctcatacggtatatgatttacattggcagactgcagctttgtcagatactctaaatctgcgtcagcgtttttatctgtttcaattctctcaagatactgtgaaatctgcacctctgtcatttttggaccgttcagttctctgtatattcttctgtccattacagctcctcctcttcacgtttttctcttttcttatgtataaggcctttaaattcatctgcctgtgtaatcagaaatgccgcaaacatcagaatgcagcctgcaagttctctgcccgacatagcctcctgcagtacaagcgccccgaatattgcagaaaacaccgcctcaagactcattataatggcggcaacggaagcctgaacatatttctgtcccactatctgcagagtaaaggctgcgcttacttcaagtatcgcagtataaagtatcggtatgctgcaatccaaaaccgatcctaaatctatggtttcaaacggtaccgcaactatccccgacaggattcccgccagcagaaactgcaggcatgagagtttaacgggatctgtcctctctgcaaagtagtctatcagaagtatctgaaacgaatatgcaaacgcgcaccctataacaaggctgtcacccatgcttattgaaaatccgtcggttatacacagcagataaagtcctgtgcctgcaacggcaacacctccccagacggcagggcttaccttctgttttaaaaatatgagaaatataggcactataactatatcaagagaggttataaagcctgcctttcctgcggttgtatatactattcccatctgctgaagcgatcctgcagcaaagtttgcaagtccgcacaggatgctgccttttaacagtactctgtccttaaagccggtaatgctctcgtttcttttctttttgatcctgtcaccgatatatattacaggcagcagcgccagcgctcctattgtaaacctgaaaaaaccgaatgtaagcggacctataaaatccatgcccattttctgaaatacaaaagcggagccccatatcagcgccgcaagaaaaagacacagttcaccttttacttttgtcataaaaacctccatacatatgcttcatatattttaccatttaacagctgtaatttccatcattaactgtaataaacatgatttttctgatataattaattatcacattaatcaggagattataaatgactgctgaagtttcacttgcaaaatgcacaagctataatgataaagaggttgaagccgcattaagaaaagcaattagtgccgtaacagaccttagctatataacagagggcaccagagtggttataaagcccaatctggtatcgtttctgtcaccggacagagcggcaaccacccaccctgtcgtgcttaacgctctcatcagaatacttaacgaaaagggcgcgaagataactgtaggcgacagtcccggagggctttttaattccgtctatgtaaacagagtgtacaaggccacaggtatgaataatatcgagggcgctgtgcttaacagaaacttttcccagtcggtgcatcattcagacagcgctctgcgcgccagagagtttgcctatacctcatatcttgacgatgccgatgtcataatcaatctgtgcaagctcaaaacccacggtatgatgggaatgtccaatgcagtgaagaatatgttcggtataattcccggtacagtcaagccggagtttcattttaaatttccggatcataatgattttgccgatatgcttatcgacctgaacgaaagcttcagacctgccctttgcatatgcgatgccgtaacaggaatggagggcaacggtcccacatccggcactccgagagatatagggcttattgccgcatcagaaaacccgtataagctggatcttgtatgtgcgaaaattattgggcttgaaaaggataatgtacctactctcaaacgcgcctttgagcgaggacttgctccgtcagatgccgggcaggttgtaacagagggtgatataaatgattttatcatcggtgattttgagctgatacctcgcaaaagtatcacctttaacgatgcaggcggcagtattatggcaggcataatcagaaaatgcatgtgctcaagacccgcgcttttaaagcacaaatgcatcggctgcggggaatgtttcagaatatgccccgcagcagcaatacaaatgaaaaacaatctgccggttatagacagaagcaagtgcatatactgtttctgctgtcaggagttctgtcccaaaggagctatggaggtaaaacgtccgataatagcaaggatgctgggtaaatagattacagggaggcagattatcctccctgctttgttatttcagccgatagcctccaaacacctttttacctgtaacaattcccaaaacggctgtgacagctgcaaccactgccgcaggcacaaggtttggctgctccagtgacatgggcgcaagaaacagcacatcaaacaccggcattgtcacaatggctctgtaaagtccgctcatttcctctatcggaataagcataggcagtacaaatacaaagagtgagcttgcaagcgctgaaatctgattcctgaaaactgccgatgccgcaactgtaattcctgtcaccgctaccgtacctgcaagcaccattgcaagctgatacaaaatcatctgcatacacgttatattataaggcacaagcccgccttcaaaatcagcagacgaaaacaatacgctgcaatcaagcccctccgtaccgtaaattacaagggcggcggcaatattaaatactgcggtgacaagtgccagcgcaaacgatatcacaaaggctgcaataattctggctgatgcatttttactctttccgtatctgcttgacataactatactgctcatactgccgtaatctcctgaaaatacaggagaaattatcagcattatcacaatcataagagcaaaaaacacctgtatcatacccttgactgtataattccagccgtttatgtaccctattttaattctgttgctgccgtatatctcctttactgttttcccgttatagtttccgtccttatccacaaaattactgtagactgccgactgcattgaattgctatatgcatattttgcgtcaagtccctcaggaaagtttctcaccggaaaatcattaattatctgctgcactttcttatccgtcagaagtccctcgtatttggaggaaatctctttctctattttcacagcctcaagtccccgactctcctccgatacgccgtcataggcatacattccgttaagcgatgccgcagccgatacaatgctccatataagcagcagcgccagcgctgcaagcgatattttctttgttatcattttccttatttcatatttaatcattgttcccatattatctgcctccaaaatagtataaatatacgtcctcaagctcaggctgcacgctcactgccgctattgcaggcttagcccctgataccagccttatcctcactctgccagagtccatactccttacagaacagattgtgcagcttttttcatagttctgtatttcatcttcgcctgcctcaagctcccatacagctcctgtaagccttcctgtaatgctttcgggcgctcccgtatcaagcagtctgccgtctttcataatgattatattatctgcaatatgctcaatatcagacacgatatgagtagacagtattatgattttttctcttgaaagagagcttataatatttctgaaccttgctctttccttagggtcaagtcctgcggtgggctcatcaagtatcagtatatccgggtcgttaatcattgcctgagcaatacctatgcgccgcctcatgccgcctgaaaatgtccttattttcctgtgtatttcatccgacattcccacgctttcaagcagataatcaagcctgtcatctatagagaccccttttaaagccgctatatattctaaaaactcctgcgccgtaaaatccggatatccttcaaaattctgaggcagaaaccccagatgccgcctgtattcctctcccatatccgctatgtcagcgccgttaagctgtatttccccgctttccggctttaccagcatacaaatcaggttcatcagcgttgtcttgcctgcgccgtttgctcccagcagtccgtacaccccgtttgtcagcgtcagagataaactgtctactgcttttttgcccttgtactctttggtgatttccaaaatattaatttccatatgtattcctttccgggagataaaaaaagcaaaaatgtacgaaatttaaatttctattttcacatatcgcacgcaaggtgcgataacattcaatgtgctttctttgaaacatacggaaatatctacaagtcgatatttcctatgttataaaaaactctccctgttttcttttcaggaagagtttaatctctcaatatctacttttaatctattttagcaattttaaatacagcttttacagccgcgcctctgctgccgtttgaaatttcaagataccccttgtgtttctcacaaagtacagaggatacataaagacccagtccgaaatgctcgcttcgctcctcgctttccgtataatacgggagctttgcgtttttaaggcactctgccgaaaatccgcctccgtcatcactgacacagatgcttaataaatccccttttacatctgctcttacatctattcgtttatctgcataggaagctgcattggaaagaatattattatacacctgcattaccgcagactcgtccatatatattttttcgcagtccgccgaaaaatcaaaggtcccggctttatccccgcacaaaagactcatagtttcctccagaatatctcccagcctgtatgcttcatattctgacggtttaacagcgatttcctctattctgctgaggctgctcatactgttagcatatttttcaagccttgatatattggaaagcatggcagccgccacagcttccgtactgtctgcatctgcttccgcaagcatttccccgtagccccgaagcacagtaagcggcgttctcagttcatgcgcaaatacggcatttatccgttttctttcttcaatctgcctccacagcttcagattgttttcctgcaaggtctttcgcattgtttcaaaggagccgcagagtcttcccatttcatcatttctctcatagctgacagtaaaatcaaggtcattctgcgctatcttttgagcggcattatcaagcagatataacggctttttgagtctgcttctgtaaaagcaggcaaccgccgcaataatgcaggccgcggaatacacaggtaccgccgcctgcggcaaagcatcaagcagctttatgagctttgtatccctttcactcatcacggccgcattctctgatatatatgtacccttaccaagccggtttccgttttcgtcggtaagataatatttcctgccgtcataaggatatgagtcctgtatatgctctatcgagctccggcatatatatgatgtaacaatgctcagcagcaccgcagccagcacaaagacaataatatggcatatcagactttttctgagcgatatattttttactttttccatcggtagccgcacccccacacagtttctatatattccgtatccgtatactcctgcattctgtttcgtattctgcgtatatgctcggtcaccacaccgctgtcaccctcgctgtcatagccccatattctctcatatatgcgctctctgtcaaatatctgcccgcggttttgagacagcagcgccactatatcaaattcctttcgcggcagctttattacattatctcccgctgctatgcttctctcggaataatctatgataaggtcgtctgaaaatcttatttttgaaccggttctcgccctgctttccctccttatatgagcagagactcttgcctcaagctccgcaggcgaaaagggcttgaccacatagtcatctccgccggctgcaaagccgtttatcttgtcggcctcatctactcttgccgtaagaaaaattatagggcaggacacgatatttctgatgcgtctgcacacatcaatgccgtcaggtcccggcatatttatatcaaggagtataatatccggctgcttttctatctgctcaaatacctcctgtccgcttccggcagtcataattctgtaccccctgcttctgaaaaacatcgaaagcatatccagtatgtctttttcatcgtcacatatcaaaatactgttcaaagtatcacctccccgtatattaagccgcataattatctactttttatcaacatcgtcaaaagccgcagggctgctgcgactttaatacggagatttgtttctgatttcctccgcttcatcttcagttatcttgtgacatctgaccattctttttaaaactaccgccattcttttttcggcaagttctatattatcatcgggcgaataatttgacggtgcgttgggaagtccggcaagcattacagcctcatagtcgtcaagctgcgcgggcgttttgccgaagtaccccatcgccgcatcataaatcccgtaatagccgctgccgaaatatatggagtttacatacatctcaaatatctgttttttgctatactgacgctctattgcaaatgctccgaatgcgtctgcaaatttacgctctatttttttgtcctgggtaaacagctcatttttagcaagctgctgcggtatggtgcttccgccctctacaaaagccctcgcaacaatatcgttaaatgcagctcttgctatagccagaggatctatgcccttgtgtctgaaaaaccttttgtcctccgccgctatcaccgcatctatataaatctgcggcaggctttcatattctgtgaaatgctcccttgaacatatatcctctgcaatactgcttatgggtgtctttgaaaccgcttctttgtacatctcatagcctttgtagccgtaaaataccgccgcaattatacagacaatgagagcaagagcaatcagtctgcatatgaattttttaagtcctctggcaagcatctgccctcacccctttcatctgtcattttaaatgtctatcttcttactatgctgtaatatgtttttgaagtctgcagatataccaacaggtaaatcactgcaaatcctataaatgtagctgctgtgcatactgcaaacagcgtaacgttggtcatactgaacgctgcaagtattctccttatcatagggaatgcaaacgccacgtgcattgacgctgaagccagaggaggaaagaatacaatca

SEQ ID NO: 3144 - DNA, 19697 bp, Unknown
  16S sequences of unknown bacteria
ctggcgccgccgcatccgtgggttccaaatcggaaagcacacattgcagcgtaaagcgcgtgccatattctcgcgcgccgaccaagcaatttctgcccatggaaacgcatcccgtggccagcgccaggggcttaagcggcagattgggcgcgtttatcgcgcggatgccctcagcctgcagcgcttccaccagcttttgcgcaatattgcgtccattttggtaggcgggataaaatgcgttcacgcttggctcgtcctcgcgccaggcaaacgtctgatagggcacgatgagcaagtgcacggctgtagcgcccgggagcaacgcatcgggatcgcccaccgtgcccggccaatgggcctccacagcctgcggcgcaagggaaaatgcctctgccgcccccaagttcagcgccaaattccagatatccattatgccttgcgcgcccgcacgcgagcgcttccatatacggtgtggcgcagagccgcctccattcccgccccattcgcttccagagaaatgtacatcgtgaatggcccgccaatgacatggaggcgaacgcgcggcgtggcccccggcaaacccgtgaccgccaattcaggcgcacgcatttcccatgcccgagcggtttcttccggcagccgcgtgaccacgggcgcgccccattcgtagggcacgcgcaataccgctccatggcgttgcaaaaggatttctttttccgtccagccaaagcgcgcaatgcccaacggattctcctccagcgcatactcgccccacggaacgttttctggcgccgcagcgggcgcaggatgcgccaattcccgggcgagccggataagcgaggcatacgcccgcacattctccggcaggctctgcgcatgcacgccaggcaaaaggaggttctccagatattgcagcggcacgccgatatccgagccgagcgcgctggtgaagaccaccacgagcttgcgctccaagtccatcacaatatactgcccgcccataccgtccgcgcggaacgcgccaaagcggcagcgccacatctgatagccatagcccgcgcaccagttgggatcgggattgccggtgttgttgtcgatctgctttgcgcgcgcctcgtggatatagtccgctgggatgatctgctccccttcccacgcgccttcgttggcgatcaaaagtccaaagcgcgccatatccacgggccgcacgctcagccccacaccgcccagggaaatgcccttcggacaggcgtcccaccgcgcgccctctatgccaatgcgcgaaaaaatccattcctgcgccaggtctaaggcgctgcgccccgtcaccttcgtcaaaatggcggaaagcatatacgtcgctcccgtattgtaaacaaagtgcgttccgggcgcgtattccaccggcaagttcaaaaatacctgcgcccaatcctcttgcccggattgcgacaaagcgccccaggtatccttggcatgccccgttcccatcatcaaaagatcgcggacggtcatggcgtcaagattcgcgctgggatgttccaccgccacctccggaaaaaacgagcgcaccgtatcctgaaggtttagaagctttttcccctgcgcaatgccgatgagcatggaggtgaacgtcttggagcaagaaaacatttcgtgctgcgcatcgcgcgcataaggcgcgaaatattgctcgtggacgagcacgccatcgcgcaacaccagcatggaatgcacgtccttttgctcccgcacaatggccgagagcactttctcaatggcctggctttcaatgcccatgctttcaggcgtcgcgcgcacaaaatcttccttcgggaaatgcatagcaaattctcctttctcgcactatctctagaataaggacgccagtggatagtatatcaatggcacgagcatggcgggaagcatattgcccacgcgaatgccgtccttcaccacgcccaacatgttcaatcccagcgcaagaatgagcacgctccccaccgccgacatttcgcggatgagttcttccgtgagatacggctcaatcgcgctggccaacagagcgatgccgccctggtacagtgtgagcggcacggcggccaggatgactcccgggccaaaggtggaagcgaagatcagggcgaatacgccgtccagcgcggattttgccagcagggtatccggcttgttcgaaagcccggcttccagcgatcccaccactgccatcgcgcccacgccaaacagcagcgtggcgttcacaaacccttccgagaaccggctgccgccatgggaaaaccgtttttgcgcccagtctcccagttgacccaatcgctcctcaattttcagggccgtgcccacgaccgtgcctaccaccatggaaacgatcacgagcagcgtgctctgcgtttccaacgcgccgctgatgccgatcatgatcacgcacagggcgagtccgttgttgatcgtgcgcgcataccgctctggaatggcggttttcatgatgctgcccagcgcaccgcccagcaccacaaccgcaaaattgacccaaacacccagcatagttattcctccgccaatcctgtgcgcatcgcgtgaaaaatgtattgctgcaccaatcccgcgtcttcgccaaaaatttgttgcgctttttcgcgcatctgttcgcgcgaaaggcccgccatgccaaaatgccgctccattgcgcgcgccatccatacatccacgggaaacgcccgcgtatgcgcgcagccaaacaacagtacgcagtccgccactttggggccgacgccgtgcaatgtcaaaagtttttcgcgcgcctgctcatattccatgcggcgaagcgcgtccagttcaaacccatccgccacgcgccgggccgtgtgctccaaaaattccgcgcgatatccgcaacccatttgccgcagcgtttcggctccggcgcgcgcgagcgcctccggcgtgggaaagccgcgcatgggttcgccatcgatttccctctgcgggcccagcgcgcataccttccacaccaattggcgaatgcgcacggcgttgttgttcgaagaaaggataaacgctaccagcgcttcccatacgggttggcgcaacacgcgcaggcctggcaatgcgtccatccagcgctgcaaggccggaaactgcgcatagcgccgcgcaatcgctccataatcgcgatcccaatcgaaatacgccccatcctccgggacttctccctctcgcacgaacatgggcttgcccgccacaatcgcggcatatccgtgcgcggttttgcgccaatgaaagcactgcgcgctatccatcagcgtaagttgtggatccagcttttgtttttccatcgtttttgtggcgcggcgccttcacgccgtcattcttcaaaaatggccccgcatgattttcatgcggggccacccaattgcttagcggttactccgcagcgatcttggtctgcggataaatgctcacctgcttgcgcgtcttgcccaggcgctcaaagcgaacgatgccgtccatctttgcgtacaaagtatcgtcatcgccaatgcccacattgtggccgggatgaatgcgcgtgccgcgctggcgcaccaaaatgttgcccgccagaacatactgtccatccgcgcgcttggtgcccaaacgctgcgcatggctatcgcgcccgttcttcgaggaacccattccttttttgtgcgcgaacaactgaagattcatttgaaacattcctataccctccattcccgcgtagtcagccgaacaaagccggggtactgtgcgcatatagacgaaagcgacaggcgcagcgtttccaacagcacgcgcgcgctttgcgcatgctctggcgctaccaccgccatcagccgccctgcgcggtcatcgcgctctattcgaaccggaagggaaagcacttcctgcataccaatcactgtcgcctgcgtgagggcggaaaccgccgcgcacacaatatcttctcccgcgtcagcatagcctgtgtgcccctgggcgtcaaagcccacgagaacgccttccgagtgaatgaacgctatcttcgtcatcgtttagccaacgatcttttcaatctgcaccttggtatagggctgacgatggccctgcttcttgcgctcgttcttcttggccttgtacttatagaccacgatcttcttgcccttgacctggtcgagcaccttgccttcaacaacagcgcccgcgaccagcggcgcgccgaccttcgtccccgcatcgccgctcacaagaagcaccgaatcaaacgagacagtatcccccgcctgacaatcgagcttttccaccaaaatgacgtcgccctgctggacgcggtactgcttgccaccagtttgaatgactgcgtacacgcgttgcacctcccatactttaaactcgccgggctacaggcagcttgcgcttttagcctgacccgagcggcataccgacttattataaccgatatatctttgttttgtcaatcgctaggagaggctttctaaatatttaacggcctcccgcaactgattgtcgttttccagatcgatctcgtagttcgcgggatcataattttcgtccagctcgacgatgatgtccggcgtgatgcccacttcgtgtacggcttccccgctggggcggaaatactgcatggtcgtgagctgcatgcccgcgccgttttcaaactggatcacatcctgcacaacgcccttgccaaaggtctgcgtgcccataaccgtcgcgcggtcataatcctgcaacgcgcccgccaaaatttccgtagcgctggcggacatgccattgaccaacaccaccatttccagatcgtagcagctttcctgcgaatcgtagtgctgggaattgccatagcgatcctctacgctcacaatcacgccctctggcaaaagcatatccgcgatttgcaccacgtggttgagatcgccgcccgtgttgtcgcgcacatccagcaccagtttggtcacgccgctcgccacaaaatcgtccagcgccgcgcgcgtacccgtaacgtcatcgccgaagaattcgctgatttccaggtatccaatcccattttccaaaatggcgtgccgcgtacggttggcttccacctgtgcgcgctgcacttccacatcgaaaacttcgccatcccgctcgatggtcagcaatacgggcgtttgcgtttccgccttaatcatggccgtcgccgcggtgaggtccgcggaagtatttacagacaacgccgttccatcgatggccacaatccggtcgccctcacgcaaatccgcgtcgcgcgccgggccgtcataaatgcgcaaaatggcgatgccgccttccccgtccatggtcacgagcacgccaatgccatagtattccccactggtctgctcgaacatggccgccatttcatccgcggaataatagaaagaatagggatccaacgaagaaaacgcgccgcggatggcgtcttccagcaacccatcttcttctacctcgacatagtaccgttcctcgatgatgcgcaaaacctcatcgagctgttcatacttttgcgccgaaaggccggcctgcgctgcgccgcccatagcgtaaatcgtgatcgcggaggaagccaccgcgaccacgacaaccatccaagcgatggcaaaaattgctaccgtgcgcctggacatatgcgcctagttccagctcttgcggccgtgaacgttgcggccgagcagcatcatcagtttgaaggtgacggcatcgtcaaaatcgcgcaggtcgaggccgatgttgcgctgcaccttatccaagcggtaaaccagcgtgttgcggtgaatatagagttggcgcgcggtttccgaaaggttcaggctgttttcaaagaactttttgatggtttggatcatctcttcattgaagaggcgcgccgtcgagcggttgaagaggagcgaattgtatttcttcgccatatcttcgggcacatcgcgcaggaaccgctcaatcagcagcttgcggaacacgaacacctgctgttcatcgcgatacaggcggccgacctcaatggccgtcttggcctccacaaagccatcgtgcaaatccgcaatgtgctgcttgggctcgccaatgccgatatacacgggagaattggtttcgctgatgaacgtattgagcgtggcctggcccatctgctccagttcgtcaaattcctcgtcttcgcccagcgctttcaccaacgcgatgctgtggcggcccacttccacaaacacatcctgctcgtcgctcgtgatgttggtcaaaatctccatggcgtctttggcttcgatttcctggaaatggaagtacattacgcagcgcgggcgctccacgggaatgttatattccgtggcgatgccttccagttccgtgccctcggcttcgccacgcagaatcatgcgcaccgcctgctcgcggccaaggtgcgccgcgtccgaagcgaccaccatgttgatcagttccgcgcagaccacaatgcaattttgcacatcctgcgagtcgccagccatgcaaagatacaggggctgcttatcgctggtgccaatgagggtgaagccgccgtacacgagcgggcgggtagggtcgcgcgtgagcatttcaggcagttgcaaatcgcgccggttgtccttgggcaaaatcacttgcccattggcatccagcaacatcacttgcgtttttagctgcccaaggatgcgttcgatccgcgccaaagaatggtgatccagatacatgagggttgcctccttcgtgaatgatctttacggcgttgcgcatagtttccacggcctgcggggaataaaatcaggcccatcatctttattgtgcattttatacaattataccccctgttctgccaaaacgcaagctcccgaaggtttttcttgcaaatttaatgcagactttatacccatgccatagtattcctcatacaggcattggcgccggccaaccaaattccctccgcaattttttcttaaggaaagtcttgacaggctccgcgcaaaaccctacactataatcagcgcttatcgtattgtccgtccaaccctacgagcggtttgccgctccgcaaaaggaggaacagcccatgtgcagccgttattggatcgccgcagacgatgacggcgaattggcgaaaatcatcgccgcgctcaaccgcaaaggcgcgccggaaaacgttaaaaccagcggggagatcttcccctccgacaccgtgccggtcgtggccaacaaccgccaactgaaagcccggccgtttgccatgcgctggggatattctttcccagacgggcatcccatcatcaacgcccgctccgaaacggcgcaaaccaagccgctctttcaggatggcatgcgccggcggcgctgcctgattcccgccaaatgctatttcgagtgggaacggcgcgataaagaacgcatcaaatacgcgattcgtcccgctcatgggcgcatcctctatttcgcgggaatttaccactgggagcagcatagcaaagccaccttccccacgtttgccattcttacgcagcaggccgcgccggaaatcgccttcatccacgagcgcatgcccgtcatcctgcccgcggaacgcctacgcgattggctgaacccgcgaaacgatgcgcgcgacatcttgcaagccgcgctgcgcgatatggaataccagcgcgtatgagaaacccctgctctttgctttgcgccagtccatcgcggactggcgtttccttttctcttccgcttatattttacttcttgcttatatttgagcgttcctcaatttgaagtacttgtatttttaatatctcatcgatataataccgctgccatgctgtttctggaaataaaggagagctgcgtttatgcgcaccatccaccacaacaaaaaacatcaggaaacgaggcgaattcgcattcatgaacagcgttatcctctatggcagccattacggtagcgcgcgccggtacgcgcaggcgctggccgaaagcacaggcattgtggcggttccctatacggacgcgcccaggctttccgacaagcacgccatcgtctacgtgggcgcgctgtacgcgggcggcgtgctgggcctgcgcaagacctttcggggctttgctcccaaagaaggccaaaccatcctcatcgccaccgtgggcctggccgatccaaccgacgcggaaaaccgcgccaacatccgcgcttcccttaagcggcaattgagcgcggaagtgctcgagcgcgcaaaaattttccacctgcggggcggtatcgattaccaaaagctctctttggggcatcgtgcagccatggccctgctgtatcaaaccgcgcgccgcgtgccggaagaaaaacagacggcggagaaccgtgcgctcatcgaaacctatggccaacgggtcgattttgaggatttgcgcgcgctggaacccattttgcaagcgattccgaggtgaaggacatgcgagccaaaatgggttgcttggcaaaacttttgctcaccggcctgatcaccacaatggtgcgcattgccggacaactttccctgcccgcgggcgagcaaacggtgctcgcccccagcgtctttgcccaaaacggcactatgccactcgtgttcaccatctatggcctcttcgcttacacgggcattgcggcgctgtttttgctcatccgtcgccgtatgggcggcagccgcctttcacaagggctaaaatatggtctttcctgctgtgcggtatgggtggtgtatttgtgggaaccccttccccacgtcgcaccgctggatcgaatcacctatccgctggccgacggcttggccctcatcgccatgggcctgtgcctgggatggctcttgggcattccaggccagaaagcctctcaaccgcgaggcagcattccctggattcccgcgctagccatagctggttgctttctggccgggcggctttttcaatattgcctgatcggcatctattcctcgtttgacgccaaaatcgtcgaaaccctgctatggtgccttataacgggattggccacgggcgggacaatggcctggctcaaccgctatgttggcgcaaatggccgcctccggcgcgcgttggcgcttggtggactgctatttggcgtagatctggcgctgttcaactttttcatgccgctggttttcaccgctgacattcccgacctgatcgcgcgcacgctgatcgacgtttgctgcgtaaccatcggttgcctcagtttcccagcgccagagtcgattctcgcataattaaggctgccagttttccatcgccgcgcggcgggcaatctccacggccttgccgagccgcgtgggatcgccatgcacggtggtaatgtcccggaaggtgatttccagcgggcaaccgcgcgcggcccgcgccgtcttggcgatctgcgcgcgcagggcttcttcgtcccattgtactgccgcgaaaccgttgggcgagggtttgcggtggtacacaatgcccttgccgcggatgtacccggcaatcgcctcctcatcgcaccagggcgaaaccgaaaccttgcgcaggttcggcagccgcgaaaggctcctttcccacagcggatgcaccggctcgcagcagccgaaagcaaacaggccgaagcgcgccgcgtaccgcgcgatgctggggaagaaaacctcgtcgaacatctgcggggaaatgcccacggtttcctgcgaattggcgtagccccaaccgtccgcaaagctggcctggcgcgcgcccacctccgccagctggcgcgaatagccataggaatcctgccccacgtaggaagcgtccgtattctgcgccaccaggccgcgcgcttcgatttctgaaaggaattcgagccaatcatccgtctgcatatccagcgccttggcgaaatgttccggcgcgtcgtacagcgccagcagcatgttttccatgcccatcagttccaccagcgccgtcgccggggcgtaagaaggcgcgggggtgcggtatttcacggtgaggatatcgccaaaagtctcgtttgccgccgcgaacagcgcctgtttgtgcgcgtactccttctcgatattccaagtggacttgcccaacaaatggaagtcctcttccaggtcggcaatgatgtgatgggaaaggtagcccatcgtcggcttgccgtgcgcgtccagcgcctgctttttctccaccggaatgccaaatggcgtgaacgaaaacgaaaggttcaccgaaaattccggctcgatcacgcgatcgtccttccaccccgcctccgtgagcagattgagaaaagcgccttccaactcccgcgccagcggatcttcgcacaccggctggggatacacgtcgctatacacgccgtggaatttcatcacgatcaggggtctgtccggctttccatcgttgagcgcgtaccagcttttgcgcagcccgtccatctgcggctgcgccgccagttcgcgcaccttttgcgcgagaccgcgcagcaaagttctttcctgtgcgttcatatggcctcctatccttccaggccgttcgcctgccgccgcatgttttcgagcaccacatcgtaaatgtcgcccagggacgcgcaatattccagcaccttccacggctcgttcgtgtggaagtgaatcttgatgcactcgtcgtcccctacggccagcaggcaatcgccttcgaaatgctccgcaatgtaatcgtggatcgcgtcttcggacaaatccttgccttcaatcaatagctgcgtatcaaatatatactccactctgttcgcctcccatgctagaaatagcgccaacttccaaaacgcacaaggcggttcgaaagctggcgttcattttttattcttcttttttggaaacttttgcgcagggcatgggcatgggcgctttcatccggcgggaaaacaggcgcaccgcgagaagccccaacgcgaggccaaccagcgcgcccagcgcctgcacgccttccgcgccccagcgcgcgccgagaaacagccccgcgagcatggcggccaacggcagcgcgtaagcgaggagcgcgccgcgcgacacggttccatcgggcacttccagctcgatggtttccccttcccggtattcgctcccctgcggcaattccaccagcacgcgctccacctggccaaaccggcaggcgcggcaggactggcaggcttcctcgcggagcacttccgccatcagcctgccgttttcccgcaccactttcgcttcccgcttcatgccattttccgcccgctattcctgttcgtcgtccgccacgcgaatgtgcagcatcttgagctgctcttcctgcacgtcggacggggtttgcatcatcaggcaattggcgttttgcgccttcgggaaggcgacgacttcgcgcaggttctcgctgccggtcaagatcatcaccagccggtcgacgccgaaggcaaacccgccgtgcggcggcgtgccatacttgaaggcctccagcaggaagccgaagcggtgcttcgcctcctcgggcgaaaggccaatcatatcgaacatgcgcgactgcatatcgctgcggtggatgcggatggaaccggaacccatctcgatgccgttgagcaccaggtcgtaggccttggcgcgcacctggtcgggcgcggtttccagcagttcctcgtcctcctccatccagctggtgaagggatggtgcatggccacgtagcgctcttcttcctcgctgtactcaaaaagcggaaattccgtgacccagaacaggtcgtagcggttgtggtcgatgagatcgcgctttttggcgatttccaggcgcaacgcgcccagcgcctgcagcgccacggcctttttgtccgccacgaagaagaggatgtcgcccggttcggcccccatgcgctcgcgcagcgcgttcaaaaggccctcatccaggaatttgttaaaggaagatttgtggccgccgtccgccgcgaaggaaacccaggccaatcccttggcacggtaggtctttacgaattcggccagcgcgtcgatctgcttgcgcgtcatatccgcgcaacccttggcgttgatgccgcgcacgcagccgccggaagccgccgcgtccgcgaacacggggaaagcgcagccttgggcgatatccgtggcgtccaccagcttcatgtcgaagcgcgtgtccggcttatcggagccataattttccatggcgtatttccaggtcatgcgcggcaggggcagggacaaatggatgccattcacggcctcgaacaccttggcgaacgcaccctcgatcacggtctgcacatcctcgggctgcacaaagctcatctccacgtccacctgcgtgaattccggctggcggtcggcgcggttgtcctcgtcgcggaagcagcgcgccacctgatagtacttatcaaagccagcgagcattagtagctgcttgtagatctgcggggactgcggcagcgcgtagaactggcccgcgcggccccggtagggcaccagaaaatcgcgcgcgccctcgggcgtggacttggtgaggatcggcgtttccacgtcgataaagccctgcgaatccatatagcggcggatggtggcggtgatttcgtgccgcaacttgagcttttggaacatggacggcttgcgcagatcgagatagcggtacttgagccgcaccgtctcgttttcctcggccttgtcgtcgatgtagatcggcggggtttcggagcggttgagcagctcggcttccttcaccaccacttcgatttcgcccgtggccatctgcgcgttcacggcttcgggcgcgcgctcgcgcacctcgcccaccgcggtcaccacgtattcgccgcgcagagatttgcccagcttgagcgtggcctcgtcgcacaccgtgtcgtcaaacaccaactgcaccataccctcgcggtcgcgcagccatacgaacaccacgccgcccagatcgcgcgtgcgctgcacccagccggaaagctgcaccgtttggcccgcgttcgccttcgtcagcgtcccgcaataatgcgtgcgcttatatccattcattgcctttctcctccaattcttccgaatttcccggccatttttcccagagcagcccgcctgcgataaaaaaatagccctcgccctccaaaggggcgaaagcctcagctccgcggtgccaccctgcttttttctccatcccctataacgcgaggacgcgccgcctgcgcggaagctcgggagtgtcgttcatccaagccgtgcatgggcgctctcagtcgcggcgcgccatccctgtgcgcacggggcaatggactactctttccctcatcgctcgtatctactgtgcattataccttttactggcaggcctgtcaagttaaaaccgcgcgcggcggcctgcgcccaaaatccccagccagaaaccgtattttagcgcagttaaacgcgtaacttaatccgaaggcgcttgatagaataaggtaaaagagtaaaatattgtcttaattttgtaaataccaaggtgagatccgtgcgaaaaaaggttctgctgctcctgacagcgctgctttgcctattgatcggagcaatcctattgatcaacgggcgtcatcgggaaatgaatggcggggcgaagggcctgttttgctgggaggccccgacaggggaaaaatgcgcagtggctttgggatctggcgcgccggtatgggatcggcgaattgtacgtcgccttccccgaacacccaagcgcgcaggaagaatttttgcgtgccgcgcaagaggaaggcctggcggtctattggctcacgggagatccctcctgggcgatggaaccggagggaagcgaaatgctgcggcaggttgagcaggcgggagcgctgcacacggcccattcggaaacgctgcgcggcattgttttcgatgtggaaccctatctgctcgacgaatgggacgaggatgcggatgcgctgatgcgcagctttgccagcgccgcccaatgcgcctatgaacgcgcgcagcaactggggctggaaatgatcctctgcgtgccctattattacgataccaccggccacgccggcgcgctggaaacgctcatttcctccgcctgcgaccgcgtggcggtgatgaactattaccgggaggacgaagccgggcacatcgaaacggaggccgcctatgcgcaggcgtatggcaagggactgatccacatctacgagctccagccgcccggagagcacggcttacaggcgatcaatacgtattatggcctgggcgcggacgcgctgcggcagagtttccgcgcgctgcggcgagcctatccccagttggcgctggacatggctttgcacgacgcggaggcccttgcggaggtgatggacaatgaatgaagtgctgcgccaggaaaagaaattcctcatttccctggaacaatactaccgctacagccaccatctcgccgccgcgttgcacatggacgcgcacagccgcggcgaaggctacctcattcgctccctgtacttcgacaccctggacgacaaggactttgaggacaaagaggacggcgtggaactgcgccgcaaaatccgcctgcgcaattacggcgcggacaacgatttcgccgtgctggaaatgaagcaaaaacagggcgcgatgcagaaaaagcgttccctgcgcctgaaccgcgacgaggcgcggcggctcacgcgcggcgattacgcccctctgcttgcccacaaagaacccttcgccgccgagtgttttgccctgatgaacgcgcagtgctatcggcccaaggcggtgatcacctaccatcgcaaggcgtttgtggccaaagaaaacaagatccgcatcaccttcgaccaccacatcaccggctcggagagttgtttcgacattttttcgccctcactggtggaaaaccccattctggacccctgcctggtggtgctggaagtgaagttcaacggctttctcctgggatacatcaaggacatgctggaagaatgcaacgccagtgaactttccgtgagcaaatactgcttggggcgggccgtaagcaagcactaccggttttaatttcaatatatttcaaaacaaaggatgcgaaaaaacatgaaagaactcctgctaaacatcatggagcaaagcggctcgctgagcgtggaagaaatcgtgctgcacatcgccgtttcggcgctgttgagcctggccattttcctttcctatcgctacacgcacagcggcacggcctacagccgcaagtttaacgtctctttggtgacgctcaccatcctcacggccacggtgatgaccgtcatcggcaacaacatcgccctttccctgggcatggtgggcgcgctgtccatcgtgcgtttccgcacggccatcaaggattcccgcgatacgacctatattttctgggccatcatcgtaggcatctgctgcggcgtgggcgattatttggtggcaggcgtgggcagcggcgtggttttcctcgtgctgctgcttttgggccgcgtgcgcaatgaaaaccgcatattgctcatcatccgcgctgggcgcagcaatgaaacgcccatcgagagccttgtcttccagcacttcaacaaaaaggcgctgttgaaagtgaagaacaccacgccggacgcggtggagctgatctttgaaatgccccgcagcgcctacaacctcaattacaagcgcgatgagagcatcaccgacaagctctaccgcctccccggcgtagaatatgtgaacatcgtcacccagagcgacgagatcatcgggtaaggccatgaagagcaaatgtatctatgccgccaccgcgctgtgcatggtagcggtgtgtgtcgccctgcagttctcggggctgggcgccagatccgtgcgcgtacaccagcacttaagcggcgcttggcaaggggcggaatccatgcgcgaggacgaatcgcccctgcacacccacctgccaatcttgcaaatcgataccggcggccaggccgtgcccggcgcgccggggcccgatggcgtgatcgccgatgattcgcgcattcgcgtttccttttcgctgacggacgggcagacgggcgacaattccccgctggatccgcccaccgtttccacccatgccgacatccgctaccggggcaattcctcccgctttttcgataaaaaatcctattccatccatctggtcgatgaaaatggcgccgaagatccccaggcgctggcgggcatggccgcgcacgacgaatgggcgctgaacggcccctttctcgaccgcacgctgctgcgcaactacctgtgcctgaacatcgccggggaaatcatggaatacgcgcccaacgtgcgctattgcgaattgtatctcaacggtgagtatcagggcttgtacctgctgatggaaaccgtcagcaaatgctcatgtgccataaagtaacacataagaattgatagacagcagcccactattccgcagcaacagcgagttgcttgttaaaaccccgttttgaagttataatgagtgaaaacaacctttaggagggacgggcatggaaatacaaggtattcttaaaaatttacgcgagaaaaacaaccttacgcaagaacaactggctgaacgtgtgcaagttacccgacaggcggttagtcgctgggaaacaggcgaaacacaaccaaatacagataccttaaaactgttatcacgagtttttgatgtgtcaatcaatacgcttctgggttctccacggcaacttgtttgtcagtgttgcggaatgccattgaatgaagatggtctgattagccgagaaccagacggaagctataacgaggactattgtaaatggtgctatgctaatggggaatttgcatatcaatccaaggaatctttgttggattatctggttacgaatatgccaaatcccgataacgcagatgaagaaaccagacgtaatcagtttgatttgtacctttcgcaattaaagcactggaaataactatattgtcatagcaaagccagccgagccagtcaacggtcaagatgaacggcgcgtaccgcgccgccgttgacagccccgcccgcctttgctggtaggcaatcaaggggcgacagcaaggagtgctgccgccccgcactattatcagagagggggaatttccatgaccgaagatgaagcctacaaagtgcatatccagtacacctttaacgccttttgcaaggttgtcattcgtcacgccgccatagatataattttgaagctgcgccggaggtgggaacgggaagtttcccttgactatctgatgaatgagaagtttgtccagcttgccgagccggagcagcttgaagaatatctttttaccgcctgcggccagaccgccgttctgtaccatgcggaacttgccgccgcccttgccctcttgccggagcagacacaggaagagattttccgttactatttcctgcgccagccgcagcgagtgatcggcgtacatattggccggacacgcagcacagcggggcggcatatccagcttgccttgaagcggctccggcggctcatggagggaaaacgctatgagtaaacttctcccctatgaaacaatcgtcaaagcccatgagggcgacccggacgcaatcgacaccgttctttcccactacgccggatatatccgctactgttccaaagtacacgggaaagtcaacgccgaggttgaggaatatgtgaagcagaagctaattgctgcactgttcaagtttcgatttgaccgataagcaaaggacgaacaccggcttccattagcgattttccccagcaagtttacaattcatctattcccaaaggtagctggtcatagtataatgaagccaacgacaaaaaggaattttacagcgaggtgaaaaaggttgaactatgttgaatatgggaaaggaaatagtaatgtaattatcctcttacatggaggtggtttgtcatggtggaattacaaagaaattgctgaaatgctacaaacaaattatcatataattatacctatattagacggtcatgcaggaagtgataaacgatttacaacgatagaaaataacgctttagagattatagaatttataaatgataaactggatggttccgttttattgattggaggactatcacttggaggacagattttacttgaaattttatctcatcgtaaggatatatgtaagtatgcaatagtggaaagcgcacttgtaataccttcaaaattcacatattttatgattaagcctgcatttgggagttgttatggtttgataaagtataaatggttttcaaaattacaattcaaatcattacgaataaagcagcatttgtttgataattattacagagatacttgtgcaataacaaagggcaatatgattgcttttttacaggaaaactcattatattccttaaaagatgggattgaagagagcgaagcaatagttcatatttttgtcggagaaaaagaaaatcactcaatgaaaaagtcagcagaactaattcataaaaaactacagaatagttctatacaagttcttcctaatatgtaccatggagagttttcaataaaccatgcagatgattatgtaagaagactattagaaataatagaacaaagataaatgctgatttatcgggccagcttgaaccgaactttcaaaactgaataccagccgcctaccggcgcggccagcgaaagcagtaagtctgaaaaagatttgctgctttttttgttacccggctccgttcccggccattttgccctgttcggattgtagtagtaagtgaaagggatatttttttgccccggcgtttggcatttctgatttttgtccgtagtaagaagcaaagagaaaatttcccgtttcgtttggcaaatttcaaagcgcggtggtgtggggagtgaaaggaaaaattctctgccccgccggttgccaaaatcctgttgcccggattactaaggcaaaagaaattttgaaaaatccccgtccagcgggtagctggcggcctttgaaatgtatctttagcggaaaggaaaaagaccgcccacagcgggccgaaagccccgccctgtccgttctatgtacggaaaaaccagacagtggcagtctgcggcttactaagagcaagtttctaccacggtgccaaaatccgcaattctgcggttttgcccctcgcgggaaacttgttggggagtgccttccccaaaccctgctttgcggcttgcgccgcttatccccgccgcgctcatgcggcaagaaaggaggtcacgaccatgcgaaagaaatacaacacgccccaccgcagccgcgttgtgaaaacccggctgtccgaagatgaatacgccgacttcacagcgcggcttgcgccctatggtatcagccagtcggaatttctccggcaggcgatacggcgggcgaccatacgccccgttatccatgtgtcggcggtcaatgacgaactgctctccgctgtcggaaagctggccgccgagtacggcaggatcggcggcaacctcaaccagattgcccggtatctgaacgagtacggcgcaccctacaacgcgctgtccggcgaggtacgcgccgccatagccgaccttgccgccctcaagtatgaagtcctcaagaaagtaggtgacgcggttggcaacactcaagca

SEQ ID NO: 3145 - DNA, 2334 bp, Unknown
  16S sequences of unknown bacteria
ctattatagcagaggatatgggaaaaagcaataggattttgcaaaaactgcgggaagatctgaggcaatgtttgtagtatttgcataatcgcattggcaatagatgaatggagtgagtaagcctatggtgaaagtcaagcctgtacatctgggtaaaaatgtccgtatgagctttaaccgcatcaatgaggttctggaaatgccgaacctgatcgaagtgcagaaaaactcataccagtggtttttggatcagggcctcaaagaggtgttccaggatgtatccgccattaccgactacaccggtaacctggtcctggatttcatcgattaccatctggatgaaacgcccaaatacacggttgaagagtgtaaggaaagggatgttacctatgccgcacctctgcgtgttcgcgccagccttttgaataaagagaccggcgaggtgaaagagcaggatatcttcatgggcgatttcccgctgatgaccgaaagcggcacttttgtgatcaacggtgcggaacgtgttattgtttctcagctggtgcgctccccgggcgtatattatggcatgagttatgataaaaccggtaaaaaactgtttacctctaccgtgattcccaaccgcggcgcatggcttgagtatgaaaccgatgccaacgatattttctatgtgcgtattgataaaaaccgcaaaatcccgatcacgacctttatccgcgcgctgctcaaaatgcaggatgacaaagcgacgatgaccggagatggtttgacggatcaatatggcaccgaccaggaaatctatgaaatttttggtgaggatgaacggctggtcaagaccatccaggataaagacaacaccaaaaatggcgaagagggactgctggaggtttaccgtaagctgcgccccggcgagccgccgacggtagacagcgctgtgactcatctgcaaaatctattcttcgattccagaagatatgatttgtcccgggtagggcgttacaaatacaataaaaagctaggtatcgctttccgtattgcgggtaagaccatcgcagaacctgttgccaaccccatgactggtgaactgatggccaacataggggatgtgcttaccattgaccaggcgctggaagtggagagagccggtgtttccaaggtcaagctgtcagtggaggataaggaattttatgtgatctccaacggcatggttgacatcaaagattttgtggattttgactgctcggaatacggtatcaacgaaaaagtacgttttgttgtgctcaaggagattttggagcagaacgagagcgaagaggcgctgcgcgaggcgattaaagccaatgtggacagcttgatccccaaacatattatcaaagacgatatttttgcgtccattaactatattaacaatctgtgctacggcgtgggcaataccgatgacattgatcatctgggcaaccgtcgtatccgctcggtgggagaattgctgcaaaatcagttcagaattggtttttccagaatggagcgggttattcgcgaaagaatgaccattcaagcacaagatactgacgtgattactccccaagcgctggtcaatatccggccggtggtggcggcaatcaaagaattctttggatcctctccgctgtctcagtttatggatcagaccaacccgctggcagaattgacccacaaacggcgtctgtctgcgttgggccctggcggtctgtcccgtgaccgtgccgggtttgaggtgcgtgacgttcattatagccattatggacgcatgtgccccattgaaactcctgaaggtcccaacatcggattgatttcctatctggcgacttttgcccggatcaatgagtatggtttcatcgaagcgccttaccgccgagtagataaaaccacccataaggttttgaatgaagtggtctacatgactgccgatatggaggacaactatgttgtggcacaggccaacgagccattggatgaagaaggccgtctggcacgtccaagagtcaatgcccgtttccgcgatgagatcttggaagtagaacgtgaccgcgccgactttatggatgtttcgccgaaaatggttgtttcggtggctacggcgatgattccgtttttggagaatgacgatgccaaccgtgcgctgatgggttccaacatgcagcggcaggcggttccgttactgaagaccgaatctccgattgttggtaccggtatggaatataaagcggcggtggattctggtgttacagttgtttccaagcacaacggcgtagtcgaaaaggtgtcggctaccgaaattgtcatccgaaccgacga

SEQ ID NO: 3146 - DNA, 6718 bp, Unknown
  16S sequences of unknown bacteria
cataggtacgtcgagaggtgagattcgcccgtagcaaaaaaggcgtattaaaaccctattttatggaaaaaacacaaaaattgctgttttgagtcgttttgtttatcttttagaccattgctttttttgtatttttcagcattttttgcggtctgggctttttttacatcccctttgcaagaagttttttgtaaaaacagcggagaatcattcaattctgttccgacggtataaagaaaagcggaaaaacagttaagcaacagccgcttttcttattctcgaattcatatctttgcatataccgatataaatgcaaagaccgataatcagcaatattttcagccctaaacctatactgaaagttataagaaagctttttccgtctttctcttgcttctcggcaatatcaataaaatgctcggaattgaaaattgcctgttcatcttccgaaaagtcggacaacgatttatgttgcgaaaccgtctccttgttttctccgtaaccgataacggtatatccctgagagcctaataaatacaaaaacttattcgttctgtcttgataataactgtgcacatcgggatctattgttgccgctgtttcacaatcgaatgcgcaaaaatacttaacatcattttccttaacacctcggagaatctgaaaacgccctgttcccacaaaaagggtagtatctcgtcctgcctgataaacaatatcagcagcaacatcaagcttttcatcaaatacgccaaacatcagcagaagattaaagattgtcagcagcacggataaataaagccatgatttttattactgttttctgttttttagtcattttgcaatatacttccttagaaaaagtctattcaacctcgtctgttttagcgggttgttttttactctgacattcgcaaaaatcttgtaaatatgtcaagtcttcactgcggtttattgccgtttttttctctttgaaaatgccgataaaatacaacgtgaacaatatcagcattacagagtcaaaaatatatgaaaatatcggagttatactcggtgtgttgattttgagaaatacggaaaagcacagatccgcaaaatatcccgccgcgcaaatgacagcgacccacattatattttttctgattgcgattacagccaaaacagcaacggcaataacaaccgcacaaaataaataatatgcaaacctaccgaaattaaacgccgttataaatccgcacaagcaaatagaagcattacctatcccatacagttctatctttggaaatgcctccgcccaaatttgaatagacaaagcggacgtcaacgctgtcaaaaacatcggaaatacgattattttattcaggtttttcattttttcttcctttcttttctgatctcgaaaaagccagttcgtctctgcggggtacacttacaaaaggcggtgtagtttaggttgagcaaacttaaacacttcccgcccgacgcgggctgttatcggagttaatccgccacgccttttattccgaccgcttcaagcgccttgcgagcacgcgcaacgggcacggacgcagagaaaaagttgttgtccgatttataggcataggcttttgcgtaaaggaaccgaacagcaagcgtatacggctgttcttcttcgtaagagtcgaaccgattgccgtaaaaatacccttcatcgcaaacaacggcgggacgtttcgcagcgtcggttccgttcttttcatcttcccatttaacataatccgcaagcgcgggaactgcggaatcgccgcaatcgataagtgcaaccacatcaatttccgagagagaaccgtttatataacgttcaacattgtatcttgctataatgccgtcgatgttcgagaacgcaagtcccgcgaacataactgtcactacaagcgcggaaacagttacaagacggagtttctgcgcgaactgtttgattattacaagcaaaaacagaaccgcaagaacacagataaaccaagaggcataaacacgtttcggtgtcagaccgtaaacgtcgatatacattatcatttttgcggcggcggtgcttatcagaacaagcgtcatcagagagagaatgacggacaccgttttttgaacgattttcgcgcctttgccgtcactcttcatcagaagtccgacaagtgcgataatgacaaagttgatgaacgcgaccgccgtcagctggaaaaatccgctgcgggcgtaatccgcataactcgtttcggacggaagcgcgccgacaaatccggaaacatagtatttccattgcgatatgaaaaagatgatatatatcagagaaatgggaataacggcggcaagcacggtcgcgacgggcgcgatttttgttttctctcccgcaacacggcagttctccgcgtttggcgtatttgcgcattttctatctttcgaagaaacaagaagcccgtaaacatacattgcaacgggaatgccgaggcaggcgctgacgatatgttcaacaacggtgtcaagtcctatgtccttaataaatctgaacatattgcggaaagattcgtcatagaacagcagagcaattattatcacgcacggaataaacgcaaacgcgatgccgataagaactttgagaaaacctttgccgcacttttcgccctttttcggaattagtccgttaaagattttgccgaaagacgcaaacggcagaataaacgccgacttgaaaaaatcgacgagaagcaggttcgtaaaaccttttgcgagtttgttgccgaaagcggtatatacaaaatatgtatatgccgcaagcgaacaagcgaacgcgaagaagcgaacccatccgttgccgctgacgactgtcgaaaatgccagggcaagccccgaaagaagcgagattacggcaggggcgttaaaccgcgccttttcaagttttacgacaacaaaagtcagcgcgtaaagcaaaataacgaacaaaaattcgccgagcggtctgaatctgcccataaaaacgcggataaacagataaccgagcacgaaacacaaccatgcaaaaacgctttcggcggcggtgtaactgcgtttcggcgcaggttgatacattcccgcagcaggagcgtaaaagggaatctgttgcggcgtctgaacggctccgccgaagtttacgggcgccgcgtattgcggcggttgaggttgagaggcgttcacattcgaaaacgctgcattttgagagttttgcgggatttcgggacatttcttttcttccatgagaaattaatcctcctcttttctgtattcgattatatccccgacttcgcagtcgagggctttgcagattgcgtcgagcgtcgaaaaacgcacggcgcgcgctttgttgtttttgagaacagacagattggcaagcgtaatgccgactttttcagcaagttcattcagcgacatcttacgttttgccatcatcacgtcaaggtttattacaatcattttttcacaccgtcaaatcgttttcgcttttaatctccgtcgcttcctcaacaacatttttaacaacgcggacgcagaggccgagaaaaagcatcgccgccgccaccgcgaaaaccacgtaaaacatataccccacggacgcgaacaaaacgccgcaggctacggcagcccatgaaacgccgcgaatgagggaaacactttctttcgtgaatacaagcccttttttaacgcgcattaaaagaaaaaacatcatcacgtcggcggcacaggcaaatccgataacaatatatccgacaacgagaaccgcggtcacttcggcgggagagacctctccgcgcagggaatacgaatcggcgatctgcccgaaaagatccgcgatatcgggcataacaaaggcgcatatcgcaattccgaaaaagaaaatcaccgtcaaaaccattgaaatattaacggacattttgcgtgatattttcagcatacattcctccgagcaaacggctttttttgagtttcgccgttattttggcatcattataacacactctttttcgtttgtcaatatttttttatcgtttttcgataattttttattcgcggcggttatttcggaacaattctttaatcgtgagcctttcaaaaaagaaaaagcggtcgaaaataaaaagtgatattttttgcgttttgcctattgacaaatcacgaaacgtgatgtataatagagaaaagaaaagaagcaaaagagaggttacattatgagattctccgaaaatttgaaggttctgcgcaagaacaacggaatgacgcaaaaagaactttcgcaggcgctcggcgttgcgctcagcacggttgcgatgtgggaaacgggcaacagaaagcctgatctcgaaatgctccaacatatagcgaagtatttcaacgtttccgtggatacgctttttatggaaaacgaggaactcggcgacgattatctgcttgactccgaaatgtccgcaagaataacgccgaacacccgccatttgaacgaggaccttgcggaactccgcgaaatgctccgtaccagacccgaagtaaagatgcttttctccgcgtcgaaaaacgcaagcaaggaagatattgaaagaaccgttgcgataattgaagcgttgaagcagaacaagagataaatgaacgaaatttacgtccgtctgctcgcgcttccgatgaccatacgcggcgttaccgtcacggacgacgagggcgactacaatatttatataaactcttcgctgacgcccgaccagcaaaaacttgtgttgaaacatgagatgacgcatatcgagcgcaacgatttcgacagtttttcggacatattcgaaatcgaagaccttgacccttgacttttcatcggtttgggggtataatagtcaagacggagtaaaaaagtatacattctccgtcaagtcaacagcgaaaggaatatgaccgatgagcgaatgcactcacaactgttcgacctgcggtgaaaactgttcttcaagaaacacgccgcagagtcttttggaacctgtaaattcattgagcacggtcggtaaggtctatgcggtagtcagcggtaaaggcggcgtgggtaaatccaccgtcacttccctgctttccgttatgaccgcaaaaaaaggctttaagaccgccgttctcgatgcggacatcacgggaccgtcaataccgaaaatgctcggaataaatgaacgcgcaatggcggacgacaacggaatttatccgggcgtctcaaaaagcggcgttcgcgctatgagccttaatatgcttgttgaggacgagacaacgcccgttatttggagaggtcccgtcattgcgggaaccgtcaaacaattctggacggacgttatctggggcgacatagactgtatgtatatagatatgcctccgggaacgggcgacataccgttgacagtattccaatcaattcccgttgacggcattatcatcgtaacgtctccacaagaccttgtttccatgatagtggacaaggctgtgaatatggcggaaaagatggatatacccgttatcggacttgttgagaattacagttacttccgctgtcccgattgcggaaaagaacaccatattttcggcgaaagcagtatcgcttcaatcgcggaaaagcacggacttcccgttcttgcccgcctgcccatcgacccgcaccttgcggaactttgcgacgcgggacgtgtggacgaatatgagacaacggctctcgacaaagcgctttccgaactcctcggcgaaaagactgaataaaaccaaataatacgcaagcggcaaccgaaacggtcgccgcattctttatgcacagcacacgcacatccgataattttgtagtatttattctcggaatcaactgaaagcagagataaacacggcaaacaacgtccgccgtgttttattttgagagaatgaaaaatagttgcctgtcgtaggaaaaatcatattttataaaatccgaatttggttttcactgtttcgaaacaacaaaactttgctcttgatccgagttattcaactaagcccacgggtcagcggattttggatcacgaacacccgtcagcaaatattgctcccataaaaaccacttgccgtcacttccgcgctgtctgagtttaacgggacgcggggcatccgcacctcccgcaggggataaacagtttcatatatcccgcttcttcctccgaaacgtgattggactcaacaacaagagtgtacggttcggtcggtgtataattattatcgggagttgccccgacaaaatatgtaaagggcaagttggcaaactggaatttctatttgtgttgccatgtcattacataatctttttctccggtagcctcatctaagccactatgctgaatctcaaatccttctctcttataaaaagatattgcccgtgcgttcttttggtatacgttcaagtgcaacttattccttttatcctttgcataattcagcagaattttacctataccctgcgattgcatttcaccagaaacaaaaatgccctcaacatattcatcatttaaccctataaaaccctgtatttctgtatcatactcatacacataaacctctgctagtaacaacgcttcttttactgatttgaaattgcttttccagtattcggcggggataaaattatgtgcctttatatttgtatccaaccatatatctgcaactttatttatatcat

SEQ ID NO: 3147 - DNA, 4181 bp, Unknown
  16S sequences of unknown bacteria
cgtggcgcgcgacaacggcttcgcgagatttgaggctatggaaaaccactacaacctgctgaaccgcgaagaggagcgggagatgatcccgatctgccgccagatgggagtgtccctgatcccgtacagcccgctcgccgccggccatctcgcgcgcccgacatggaattcggacagtgtcaggagccgcaccgacaaggtcgcgatgggcaaatacaaccgcaccgaagaagaggacatggaaatcgtccgccgcgtagatgagctcgcaaagaaatacggtgtgaagatgtcacagatagccctcgcgtggctgtgggcaaagggagtcacggctccgatagtcggcgcgacgaagcccggatatttcgacgacgccgcaggagcgctgagcgtcagactgacgccggaggacatcgcgtatctcgaggagaagtacctgccgcatcagctcttcggcgtgataaagcaaaatcccgctgaaataaagaaagcactgatttagtgtatcccgaagaaatgatgaaaaatccccgtcccgcgcggaacggggattttcgtttatctgagcgcttttatcatgctgtcgaggctctcttcgtccgaatccgggtttaccgatatgtaagcggtgcgcgaaagcaggtcgagcgttctctcgcacatatccggcgtgtagttatgcgcgaggtttttgttcgcttccatcttgaacgggtcgaacgccgggttgagagcgccgtgcttctgcatgatcggcgtccagttcgtgtagacgtgctttccggtgtcgatcggtcttgtcgcgccatatccggcggcgtccgccttttccttgaacgcgagcgtctcttcaaccgtatcgaatctgaaggcgagcgtcgtatggcagtcgcccttctcgtcgtgcgacggcgcgaaggtgtatctgtccgacaggcgttcctttacgtagaagtagttcttttcaagatcggagagtatcccgtcgagccgcttcagctgttcgcggaggattgcgccggttatctcggagactctgaactcggtgccgcagaactgcgccgactcgatcgactcgagctggtttccgaaatacgcgatggcggaggagtcgtggtagattagagcgcgctcatagatttcgcggttgtctgtgacgagcgcgccgccctctccggcggttattatcttgaagaagttgaagctgtaagccccggcgtcgccgatggttccgagtctctttccgccaaagctgccgccgtccgactggcaggcgtcctcgaggacgaagatgccgtgtttcttcgcgatttccatgattctgtccatcgcggaggggaagccctggatatgaaccgggatgattgctttcgtgtgagaggatatctttctctcgatatcctccgggtctatcgtcagcgtctcgtcgcagtcggctatcaccggaatcgcgccggtcgcggtgacggcgatcgctgtcgcgatataagtgtacgccgggacgatgacctcgtcgcccggtccgacgcccatgccgatgagcgccgagatgagcgccgccttgccgctcgtcatgcagatggcgtttgtggtaccgaacttctcacagagttcgtcctcaaagtgcctgacctcctgagcgccgccgttgatcttgaaaagagctccgctcctgatgactctcgcgactgcttctatttcttcgtttcctattctgtacatgatgcttctcctttatgattcaagtattctgagcgtttcgtttattatgttttcgtcggtgttgtcggcgagtgcgtagtcagaggtataacggaatgcgtctacctcataacctccacggcaaagctgatcctgcgttggaaggtaggaattgtagccgtttgcgcatgacagacaaagcgtgttctgatatccggagtattctctgagacgcaatgatatctcagaaaacacctcaaaaggaaagggaagaaacacgatattaccgataattgcggtgattgtcgggtagacatacgcgtcagggagattctcgtgattgttttcgataatttccttgactctggtcagatgatgatatttcaggtaaccgatattgcaaagagacgacggattgccaatgcttttgatttcgctgacgacttcttcaagtgatggaagatcttgatacggtagtttcacattgccatgcttaaatcgtatttcaggcgttataaagctcctcacttgtcttgcgatttggactgcgtcgaatgcggcatatgcgccgtgctcttctacaagcgatatattaccgacggtttttccattcgtcagacgaggaccaacgtcaccttccgcgccattgataaaagcggtgagcgttccggttgctgcctcaaggcgatcaatcataactccagcccaatcacggcttatgtcaccggatattccgcaggctgtacagtgacagccatagtgaatgagattgatgatacctctcttgtctgataatgaacgaacggtgatgactgtcattgtaggatcgtataaaccccagggattctgccccagactgatgcttccatcccgattctgttggcgtctgttgattccgacttcgctttttccggacgcgcttccgagttcggatggtaccattgcggtaacggcatctgatgatactttcagaagcgaaggcagaaatatcgtattgacgtattcatgatctatcgttccccaaccttcgctgccacagacattcggtccggaatgcgtgtggatcgccgcgagaatgatattctcggacggaacgccgcatttctctgagatttttcctcggagctctatggcgagctccgtgttgatatcacacactgttgccgaaatgagcagcatggtttcattgccgtcagagaaagcaacggcagtcgctgtcagatcatcgtgaacatttgttgacacgacgtcaggattgtagcctgagaggtgtgctccgatgacaggcgtgatcttttcgcgggctgcgccgcataagaattccataaaaatcctccataatatgttttattccattattttctgaatctcagcatttaccttggagcgaatactgtcagcaaaagactggagacctgtatcacctttttcccccatttttttgagtttggtgtaaacaccaccgaaatcaaagaggccgccaaggtcgcttacgcgtgtctcaaaaatgagatcaagcatctcgtgagaagcttcgtctctcgcggttttctgaaacaggacgttttcgtagtaagcgggaatcaggctgtaatgtgattcagcggcaagttcttcaagaatataaccgcttcgttccggatccgctgtcaatggaacacagagccacgctccggtttcgtggacggatgtataatacttgtcttgggtttcgtcgtattttgctcttgggagtatcgcgaagttgtcattcatatcgcggtatgttgtcaaccagtaaagacaatcactgaaaaagagtgaatacccatctctgaatactctgagcgtggttttagtgatgtcgtatttcgggagcctgatattcgcgaagacatctttctggttgagaacagcgatggctttttcgaacgcggattgaaatttcgagtcgccgattgcaaggtaaggaatgtcattctcgtctttatcgatcattttcgccccggctgctattgcgagagagatgtattcttcactcatgccatacataccgaattggtctccgaatgtggcgtcaccgtcaccattgagatcagatgatgtttttttgatcatgtctccgataacatccattgtccatttaccgttatggacaagttcgtacggattctccaaagaatatgcgttcgctatccgcagattcatcgcgaccggcatgaccgaatcaaagtatgaaaggcttatatcaccgacgatgaactgcatttgtccggcaattgataccgaatcgttagcgctctgtgtccaccatggtttcgacagatctatgttgggaacttctgtaacaaagtcaaagcagagtttgttttctccgagcgaatagtattgcttcatctttgttcctcttataaaagccgcgtcaaattcgtcagttcctgagagaacactggttttcatgtcgttctctgacttatctacagagctttcatattcgg

SEQ ID NO: 3148 - DNA, 2949 bp, Unknown
  16S sequences of unknown bacteria
aagacacccgccccatcccgagccagcgtcacacccttgacctccagcaggcagggcttgcccgctcgttgaaaggccaggtcaaaccgggagtcctcccaggatacctcccgctgcagctgttctggcagaaagcccgccccgccggaggccagccactgggccgccagcacattgggggccgtagagtccagattaaaatgcgcgccgtcccgcgccaccgtgatcagcgtataggccgtcttgcggcccggtgcatcgctgtgctggcaccagaccggcgcgccgggccgcagcagctcggcgcagcggcctgtatttttcacatggcaaagcgtccgcccttccgccagctccacccaagccgtaaagcggttcacccgctggcaaaaccggcccgggacgatcccctcatagcgcagcatgcccgattcccccttgctttttgtttctttttgttattgtagcacgcaaatacaggctgtcaagcgtgccgctttttgcggattttgcagaaaacagtagcaattggcggaaaaatgcgttataataagcgggcgaatccatgtatgaaaggagctcacgcatgaaagtatttcgagcgatcctgacgatattgggctgcgccctgatcgtgctgggcggctattctgccgtcaccttcctgatgcagcgggattttgccccggtgcaggaacccacggtcgaagccccgcagcccgcagaacccgagcagccggaggaaaccccggaagagccgacgcagcccgcggaggacccggaactggaagcccgccacagccgcgcgcaggaaattttgcgcgacatgtccttggaagaaaaaatttaccagctgatgttcgttcggccggaagcaatcaccggtgtcgaccaggtcactgtcgccggtcagacgacgcaggattctctgggccgctgccccgtcggcgggctcgtctaccgcgccgataacttagagagtgaggaccaagccaaagaattgctggaaaaaacagcagcttatctggaggacggcgggcagattgccccgttcctgggcgtattcgacgacggcagcgagacctccccggtggcaggcgatctggcaggcgaaacgctggattcctttgcgaccgtcggccactccggcagcggcgggcaggcagaacagctgggtaaggacctgggcaagacgctggccgattatcgttttaatgtaaatctcgccgccggtgcagagctcagcagcgaccgcagcgactgtttctccgctgacggcgaagaggccgcgatgatggtgtcctcctacgtcaccggcctgcagagcgagaacgttgccgccgtgctggcccacttccccggcgaaggcgccgctgagaatggcgtctgcgataaggcagaggaagaactccggcagagcgatctgcttcccttcaccgctgggatcgaagccggggccgccatcattcaagtctccaatatgacagccacggagctggacaccgccccctgctgcctctcgtctgccgtgataacggacctgctgcgagatagcctgggctttaccggcgtgatcctgaccgacccgctaggcggccagaccatttccgcccagtatgacgaagccgaagccgctattctggcgctgaacgccggcgcagatatgctctacgagctgaatgacccggagggcgtctataccgcgatcctctccgccatccaaaacggcgagctcacggaagaacgaatcgacgagagcgtcacccgaatcctctgcgccaaactggagctgcaaatcatcgaatcataaaatgcttcccgccgcagcgggccgcttgatcggtccctgcggcggtcgtcttttttcatacagaaaatccccacagacgagtgaccagctcacctgtggggattttccaggaatataaaaagagagggaaaaatgaaaaagtgtaactcactatggttacagtatactgggaagatattaagaatgtaagctataagtttttacaaaattgttaaattcgtgttttttcgtagttttttttgccgcccatgccgaccggttttgttcacaaaaaatttttatttccccctcttgacaacgccggtttccaggactatgatggagaaaagttgattagcactctcaatgcgcgagtgctaaaaaataagaaactccacggcatatgccggtttggaaaggagcgaagcattatgaatgcacagaaatatacgcaaaaatccctggaagcaatccaagcagcccagtcgctggcgctgcagcaccaaaatcagcagatcgagcaggtccacctactcggcgcgctgcttcagcaggagggcgggctaatcccgcagctgctgcaaaaaatgggccgcgccccggagagcctggcggcggcagtctcgaaggagatcacaaagctgccgtccgtcaccggttccggccgggaagcagataaatattatattgcccgggaggtcgaccaggtatttcaggaggccgagtccgccgccgcacagatgcacgacgattttgtctccgtcgagcacctgtttctggccctgctgacttgcccggaccggacgctaaagcagctgttttccacctatcagctgcaaaaggaggacgttctgcaggccctgcagaccatccgcggcaaccagcgcgtcaccaatgacaacccggaggacacctacgaggccctggaaaaattcggcacagaccttgtcaagcgggcgagagagaagaaaatggacccggtcattggccgggatgatgagatccgaaacgtcatccgcattctttcccgaaagacgaagaataaccccgtcctgatcggcgagcccggcgtcggcaaaacggccatcgccgaagggctggcccaacggattgtcaagggtgacgtgccaaagagcctgcgggataagacgatcttctcc

SEQ ID NO: 3149 - DNA, 1938 bp, Unknown
  16S sequences of unknown bacteria
ccgactacgttgccgagccgctcgatgcaacacttttcgaagaaccgtacgacccccaggaatgggaggagaaggtcgcgccgttcggactcgaccgcgagaagcgttgccgggcgtgttaccgcctgcgcttggagaaggccgccgcgcgcgctgccgcagaaggctacgatgccctggcgacgacgctcacgatcagcccgtaccagtacacggacatcatcttcgaagagctcgagcgggcggcatccgcacagggaatcaaggcggtttgccgcgatttccggacatgctaccccgaggcgacccgccgcagccgcgagctggggatgtatcgtcaaaactactgcggttgccgattctcgattgccgaggcaaaggcggagcgcgacaagcgcaaggccgagctcgaggcggagaaggcggcgaagcaccgcgccatgatctgggccgccgcctcgggtgtcgtgagccaggcgaaccaaatgtagcgggttcgggcgtggcgggcgttgcgtggcaccgcgcgcaaggcaaatgaaaagggccatcccttcgggatggcccttcactcgttctctttatatatacgagaactactgcttcacgacgttgctggcctggagcttgccattctggccggtcgtgacgtcaaaggtgaccttgtcgccctcgtcgagggtcttgaagccatccatcttgatctcggagaagtgcacgaacagatcgtcgccatcctcacgagaaatgaagccgtagcccttgtcaggattaaaccacttaacagtaccttcagccatttgtaacgcctttcctttgagcccccggtaagggcacttatacacgttgttcgggcggccaagccttaacaacgctaaaacattgtcacttgaacagcgacgcgctcaattatagttgaacggaataatgcccacaagaacaaagttccgagacattggtcccattcgcagctattcggaaatctcgacttcgctcacgagctcgttcttgatcttgccgacgagcttctgcagagcatcgatgacatgcgggcgaatatcgccgccgatgaacacgtacatgatgtcgtcgcccacattgagcgtgccctcgttgagccagtacttgacgtactcgatgccctcccacgtgagggcctcccgagctgcttgctcgaccttctcgtggtcgtaggagaagttcatccccgtgaccttcttgccgtcgtcgatgccctcgcggacgagcttcttgggaagctcgcgaaccacgccgttgtgcgcgaggtacatgccgcagcgcggcgcgctctctgccgccttggcctctttgagccaggcgtccatggaaggagactcttttgccatgttgttatcctctccaaaagatattaagccagtgctgaattatatcccatggagatgcatccggcacagaaatgcgagcaaaatgccgcaagacacgacgaggcggaggaattgatcctccgcctcaggcactcgcagaaagcagccgtccccggatatccgcgtgcctacttgtcgtcgtattgcggaatcggatcctcgtcgacctcgtccaggtgcttctcgtagacgtagtgctgggtaccatgcgcgatgacgctggacaggccgagcaccgcaatgcagttggggacggccatgagcgcgttggtgatatcggagatgttccagacgagctcgccgccgccgatgcagccccagaagatgaacacgaggtagacgacctggtacgggcggatgcccttcttgccgaacaggtaggcgaccgcgcggttgccgtactgcgcccagccgagcatcgtcgagtacgagaacaagatcatgccgacggcgagcacgagcggccccaagatggggatctcggaaaacgcagtagtcgtgagctgcgcaggcgcggtgatctgccccgcgg

SEQ ID NO: 3150 - DNA, 8522 bp, Unknown
  16S sequences of unknown bacteria
gcccgccggtatggcagtcgcacccgtggaacgagaacctccgctgcgcgttcaagcatctcgcgaacggcgagtacgctatggcgttctacaacttctccgataaggacgcgggcgttccggctatgctcgagctcttcggcatcacttcgaacagcggtctgaaggctcgcctcaccgacatcatgaccggcgagtgcataggcgagttccgcgattacatcaacattcaggtcccgacccacgacgtgaagctcttcagagtgaagctcgtaaagtgaccgataagaaccactgtaagaaatgcggcgcggagctgtgccagctcgacaaggctctgcaccgcaagctcgtaagccgcggcgcggaggaattcatgtgcaaggcgtgccttgccgaatacttcggaacgacttcagaacatcttgacgagctcgccgcgtactacaagagcgcgggctgcactttatttgactgagatatactgagatatgataattaagaaaccgccgatggggtggaacacctggaacaccttccagagcggcataaacgaaaatctgatcaaggaatccgcggaggcgttcgtctcacagggactgcgcgacgccgggtacgagtatgtcgtcatcgacgactgctggtcagagaaaaaacgcgacaaaaacgaacgtctcgtccccgaccacgaaaagttcccgggaggaatgaaagcgctcggcgattacatccactcgctcggtctgaagttcggtatctactcggcgatgggcatacagacctgcgccggacatccggcgagcttcgaccgggaatatcatgacgcggaaaccttcgcctcctggggcgtcgactacctcaaatacgacggatgctacttcatgccgtatatcgaccagcagcttatgtatcagcgtatgggcgtcgcgctcgagaactgcggacgtgacatcgtctacgcggtctgcaacggcggcgagtcggacgtctggtcatggataaggtcaaccggcgcgcaccttttcaggtctaccggggatatcctcgacaacttccgcagctactacgatatcgcgatgagccagagggacagattcggcttctccgcgcctaactgctataacgacgtcgatatgctgaccgtcggtatctacggcggcggcaaagtcggcaccggctgcaccgagtcagaataccgtcagcagttcgtcctatggtgtatgtacggcgcgccgctgatgctcgggtgcgacatccgctcgatgaatgaggcgacgagaaagctcgtgacgaatcccgcgctgatcgctattgatcaggacgaggcggcgagaccgccggtctggcagcgccacaagtggaacgaggatcttcactgcgcgttccggcacctctcgaagggctacgcgctcgcgttctacaatttcgccgattacgacactaagatgactttctatttcgacggcgtcggaattacggtcggcagccacctcaatgcgagacttacagacgtcttcaccggagagtgcgtcggagagttccgcgactttgcggagatgcaggtcccgcggcacgatgtgaaacttttctatgtcgaacttgtaaaataatttcgtcgggagggcggatctgttccgctctcttgactttttttcacggatgtggtataattattctgatttatccggatgacagcggattttatggaaaggatatgaaagtaatgatcaggttcggtactggcggctggagagccgtcatcggagacgatttcatcagagaaaacatagagcgcgtcgcggcgggtgtcgcggctcttcgcgcggagatcggcggaacaacgccgataatcgtaggatatgaccgccgcttcctctcggacagcgcggctaagtggatcgcgggagttctcgcggcgtatgacattcaggttatgttcctgaaccgcagcgcaccgactcctctcatcatgcatacggtcaagaagctcgacctcgacttcggtcttgaggtcacggcgagccacaacccgccggagtacaacggaatcaagctcatagtcaaggagggacgcgacgcgcccgctgagaccaccgcgcaccttgaggagctgatcgcgaacctcggcgaggtgaagtcgctcgacttcaatgacgctgtagcgaacggtaagatcacttacataaagaaccccttcaaccccttcatagacgatatcctcgccgtgatggacacgaaggctatacgtgagcgcggtatgcgcatactgttcgacccgatgcacggctcgtcggtatatccgctgatggtcatattccacacgacgcgctgcacgattgacctgattcacgggaacaaggacgcgtatttcggcggttcaatgccggctccgaccgagtctaccctgaccgacctctcgcagaaggttgtggctggcggctatgacctcggtatcggcgtcgacggagacggagacagactcggaatcatcgactcgaacggaagatatatcagcgcgaacgaaattctcgtcatgctctactactatctgcacgagtacaagggctggaagggtccggtcgtacgcaacctcgcgacgacgcatatgcttgataaggtagcggagagcttcggcgagacctgctatgaggttccggtcggcttcaagtggatttcctctaagattgacgaagttgacgctgtgctcggcggcgagtcctccggcggtctgaccgtgcgcgggcatatacacggcaaggattcggtctacgcggcggcgctgtttgtcgagatgatgtcggttacaggcaaatccccgtcagagctgatggatgagctgaccgcgaagtacggaaagttcgtcatgagcgagttcaacctccacttcgacccggctgagaaggagcgcataaacgaggtcatattcaccgagaagaagctccccgagttcggcgagaagatcgtgaaggtcgcctacgaggacggctgcaaggtctacttcgagaacggcttcataatctgccgtttctccggcaccgagccgctgctcagaattttcgccgaggcacagacgaaagagagagcggacaagtacatcgacgcgttcgcgaagttcctcgggctgagataaacacaaaaacaagaggctgtcacgctccggcgggcagccttttcggaaaggattacaatgcgattatttcatgtgagcgagaacccggacataagaatctttgagccgcggcagtatgatttgcgggacgatatcggtttcccggcggtccgcgccgtcgacgaggagcatctgtccgactatctgaccccgcgcgactgcccgagggtcggctggcataagaatatcaacacttcgtcggacgacatcgacagattcttcagcgcgccctcggtctcgcatgggctggcggtcgagccgggatggttcggcgtcatgcgcgacgctgtgctgtggatatatgagttcgagccgtccgggtttgagaaatccgacgccggcggcgggctgtacataacgggagagcccgcggtgcctttctcaaaggtctgcgtgaccgacattttcgacgagcttttcaggcgcggcgtcgaggtcagaataaccgaagacctctggccgctcgcggaatcgctgaaatactcaacgctcgacagcgcgttctgccgcatggaaaacgcgaacccgaaaaagggcgacccgcgggtcgaatattttctgtaataatgaaactgaacatacttgagaatgatttcacggtctgcaaggtgaccgactacacaaaggtcaacctgtccgctgacttctgcttcaccggcaaaacagacagcgaaaactcgctcgtctgcccgacgtccgccgttccggacaacactatcgcgcgcgaggacgggtggaagggcttccgtatcgtcgggacgcttgatttctcactgatcggaatactgtcaaagatttccggcgtcctcgcggaggagagtatcggtatcttcgcggtgtctacgtttgataccgattatgtttttgtcaaggcggaaaattttgcgcgggcggtcgaagcgctgagaaaatacgggtatgaattcgaatagagcaaattaactacggaggacaattttctgatgaaaagagttattttcgcgatgatcctgactctcaccgtctgcctttcctcctgtggagcgaaggagcttgaaattgatatcgacggagaaaagctgagcatagagttcacaaagaccaacgcgggttatactacagactatgagcttccgctcgccggggcttatgaacccgatttttcgtttccgacaaatgatctctgcgttataaacgcgtatattttcaagaacaccgcttttctgacggtcgcggcgcatagcgtcagcgacgtctatgtttacgacatagagaataataccggaaagtggctgtcaggcgatgaacctgaatcaagcgataacgtcggcgcgattccgtctgaaaagaattacatcgtccgagccgacgggaatatcgcgctgctgcggcgttcggtggtgagtgagaaccctttcgagggcgagtattacatgattgaccttgacacacttgagacctgcttcatttcgaaaagctacgcgacggattatctcccgacctcccgcgtcgagtgctttgaaccggtggatgatggcgcgggataccggcttcaggtctggaacagcgacaacgcggagtattacgtctgcacgctgacaaacggaaaattcgaggtcagagcgatcagcgagcaggattttttcggataaccgccatgaaaaaacgtcccatcgggacgttttttctattaccgctttttcagcgcggctttcgcgtattcccgggctttgataagctccggctcctccccgtcatacccggcaacacgcttcagtatctcatcgtcttccttctctccgagcctgccgatcagacagaccgccttgacatagttgcagagcaccgtcgtctcgagccagccgaagaaatacttgtgcggagacctgtaagtgtgcgtctcacacttcccttcgagtatccgtctcagctccggcagagcgcgtttgtcaccgataagaccgagcgcgacggccgagttttcgcgtaacagcttgtcatcagaatcaagccagccgacaagagcgtttgtgaaaccttcaacatctccgccgcgccccttcaccgttctgaccgcgaacagcccgagtgacggatatatcgacgcgagcgattccctcagctcatcgactgtctccggcagcttcacagacttccacataccattgtccggctgattcaggtcgcatacgccgcggtcattctccttgttatagcatccggtctccgagaggatttccagaagctccgcgaaacgctcacggcatatagtctgcgcgtcacagtcatgttctgtcatcatcgacgccatgacccccgccgcctcgccgcacttctccatgtcggttctcattctgaccgtgctcgtcatcgtgtgaccggtgccgatatgctttccggcgacgagaagtccgcgcgttcccttcggtatcaggcactccggcggaattcctaccgagatgccggacgcgtgcagggtgcagagcatctgccagtcctgaaattcctcgtcttcgttccagaggtcagggttagcgttgtcgagcggcgcgaaggtgtagaaaatcggattctcaggaattctcccctcgagaagatcaagaaaagtatatactttctcggtctcgacgcagagcacctcccgccgtccgacctcgcagcccatcgaatagagccgcctgtcctcactcatcctgtccggaaggcacggcattctgccagcccactcgagattcagccgcgcggattcttccgggctcttcccggcgaaatcgtcgttgaacgaccagattccgtacatatgaccgttcatcatcttcccgaccgtgcgggaaaacctcgcgagcttcccgtccgaacgccttccgccgagcgtcttcagacctataaggcggcagaccgcgccctcagcgccgtcaatgaccacatccgcgcggacagttatcgttttctcaccgtcagacgcggcgacgccgatcacttttccatcctcagtgaagacatcggtgacgaacgccgaccagatcgacctcacgtgatatttttcaaattcccggacaagagccaatgattttacagctgtcggatagcttttcttgtaatccggaacagttgacggaatatagtccccaccggcgaggatttcgtccgcttccgcgttcacttcctcgtaaagcccgccgtccgcgccgtagtaatagtcccagacgcacgccgccgtgccggttccgcccggtatcggcgcgagatcaacagtgaggacatccatgccgcgccttgccgcggatatcgccgcgacagctcccgcggttcccgccccgacgacgcagacgccgcactcatggtcgaattttccttcataagcgcactcgacgtgctttccgtcgatcaatgtatgacgaatcacagacacagctcctcacctcccctgacagccgaaatcacatccggataagacgccgacggaacgcagattatcccgtcccgttcttccctgaccggctccgcgaaacgataaccgaaaacaagcgttatcccggcgaccctcgcgtttccgatacggctccggttggtcttcagccattcgtccgcgtatttctcacagtccgggatcgtggaatcacggtcgacatacaggtgaaggatgtactcgtcatcgaagacgccgtgctcgacaaacgacttatcgtccgaccacacattcatatccttctctcccgcgagcatcagaccgaagaccttccggcagtccatgaattcccgcgtccgcgtatcgatgacccgtttcgccgctatctgctcatacccgttctccgccccgaaaagcgtcgcgatgaagccgtcctgaacccgcgagatgtctgtcacagccgtcccgagaagtatctccgccccggtctcaaggtatttcccggcgagcgccccgccgacggcgaggatatgtatccgtccgtccggaagaagaatcccgcgcttttcaagctccgcgcacatctccccggcgagtccggtgtgttccgcgttctttaccctttcggcaatcatcgcctcggaaaactccgcgccgaccgaaaagccgctctcaacgacgagcgccgcgccgccgagccttgccgccagcgggtaagcgagcgccgtcgccccgattatcagtgtgtcgatctgtttcaaaatagtaacctcatgattcggctgccgtgctccacgcacgacagccgctttcatttttttattcaaaggcggcaaggaagagcgctgtcttctcctgtatcgtcgtctcattcgcggcgtaccacgatgagaagttcttatccttcgcctctaccattatctggtactgcgcgccggagacgccggtcgccattgacgcgacccacccgaaatcgaacgtcagcgtctggcggatgagatttatcatctcgagcgattcctcgtcacgcgcgtattttcccttcagcgccgtctcatagaacgccttcgccaccgtatctgtcgactcgcggcacatcgcctcaagaacgaatccggagacgtcaagatcactcgccgttatcggaacgcacatcatcgagacatcgttcttcgtcgtcgtcttgtattccgcctgattctcatcgaacttcggaagcgggatgataccgaagtcatcgttcatgtcactgagctttgaggcgaccccgagcgaatgctcaaacaacagcgcgcgcccgtcgctgaatatcttcatggcgtcggtctcgttgtcctccgtgtacagcacatcaggcgacacggaaaagtcgacaatcttttcaactacatttatcgtgtgctcgttgttccagatgagctcaccggtttttgatatcgtcggcgtgtcataattcacgacgaacggacggatatagtactttcccgcggtgaatccgtacatatcgccgctgctcttcacgccgtcgccgtcgagatcctgatatactccctttgtcacctcaagcatcttgtcgtgcgtccacttgccgtcccgaacgagctggtagaaatcgggagaggagaaatcctcagcgatcttcttgttgtagaacatacagttgattccctcgagcagggaaacaactgtatgagagccgatctcaaagcacttcccgttatatgtcagcgcgtcgacccccgcctgcgtccaccacggcgcgtccggctggatattcggcacatcgtagagattcatgagatccccgttcaggatgttcattacgagcaccgcctgatacccggcgacaaaatcatactctccgtccccggcaaccaccgagttgtgtatcgtgttcgtgaaatccgtgtgacttccccacgcgccgttctgttctatgaaattcagcttgcagttgtacttgtc

SEQ ID NO: 3151 - DNA, 4558 bp, Unknown
  16S sequences of unknown bacteria
gcctgcaccagttttacgagtttagcggtaagatcgcgggaagcatcgttgatgatgtatttcttgaatgtgggagaattctgcgaccaaaaaagtatatgtgcttaattgtttctgatttcagaaacaaatctgaatttataagtttccacagtgatttgattcaggcactaaataaaaggacgacttcggacggctataagatcacgctgcaaggagtcaaagttctccttcaaaaccataaaactctcttgccatacggctatccttttgcctatgtggaaaacatacaccatcagtacatactgattttcagaaaggacaaaaagtgatggcagagaaatacgctggattaatctgtggggactcagacgttctccttcaaaatatgctggatgcaggaataaaagtcgatctcgtgctgactgatccaccttataacctcaataaggactttggaaacaacagtgacaaactttcgttggaggaattcctgacgatttcaaaaaaacgcattgaattatgccgtgacctgcttgtcccaaacggaagtatcatatggttcggtattcatcactatatcggttttattcaatccatcatgtatgaggtggggctgaattatcggcgaatgaatatttggtactatgaaaacggctttagtaggcttactacagctccgcttacgcaatatgagccgtttctctggttttcaaaatcatccaagaaatgggtttataatgttgacgatgttcggattccctacaaaagtgcagcgcgcctgaaaaatcctgtctattacaaaaactcaaagggagaacgagtaaagtgggaaccgaatccgctcggagctatgcgtggagatgtctgggcatttcccacacttgcaggaaagctgtttcaagatgaaaaaacgcctcatcctactcaaaaaccagaagctttaattactgaaatcatcaaggcgttttgccctaagaattcagaggggttctatgaaggaacaatattagatccatttcatggctctggcacattgggggtgtgctgtgagaagttaaacaaacaaggtcacaaaattaagtggataggaattgaacttgaaaagcggtggtgctctgtcgcccaggaacgcctcgaaaaaatatagtctttgttgcggctcgttgaataaaaaatagtactttttaattatccctataccttttaacggtgggtaaaccttttaatgaaaggtcagtgccgtgtgcatttggtatcaaaataggtctttactttcaaatctcccgttcactttggtgggcgggatttttacttattacttcttacatttttactgttgctttgaagtaagctttgtaacggatttcgggagacaataagtgcggtgcggctttgccgaccgttgcaaaagcaaggctttgccttgcttttttcattatgcgggcgaaaaatacaatcaaatacatttgacaaaacaaagcagactgtttaaggtttttcctttggcggtttgcttgtttttttatgtaccgaatagagtacatcggcagcggtataatttgctcggcaaagggaaggaaaaatgtttaaggcgctatcggttgcttgaccgcaacgcgtttgcccgagcaccttttagaccgaggagggtaaaaatgtccgaacaaaaaataaccgttcaccgtttgtattgcaacgtgaaatccgttgaaatgacaatcgccggggaaaccgccgccgatattttgacggcgaaatttcaaagaatgatcacaagtgccgagcttaaaaacggctcggcggttataacaaggcatattattaaatgtcccaactgctcggccgaaataccggcatataaggaatatttaagagggagattgttttccgatgtgacggtgaggccccgcgaatttatcgagcggtggacatcgagccaaacaagtctttttgacgatcttccgtcttgtctgtcgtttaatacgccgtttaaggaattccgtaatttcgattgtccctgctgccgaaagagactgtacagagatgacggtggcatggaaattacggttgattcctgccgcaggaaaatcaaattgacgttaaagctcagacttaacgaccttttggcaattgaatggctcggtaagtgtatatccgtcgacagcccgaatatatatgaaaccgttatatttaatctgaaaaaaggacgggtttatgtgtccgttcaagacgaaaaagggaaaaggtatgcggtcaaagacatttcaaacgcaaacgcggataaatgggaatccgacccgattatacatctaattaacggtaataggaccgtccgttttgagcttgaacgtcggttcaccgatatttgtaagtcgccgtttccgtttcctcgggataaattgacaatgaagaaattcatactggcggcgagatttatcggatatgacgcggatttctttgattttttgcctttgtctttggatggcgttattatcgcggagggctttaaaaaagaatgcaaaaggctgcacatggcaaaaaatgtgcccgaactttttataaaaacggatgtcccgcataccaaaagcataaaaagaattttctataaatttccggctttgctgttttataaaaaggaaacggagaccttttggaaattgataaaaaaagtggatttgtttcgtaaatttcttaactcgtataatgtgttcgatgtgctgctttatttgcggcagcgaccgtcggcagagatgttttacggcgactataaggacgctttcggtataacttcgcttttaaatctgattttatcgtcccaaatggagttgaaaaattatatttcggattatgtcgtgcttaatgattttgaacgcaaaaaggaacggaaaagatggcgcggatttgcttccaaacacaaaaggtatctgctgtgcgaccgcccgggagagtcggtgtcggttccgattttgcaaacgtcaaacgggacggctttgcccgactgcaccgttaacggctattcctttgaattcctcaaaaattcttacgaatacttaaaggcgggcgatgagctgcacaattgtctcggccgtgattgggaaatattcggcgggtcggtttgtgtgataaagaagaacgatacatatgtgggggcggtggagctgagaggcaaaacggtcgttcaggcggtgctttatgcaaaccgacccatgaagaatgatgaacagatatattcggcttataagaattggaaaatcaataacggtcttaaggagcaatgtgaccgctattgttttttcgatagataaaaaaccgcaaacaggaggcagattatgacttatgtaatgtccgatattcacggatgctatgacaaatatatgaatatgctttcaaaaataaatttttcttgcgacgacactctttatattctcggtgatgttgtcgaccgaggaaacggaggcatgaaggtgattctcgacgcggcggcgcgggaaaatgttatcactcttaaaggaaatcacgatcacgaggcctatgtttttctgaaaaatcttaccatgccgattgacgatccaagagcctgcgaatttgcgtcggtattccgcgtgtggctttccgacggcggaattcccacatatgagagctttataaagctttgcgacagcgaaaaggaaaccgtgctgtcatacctgaattcgctgccgatttttgaggaaatcgtgatatgcggccgaaaatattttttggctcatacggttcccgaaagggaaaaaatgcttgattttgaccgctgccgaatttccgatttcattatcggcgagccggaatatgacaaaacatattttgaggacaccgtcatagttacgggacatacccccaccgagcttatagacaaaagccgtgcgggcaaaatatggagtaaaaacaatcacattgccgtggattgcggtgccgtgttcggaaatcccctcggctgcatttgccttgaaagcggcgaagaattctatgccgactgaaaaggctgacagtcagagaaattaaatttatcggctgtgtgcaatatactttccgcttaaaattgacctcattataatcttgtgatataattatgtcaaaaaagctttatacttggattttttgaaagcggaaaggggaattcggtgaaaaagttcgaatgttttcatcccgtgtcggcgggtttcttctttctgtcaatgctgcttataaccgtgttttcctcctttcctctgattcagattttttcccttgccgggggaattgcttttgacatcactctgcgaaagggacgcggcgttttgcgcgacctgctttttgacgcgctgttttttgccgccgtggcgatttcaaaccctcttttcgttcacaacggtgcgactccgcttttctttatgaacggaaacgccgttaccgccgaggcgctgctttgcggagtgagcctcggaatcacgcttgtcgcggcacttgtttggttcaggtgttttaatgccgtcatgacctcggacaagctgcttttcctttttgcaaggctttcgcctaa

SEQ ID NO: 3152 - DNA, 8259 bp, Unknown
  16S sequences of unknown bacteria
tatttccaccttagatgcgccgcgcattatactgcggtagtgcgtaaatgtttcgcgggcaatgaagcgcggctcccagattggaaaactgtaattgtaatagcctgtgaaaagcctgtgcctgtgtcaattctctcttgatattggctgacgcagaaaggcaattttgctgtttggttggcctgaaagctatatagtattctgcataaaaagtatacagtggactttatttatcgatagaaatcgtctataatgtaaagatacacggcagcagcaaagcagcgagacagcaaacaaggcaggaagatatcagcggggtaccgaaataaaatattgctcttacacggaatgccgtaaatgagaataataataaacaaaaaatgagcagaagcaaaaaggagaaaataaagatgtcacttcatatagttttcgtagagcccgaaataccgccgaataccggcaacatagcgcgttcgtgtgcggcgacaaacagcgtgcttcatctcgtaaagccactgggattttcgatagacgataagagcttaaaaagggcggggcttgattattggccttatgttacgcttgaaatacacgaaagtctcggtgaattcatgaaaaaatacggcaaagagggggaaaatagaactatgtacctcgcgaccaccaagggtaagcaccgctacaccgatatagcgtacaaggacggcgatatgctgctcttcggcaaagagacggcggggctgccgcgcgattttatagctgagcatgaggataatgcgataagaataccgatgagcgaaaatacgagactgcgctcatttaacctcgcaaattccgctaatataataatgtttgaagctctgcgccagctcggatttccggggcttgagtaaaacgcctaacttgccgtaggtacattctgcaaaaaagcttttaatatatgccgagcggtttaaaaactcaagcgatacgcctgtgaagcacgcttttgaggctgtattatctttttggggtattataaggtaaaaaaggtatcaaggtagtttttagcgccgccattgttattgacggcggatttttgtgaaaaatattattaaaaaacaagaatattggggaaagatattaaaaaaagccgccaagtacggaagtttgtggtataataattataactgtcactttgcacattatgcagagcgcatataaaagaaaaaattgaaatttttaatggagaaacttaggaggaacagaaaatgtctattaaaattggcatcagcggattcggacgtatcagcagagttgtgataaggtcggcgatgaacgatccggagatcgagattgcaggtatcaatgtccgcaatgccgacaaggattatatggtgtatatgctcaaatacgacagcattttcggaagatttccgagaacacttgatacatatgaagatggtcttgtaatcgacggcaaaaaagtgccggtatatagcgagagcgaagcaattaacattccgtgggcttcctgcggagcggaatatatagtggagggtacgggagcttatgttactacggaaaaagcaaccgatcatcttaaagcaggagctaaaaaagtagtaattacagcgccggcaaaggataaggaaacgccgacgtttgtaatgggtgtaaataacacggaatataagactgagtacaacatcgtttccaacgcgtcttgcacgacaaactgtctggcgccgctcgtaaaggtgctcgaggacaactggggcatagagcatggacttatgtctacgattcatgcggctacggcgaagcagaaggtagttgatgcccgctcgatgaaagactggagaactggaagaagttcgtttggcaacatcattccttcgacgacaggtgcggcaaaggccgttgcgcttgtaataccttcgatgaaggacaagatgacaggcatttcatacagagttcctgttgcagatgtttcacttgtggatttaaatgtccttctcaaaaaagagactacatacgatgagatatgcaaaaagatgaaagaggcttcggaaacatatatgaagggtgtgcttgaatatgtggacgacgaagtcgtatcgagcgattttatcggagattcgcatacatctatttttgacgcgagagaaggaatagccgtaaacgacaagcttttcaagctgatagcgttttacgacaacgagtacggatattcgagcaaggtgctcgaactcatcaagcatatgtacagcgtagataataaataagaagcaatttttgcgtatgtgaggcaagagtctaaagcataaccgtgaaagtgcgggcaaaatgaagctgagagcgcaaagttgcttaacactgtatttagatgagaggtaaaaaatgaagaaaacggtaagagacatagatgtcaaggaaaagcgcgtgcttgtgcgctgcgattttaatgtgccgcagaaagacggcgtcattacagatgatatcagaataacatcggcgatttcgacaatcgactatcttgtaaaaaacagagccaaagtaattctgatgtcacatctcggaagacctgagggtacagcggatatgaagtatacgcttaagcctgtcgcagacaggctgggggagcttcttggacgcgaaatactctttgtgagcgcaccggaagtggtgtctgaggatgtaaggcgcgcggcggagcttctcgaaccgggcgaaattatgctgctcgaaaatgtccgcttcagaaaggaagagacgaaaaacgaccctgcattttctaaagagcttgcatcgcttggagaaatattcgtgaacgatgctttcggaactgctcacagagcgcacagctcaacggccggaatagctgattatttgcctgctgtatcgggattccttattgaaaaagaacttaaatttctcggaaatgcggtggaaaatccggcaagaccgtttgtagctattatgggcggcgccaaggtggcggacaagatacctgttattgaaaatctgctcggaaaagtggatacgctcattatcggcgggggaatggcttacaccttccttaagtcgcagggctgcgaaataggcgggtccatactcgacagcgaaaatatcggtcttgcgggcgagtttatcaaaaaagcgaacaatatgggcgtaaagctgatgctgccgaccgatatcgtttgcgcaagcgactttgcagatgacgccaaagtcggagtattcccggcaagcggtattccggctgagcttcagggacttgacataggacctgatactataaaagcgtacagcgatgaaataaagaaagcaaagactgtcatttggaacggtcctatgggtgtgttcgagatgaagagttatgaagaggggacgaagaaagtggccgaggcgcttgcagagtctgacgctgtaacagttatcggcggcggtgattcggcggcagcgtgctctcagttcggacttgccgataaaatgacgcatatatcgacgggcggcggcgcttcgcttgaatatcttgagggcaaagagcttccgggaattgcgtgcttggaggacaaataaatgagaaaaccgtttatcgcaggcaactggaaaatgtttaaaaccgtggctgaagcgagagattttgcggaagaatttaaaaaaatatatgtaaagaacgatgttcgcgtggcaatctgcgtgccctacacgcagattgccgcgatggcggaggctttttttgatacgggtgttgaaataggcgctcagaatatgcattttgaagatgaaggcgcatacacgggtgagatttctgcgaagatgctgaaagagctcggtgtaaaatattgtatcatcggacattcagagagaagaaattatttcggagagacagatgagaccgtgaataaaaagcttcataaagcttttgctgaaggtataaatccgataatgtgtgtaggagaaagcctttcggagcgcgactgtggcaaagcgtttgatgtggtaaagcgtcagctggtcgcgggacttgcggggcttacagaagaacaggcagcgaagcttgtggtggcatacgagccgatatgggcaatcggtacgggcaggactgcgagcgcggagcaggccgacgagatgtgcgggttcataagggatgttatagaagagatctttggcgatgcggcggcgtgcgcggttgtaattcagtacggaggcagcgtaaagccggaaaatgcgggtgaaataatgaatatgcctgaaattgacggtgcactcgtgggcggtgcaagcctgaaaccgcaggactttataaaaatagtaaatttttaaaaattaaatatatgcaagaaagaagcgggaagcttcgggaggaacaaaatgagttttatttcagatgtatgggcaagagaggtgctcgattcgagaggcaatccgacagttgaagttgagataatcctcgaagacgggagtgaaggtagagcaatagtaccgtcaggcgcatctacgggagtgcatgaggctgttgaactgcgcgatggggataaggatagatatctcggcaaaggcacgcttaaagccgtagcaaatgtaaacgatatcatcgcggatgaagtgatgggttacgaagtgtttgatcaggtaggcctcgatgaacttttaaaagatcttgacggcacaccgaataaaggcaagcttggcgctaacgcaatacttggagtgtctatggcatctgcgcgtgcagcggccgacagcgttggacttccgctttttcagtatctcggcggtgtaaacgccaaggtgcttccgactccgatgatgaatatacttaacggcggctcacacgctgacaatactgtggatattcaggaatttatgattatgccggtaggcgcaggcagtttccgcgaggcgcttcgtatgggcgctgaggtgttccacagtttaaagaatgtacttaaagcgaagggaatgaatacggcagtaggagacgagggcggctttgctcctaacctttcgacaaatgaagaggctattaaggcaatcattgaggctattgaaaaggcgggctacaagtcaggtgaagatgtaatgattgcgctcgatgtagcagcttccgaattttacgaccaagaaaagaaaatttatcgtctcactggtgaaggcattgaaagaactgcggaggaaatgatagattattttgaaatgctcgtaaataagtatcctattatttctatagaagatggacttgcggaggacgactgggacggctggaagaagcttacggataggctcggaaagagagtacagcttgttggcgacgatctttttgtaacgaataccgagaggcttgctgctggtatagaaaaaggtgtaggaaattccatacttatcaaggtaaatcagatagggacgcttacagagacgtttgatgccatagaaatggccaaaagagcgggttatacggctgtagtttcgcatagaagcggagagacggaagatacgacaattgcagatattgtggttggactcaacaccggacagataaaaaccggttcgctgtcaagaactgacagaatagcaaaatacaatcagctcttgagaatagaagaaatactcggagcatccgctaaatatgcgggaatggacgctttctacaatttacgttaatttaacgtataaattggggtaattttattcaaaaaaccttgattttcgtaaattcatatggtacactttagaggttaatcacgtaggaggtaaagtaatgaagactatacttatggtaattcttgcgatagtaagtttagcgcttatagcaagtatacttttgcagtcgagcaacagcgacggactttcgggctctatcggaggtggtgcggagcagcttttcggcaagaaaaagagtaaaggttatgaagctatattggaaaagattacggcggttgcggcaatcgcattcataattctttcgattgtgcttgtagtaatcgagtaaagttatttgtttatttttatttaatttatattataattttgcttttaaagctttttaagaggtatcgctgcggtgcctcttaaagtgtatgtttaaaagcaagaaggaggtattattcaaatgaattcttatgctatcattgcctccgtttgcgctcttgctgctttgattgttgcttttgcacttacaaagtggattggaagcgtagatgaaggcacagacagaatgaaggaaatcgcaggcttcatcagagaaggcgctatggcgtttctatcgagagaatacaagattatggcaattgtaatcgtggttctcttcctgcttatcggatttggactcggcaactggataactgcggtgctctatgtacttggcgctctgctttcagtgcttgcaggttatttcggaatgaatgttgctacaaaaggcaatgtaagaacggcaaatgctgcgcgcgaggcgggtatgagcaaggcgcttaaagtagcgttcagatcgggcgctgttatgggactttgtgtaacgggtctcggacttctcggtcttggagttatttttgttgctcttggagttgactgcgcagatgttattacaggcttcggacttggagcttcatctatggcgctcttcggccgtgttggcggcggtatttatacaaaggctgccgatgtcggagctgacctcgttggtaaggtagaagcgggcatacctgaagatgacccaagaaaccctgctgttattgcagacaatgtaggcgacaatgtaggcgatgttgcaggtatgggctcagaccttttcgagtcgtatgtaggctcaatcatttcagctatcacgcttgcagttatcattcctacggttgtgccggctatcggtgcggaatttgcgcttgatccgcttatgggctcgctcttcccactgctgcttgcggctgtaggtattatagcttccatcatcggcattatgttcgtaagaggcagtgaaaatgtaaatccagctactcagcttaatataggaacatatatcagcggagttattgtaattgttgcatctgttgtactttcaaagacgcttctcggtacatacaactgtgctgttgctatcatagcagggctcatagtaggtatcgctatcggaaaggttacagaaatttacacatcggctgattacaaatcggtaaagaaaattgcggagcagtcgcagacaggtgccggaactactataatttcgggtcttggtgttggtatgatgtcgactctttggcctatccttcttattgctgtgggtattctcgttgccaacgcatttgcgggactttacggtattgcgctggcggcggttggtatgctttcgacagcggctatgaccgttgcggttgacgcttacggtccggtatcggacaatgcaggcggtattgcagagatggcagatcttccggagtctgtaagagagatcactgatactctcgattctgtaggcaacactactgccgctattggcaagggttttgcaatcggatcagctgcgcttacagcgctcgcgctctttgcatcatattcgcaggtggctcagcttgagacaatcagtcttctcgatccgcttgtaattgcaggacttttcatcggcgcaatgcttccgttcctgttctcggctatgacgatgaattcagtaggaaaagctgcaaatcagatgattgaagaagtaagaagacagttcagagaagacaagggtattatggaaggtacttcaaagcctgactatgcaagatgtgtagatatttcaacaagcgcttctttaaaggaaatgattatccctggactgatggctattatagctccgctcgcagtaggtataattatgggtactgaggctctcggaggaatgctcggcggcgctctcgcatcaggcgtacttctcgctattatgatggccaacgcaggcggtgcatgggacaatgccaagaagtatatcgaggcaggcaattacggcggcaagggctcggaaactcatcacgcagcagttgtaggagatacggtaggagatccgtttaaggatacatccggcccttcaatcaatatcctcatcaagctgatgactattgttgcagtagtattcgcgccgcttttcgtacagataggcgggcttctgtaaggcagagcttaaaatttaacaaaaagtaaagtaaaacggctgtaaatttgatttacggccgtttttgtcataaaccggtaaaattacagagcaaataacgcgcgaatttaatataaagcggctttatggtg

SEQ ID NO: 3153 - DNA, 3230 bp, Unknown
  16S sequences of unknown bacteria
cctcctctcgccaatctttacctcattccctcttgactttttatttgcaggctcatccagatagtaatccgtggaggcgtcgaacgcgccggagaacggcaagaagtttgcgccaatcccgttaaaggtgagcggggcctgcgcacccttttgctccttaaaggcggtgagcacattcgtccagtcgtcgatggtttgcggcacttccaggcccagctcttccagccagtccgcgcggacgatcgggccagtctgcacgttatcgatggtgtagccgttgggaatgctggtgctatcagcgatcgggatgaaggcgtagaaagtgccgtcgtccgtggtgcactggcggtacagcgaatccgtacgggtcatcatggcataggcatcgggcgcataagtttccagcaggtcgttgagcggcaggatcacgccgtcgtcaatggctttctgcgggccaccctcatagctgctccagttatactcaatgatgtcgggcagttcgccggagaccagcatcaggttaaacgccgtgctctcctcgcccgtggccggatggatgaattccaggttgaggccgcttgcttccatcacggtcttgtagacggggctctccgcatagctgttcagctgcgaggccgcgttggcggacaggcccacccaataggtgagggtgatgccatcctcttctcccgtccagtagctgccctccgccatggcggccggcgccaacattgccagcgcgatcaccaagcaaagcagttttccagtctttttcatcgtgtgctcccctttctcttcttttctttatgcgccctgtgcaaacccagcgcgcttttcacccctaactatagcgggaaattgcgcaattgtaaaccaacagtttttgtcatcgggcatcattccttgtcattttgccatgatgcagccgatcgcttattgcattgtgcatacaaaatgtgttatacttcaaatacttcaagaaggcggtgagatggacgtgcagcagaaaaagttggggtcttccaaaacgctggcttcctatgtggtttcttatgtggtgatattggtgctgcccctgcttttgtccctcgcctttctctttgcggtgaaagcggaatttcgcacgcaaatggcgcggatcaacgacacggccctgcggcaggcggcggacggcacgcatgccgcactggacgcggccttcagcgcgctcttccgcctttccgaaagcaacggcatccaaaaactatattatattcaccagcccttcaccagcgcacagcgggtggatatcttcacggccatgcgcgaggacatgttgctggcaggttccgccatgcccatggattgttcctttcacatatactttgtcaacggggaatttttgctgaaccatcgggcgcgctatagcccggagttggcctatgaacagctctttgcgcaaagcggcctttcctatgcagaataccaggcgctgctgagcagccgccacgcgcaggacatcatcgatatgggggattccctgctgctgatgcaatcctatccctacacggggaacgtgcccgtggcaaacatgctggccatcctgcccaaggcgcatctggaggagatcgcgcggcaaaatgaatggatcgccgcgggacatttttcccttgccaacgcggcgggcgacgtgctcttttcctatggcacgggaatgggcagccaggcggcctatcattcccagctggcgggcgaatacgggctgacctacgcattggaagccaccggcagcggactttccggggcggagggcgcgcttaccatggcttatcttttcttcctgggcgcggcgctggccgtggggctgatgctggcggcggccttcacgctgcggcgctaccgccccatcgcgcgcatcgccgaaaccatcgaaagtgcgcatccgcccgtgaacgcggaccgaaaagatgaactggcctatatcgacctttccgtgcgcaacatcttgagtgcgaacgcgcagatgcagcaacaggtgctggcccgcaacgaatacatgcgccaatcctatctttcgcagattctcagcggccggatcaaggccaccgagctggatggcgaagcgctggcggagcaccttctgaaattcgaccaggaatatttcctcgtgttcctgctcaccggacaaaaccacgaaccgctgaacgtgtccgcgccgcttttgctttcggaatgcatgaaccgcgcctatcgcgcctacgcgtgcccggtgcgcgaatacgcagcctgcgtgctgaatttttcccagctggaagaggcgccggacatagaaaaggaattccggcaagcgcaaaaggaaatcgagcgccagctaggcacggccacctgcgcggcgctatccaatccgcatgcctcgtatgtgggcctgtacaacggctatgaggaagcgcgctatgccgcggagctggcctctaacgaggcgttccgcgtgtatagcgcaccctatgaggagatcaaatacggctattctggcgatatggaaaaggcgctttcccgcgccattggcagcggcgaccgcgaggaggcccaccgcctgctcaacgacattttcgtgatgcctacgggcatcaagctgagcgttatgcgctatgtggcctacgatgtgcagaattccatcttgcgcatccgcgaatccatgggcctgccctgcgacggcgcaaacgcgccgcgccaggccgaggccattaacaccctgcacagcgcgcaggaaattgtcgcctatctggaaggcattgcgcagcccgcgttcgcgcaggcggaagcctgggaaagcaaccaaaatactctgctgattgaaaaaatttgcgcttttgtggaaaagcattatggcgaggaaaacctaagcaacacgctcgtggccgacgcgatgggcatatcgccttcctatctttcccgcgtgttcaagcagagcacgggcgcgggcctcctggattatatcagcaacttgcgcgtgcagcgcgcctgcgatcttttccttagcgagccggaaacctccgtgaaggccgtgtgcgaccaagtgggctatgggaacctcacaaccttcacgcgcgtgttcaaaaagcacacgggcctcacgcccggtcagtataagctgcgagcgctgaacacacgcgagcgcgaaaaatgaggaaaagtcgtgcgcgaaacaaaaatgtgccggcagccatcgcgggtgttcttgcccaaaggcg

SEQ ID NO: 3154 - DNA, 5049 bp, Unknown
  16S sequences of unknown bacteria
ccgcagtgtcggcgctcaccgctgtgtcgtcgggtgtgccgtcggttgacgccgacgcgtcgatcccggtctcgttctccggaatgtcggacgcggacgtcacgggtattctcgggtcgtccggcgagacctcggagaccgagtcggtcgtgtccggcgcctcgcgtcttgatttcttcgacgccacggtccagaccgacacgaatacgacggcggcgagcattgccgcgagcaggaggtatatcaccgtgttcactgaattcttctttgtttggttttccatgtataagaccagcctttcttgactaaatgttgcgccttgcagacattattgttgccgtttcgggactgtttatacacatttttccgcaaaaaagatattcacgcgaaaaaaacgccgtatcaccgatacagcgtttaatttattattggagattaaccgcgcgcttcatgataacattcgtcatcataaagagcagcacacagatgagcgcgtcaagcagcagatacacgaccgcgctgacgccgagcccgaaggtctgcatcccggtgagcgacctgccataggacagcgcgttcatggcgtccgagaagatattcaccgtcgtgaagctgtagatcgtcatgaggatctgtctcgccgcgccgataagcaggtatccgagcaccgaaccgatgaacctgtgcttcgcgaagagctgtccgaacgacaccgcagcgaaatagctgagcggcgtcatcacgacgctgatgagcatgatgacaacgcacactaccgtgagcgccggaactgaaacgcccatcatcgagacaaacctgtccgcaaccatcggtaaatacatgaagaactcagacatccagtcgaacacctcagcggaccagaaagcgatcgcgagcgacgccgtcatgacgacgtagcaggcgagcagccagaccgacgagacgatcagcttcgagaaaatgatcgtgcgtctcttcaccggcagtgtcagcgtgagatacccctcgtcgccgtatgtgttcatatagaacctgcggatgatgatgaccgaaacgagtatcagcgccgcgatcagcatgacaaaataagcgaacgtcgcgagcccgtacggaaccgtgaagaaatccgcgacgttcccgagcagcaggaacagtctcgacagagccgcgaagccgacaagcccgatggcaacaagcccgaactgacccgccgtcgcgtggaattcgtgtttcagaagttttcctaacatttgtagacctccctgaagagctcgtcgacagtcttcccgtgcttttcgtgtatcgacctcaccgacgcgcagaacgccgccctgccgtccgccatgaagatgacgtcgtcgagcaccctctcaacgtccgaaatgagatgcgtcgagatgagtatcgacccgttctcgctgtaattcgaaagtatcgtgtcgagaatatagtctctagccgccggatcaacacctccgagcggctcgtccagaatatacagctccgcgcggcggctcatcacgagaatcagctgaaccttttcgcgcgtgcccttcgagaggttcttcaggcgttccttttcgctgacgccgagacgacctagcatctcgtacgccttcctgcggtcgaaatcgcggtaaaaatcggcgaagtagtcgataagatacgacaccttttccccgagcggcaggaaattgcgctccgggagataggatatcatcgcggcggtagcgggcgacggagccatgccgtttataagtatctcgccggagttcgggacgagcagtccggcgatcagcttgatcgtcgtggtctttccgctcccgttcggaccgagcagaccgatgacgcctccgcgccctatcgtgaagctcaggtcgtcgagaaccttcttcgagccgtaattcttgttgacgtgcgaaagcgccagaagcgccggacgcgcgccgaggacctgagcggtcatcgtgtcggcgggctgtgtttccgccggaggcatcgctgcctgcgtgtccaccgccgcctgcgcgtcgttcatcgcacccgtctcagcgtcagggcgcggctgttcgggcagaatattgcccgtatctgtgctcttcagattttcatccatcgcgggttctttcctttccaggaaacactgatttaaggttgttttcgcagaaaaaagcccataaatccggggacttttttctgtgaaaacccgaattattcagtgtatccttaaaaaaaccgcaccgcttttcgttgcggcgcggtcttttccgatactgtaagtattatgatatagcggcgagcttgacgagattcacactctcgcccggcgcgccggtaagggtcgcgtagaattcgggggatatgagggttatcctgtactttccgttcttcaggcggtccacgccctcgacgttgtagcggatacctccgcagagtatctgcacgtatgtagatttattgaacatactcttgctcgcgcgcagcttttttatcagctcgtcatcgagcacgatattatcgatatcaatgacctccgcgcggatcttgttgggtcgtttcgtcatttccgaaatggtcagaacattatgcggtacttttgttttcatacaccgtgccatacctttccatagataaaatccgatacgagccggtctgtattgaattgtctcggaacgtcgccggacgctccgttctcgcctccgtttcaccggaagcaatgccgcggtccgccgcgaaacctctatcgcggctcccgtgccggtacatatcgacggacacccaccggcgccccgaaaagcgccgagacgatcgcgggaccaccccgccgtcatcatatatattatatcacaccggattttatttgtcaagtcccgccgacagctttaacagtttcaacaacactttttctattaaactttacattccgaaaaaaacgacaaaagcgccccggaatcactccgggacgccagaaaaattattccacagtcgtctgtatgaaatggacgagcgtctgggactctccgtccgcggtcagcttgtaggtgtactcgcagaccaccgtcgacgccattccgtcggttccgatgtagtagttgtacgcgaccttctcgcagccgtatgtcatgccgtcctctgtcttgtcgaacttcgcggcgtacgcgtcgttcatcttgaccgcccagacggtgactccgtcgttcgcctcgatcttatcgacgctgtcaatatcgctctcggcataatcgaccttcaggttcgcgaagatatccggctcctcgctcgcgtcgacggccttgccgttgcgggatatcgtaagcgatccgttctcacgggtcgcctcaaaaagatcgacatcgccgcttgtcagcgactttgtgctctcggtgaaatcatactcgagcgcgtcggttttgacgtactttatataggtctcggtagttttgaggaggaccttgtcaccgatctccttctccggcttgattgtctcatatatcattatctcgccggactcacgagacgacgcggactcacagcccgcggtcaccgccccgtatccctcggatatcctcttgtcgttccggcagccgcagaaaagcgcggcggcaacgcacacgagcccgagcagcacggcggttttcctgaattttatcatgtgattctccagattgttattattttgccggaccagagaccggatcataccgtctatacgaccgtcccgagccatctctcgaccgagtcgaaccgtctcaggatatgccgcttgatctcgtcggctataagtctgtgcccctcgcgcgacggatgtatcccgtcacacgacatcagcgcctccctccgcctgtcggcaaggaaaggcgaagtgatgtcaacgatcggcaccccgtgctccctcgcgagggcgaacacctcgaggttgtacctctcgtgccagtcatgtatgaactcaatattccccgcgagccagcgcaggatattgtctttcccgctctcgttcatcccggcggaaaaagtctcaaaatatctctcggacacgatcggcacgagcgacagcataaccggcttcgagccctccgcgcgcaccttatcgataagcccggcgtatatctcccggaactccggaagcggcgtgttcggaaaatgcgcgtcgtccggcgccgccgctatggctttccagtcatagtcgcagtcgttcccgccgaactcgagaagcgtgtaatcatagtccccgagccctccgcgggatataatccggtcgagcatccgctcaccgccggaaacagtgcttccgaaccgtccgtcgttctcgacggaaattccgagctccgcggcacagagatccgaaaagcgcccgtcaagcacccggtaccgcccgttctcaggcacgacgcccttcagaacggaatccccgagcgcgcagatcttcatcataaatacttacccgtaaaacggaagaactcagccctttatctcgagctgtctcgagcggctcgccttctccgcgaaaaggtatccggacgtcggcggcgtgtaagtaatggcgttagcgcccgccgcgatggtctcagatattgtcttgtcgttcggtccgccggtcgcgattatcggcacatacggatattccgcgcggatactgcaaatgatatccggcgtctcgatggagcccgaaacgttgagtatagacacgcccgcctcgagtctcgccttgaaatcggtgttcgccgagatgacggtcatgatgaccggtatatcaatagcggcgcttatctccgcgaccgcctcgttcgagatgttcgcgctgacgacgacgccctgcgcgccctgatactccgcgtgcttcgcgaggttgacgacacgctttatgccgcccgccccggacgaggagccgatcccgcagaacacggggacatccgccaccgaaacgatcgcctgtgtgattataggctgcggcacgaaaggatacaccgcgattatggcgtccgcgttgttattgcgtatagtcgcgacatccgtcgtgaatatgaacgagcgcagaatccgcccgtttat

SEQ ID NO: 3155 - DNA, 32759 bp, Unknown
  16S sequences of unknown bacteria
taaattatgatttatcgcgttattgacttctatctttctatcgattttttccagtatatctactatctttttttgctcatccaatggaggcaacagaatagtcatacgttttaatatccaaccagacaaaccacccctcgtgcttgtcccatctgacaaaagtctgaattcctcatatctattatccaaattgtaataaaggaacaacggaagcacaaacctttcatttgctttacacgcaattacagactgatttaaaaaagtatccgtcattaaaaaacttgcctgacctcttgtaaatccttgacctgctgtcgcaataaccgtgcagccttttgttgcaagtttcgtcgatgaatttttcactccaatttctgttatttttctttctgtgtcgtaaataaatctttgcgatgtttcaccagaggataaccactttaatgttccattccaatattcggaatgcatggtagacggagtccctccactaaagattctttcacagacctcatcaagggtgtattccttccattcagatttcatacccaatcgcccccaatttcttcctgatctcatcttctaactcatgagatttcttgaacatttcggacaattcagaagtaagccgagtcatcttttcgtcgaacggctccccatcatcctcttgttcttcaatgccaacgtaccgaccaggtgtgagaatataatcctgcgccgctatatccgcagttgttttaacagcacagaacccttttacgtcctccaacgtcccgttctgaaaagcctcgaaagtatctgcaattttctgtatatcctcatcggaaaaatccctgtgtttccggtcgaccatatgccccatcttcctggcatcgatgaacacggttttccccggctgtttcttcccttttgatatgaaccacaacgtcacgggaattgtaacgctatagaatagttgcgtagggagagcgacgataccttcgatgaggtcgtcctcgatgatgtttttacggatttccccctcaccgctggactgtgaagaaagtgcgccgttcgcaagcaccagaccgatcttccctctcggcgcaaggtgatatatcatgtgctgaatccatgcgaagtttgcatttcctgcgggaggcgtaccgtatttccagcgtttatcatccttgagtttgtcctgtccccagttggaaaggttgaacggaggattcgccatgataaagtctgccttaagcgtgggatgcaaatcgtcaaagaacgtgtccctgttgtatggaccgaggtctgcatcaattcctcggattgccatattcatctttgccattttccaggtatcagcattggattcctgtccgaacacagagatgcctgttctattcccgctatgggcttgcaggaattttacagactgaacgaacattccgcccgagccgcagcaggggtcgtaaacccggcaattttcaaacggctttaatattgccactatcgttttgactatgctcgcgggcgtgtagaactcaccgcccttaacgccttcgtatgcggcaaactgcgcgatgcagtattcataagtacgaccaagcaagtcacgcccctggtcgacatcatccatcttgatattattcgtaaataagtcgaccacttcgcccaaaactcgtttatccaagtctgggctattatagtttttcggcaaaacgttcttaagtgcagggttttcagcctcgatggacctcatggcttcatcaatgaccttgccgatttcaggcgtgtgagcagccgaagcgataacattccaccttgcggtctccgggacataaaacacattttctgccgtataagcatctttgtcattttcaaacccatccccttcttcgacaagcgttttatatctcttgtcaaaagcacaggacacatatcgtaagaaaatcaaccctacgataacctttctgtaatcggctgcggggatgtgtccccaaaggacacaggccgcatcccaaatttgtttctcaaaaccgatattcgcgttgcttttttcgtttgccatttatctctctccttgtttatggcagtagccataataccagcattcatatggagtcgaacattgcttgcctggctccactatcacctcttcgtcctggttttttattttcccaagccgccaaatattgtcgttgatggtttcggaatactcctttgcctttttactgacatcttctatcatgaacggattattctcgtctggtccgtgatatacgatgaaacactttttcagacgtatcccgctccgcgtcactatgtatcgctgaaacccgacgtcctttacgaactggtcttcgaccgtcccgcagttcttgacctcatacaactcatatccgccatctacttttttcaaaatatcgacggcgcaataatttccataatatcggaaagcggcctcgcaaataacaggtgttccattgtggatacactcgttcgttttggctatcattgccgcatagtcgagccgcccgtcgtcgcggtaagttgttgtttctacgaacgccccgaacatccccatagccgaatcgccaaacctgttgccctcatcgagccgttcctgcacctctgggggaatcaccttctcctctggtttatgtttatcgagccaaagcatttttgggcattgcatccctctcatatagtcagtcttggttacgcccatttattcctcttcttcaggcgcaatgaaatctgaaacattttccacctgtataacttccgtctcgccgtaccacaaatcatgcaaatagaactcacctataaaagcaccacaatgtggacacacatttgccaaatgagtttccccagtaaccccgctttttctttcctcgagaacaacccctttatcccgcgcgatttggcacatctcatcactaaaatcatccggcgatatcggaaaaccatcaattaacccatacaccgaacacattgttcctccgcacttccaacatgaagtttgatccgagaaacagattttaacatccggatgcgttctcttgtactctatctccgatagccctttttctctcaattgctcatctccaagagcatcgcataatgcgtgaagttgttttttcgtgggtaaactttcccccttttcgatataggagattgttcgagtatctatccccgtcttcgctgacaacttaatacgggaactgtattcttgattcgattttctcacatattggagggcttctccaaagttcatcgcagatatatctttcatctctatcacctgctatgtataaatttttttatcagcgtaatcccgaccgacacgacaatcgtcggtactcccaaataaagcgcaatcattcctgccggagtaaacattcccaaggcctgtttcatttccatgaacaggggcagattctcaaatatcatggtaaacatcccctcgaaaaaagtcgagatggttacccatattaccgataaaacttcaaaaagtatttccattagtctccttgcttcaaatattttttcgacagtttcgctacatattcagtcatctgcaatactacagattgaggatagacaaccgtcagtttgtcgccaaaagaacagcaccatccgagaaacgccggactaatctgcacggatatatttaactgcgccgtcccatctcctctgtctacgagttgcacatcctcgccaaatttgtccatgacggcatcaataagggtattgtcgataactatgcttacccgctcctcttgccccacaaacatcccgaaaacttgtttcttatgttcggtgatgtcaaaccctttggcgcaatcggcaggggtgatatcttctttctcaacctccacagcatccatccggtcgatacggtagtgtgtcatgttcttgtatttgtcattgtaacataccaagtaataattatcattcgagaaaaccgtcgcatagggattcaccacataccgtttcttgtctttacggaatatccgttcccctttggcgttatagtcaaaatagaaaaaggatacctttttcccatcgattattgcacgttcaatctcattcacgctatagtatatcgcctcatttgtgtgcttggtaatattgaagcgcatgatattattcttgagcagttgcgcccggtgactacctgcgagagctgcaattttattcacgagagcatctgtttttttaggagtaatgaaactggcagcctgaaccgcatccaacagaatacgaagttcgggtatatcaaaactgcgatccacaacgaaatatttgttgctgattcctctgctatgcaaaatctcatacccgaattcgtttaaaagttggatgtccttataaactgttctacggtcgcactcgattccctgttcagcaagtttccgcaggagcgttgatgtttccattgggttgtcctcatctgtttctgtccggaggatatcccatattttgaacagtctgatttttgagcttttttcgcgtctcgtaaccatattttgctccattgtcataattatagcacattcttcctcttttgtaaataccaggttgtacaaaaatgacgactatcttttataaaaataggacggccttacgaccgccctatctttgttgatgttactcttattcttcctcctcagaggtttcagccttacttccgtaccgcttgacctcgacagcctggttcagattgtagatgatggcgttagattcgggaactgccacgccgtgtactctgtacgacttatcgtcgaaccattgcatcatcttacgaatcgctgcatgggcgggcttattcgtgacattcagcacggcacgtttttcctgtgtttctttcgggctggggaatacgactgcgttcctgtcatccgaatcacatacctcgattgcaaacctcttcgtgtccgtatcaattaaaaaacggatatgagtcgggcgtttgagttcgtcagcggtcaccgcattgaacttgaagtatttgttcgtgatactcaccgtcgagtcgctcgcgttaccatacaattcgattactttgaaacctttcagcattttttagtcctcctgctttttgctttaattgataattcctttaactgatcgatgtcgatcacctccacctcggacgggataggaatgaaacccgtcaaggctcctttgcgtatcggtttgaacttgacccgcgcttcttgttcttccgttctacgccgcctgttgcctccctcttgaaatattttctgtactttctcaaaggtactccgcgatacaatcggctcatgataattgcgaacaacgtactgattcgccagtccacgattttttttgattttatgcgtaaacaggtcaaccgtaaccgtcttctgcattctcatttcgcccatgtacttttcgttatggagaatactgcacacgaccgccgcttgccataccgtcttccctttcggggtaggtactttggcaacagtcaaggctgtggctatctccgttgtacttttcccctccaggtaggcatcgaatataaatcgaactatttccgcctctttctccacgacgaagatgttccctttctcatcggtgtcataccccatgatcgcccacatattgttgacgggaataccctttgcgaaccttcttcgataagaccacttgaggctttcggatttctgcttggattcctcctgtgcgacaatgctcaatatcgtcagaatcatctcgctgttcggatcgaggctattgataccctccatttcaaaaaataccccaacgggcggattcaactgtttgagttttcgcacataaaaaatacagtccaagacatttcgtgcaaaacggcttatcgactttgtaacgattaagttgatattgcccgctttacactcctcaatcatctgcaaaaattgctttctgtgcgtgaccgatgtcccggaaatcccctcgtccgcatatattccctgcagtgtccaattctcgtggtccttgatatactgggtataatgctggacttggagttcatagctgctctgctgcgattcctcctctgtactgacgcgacagtatgcgcacaccctcatttctttgggtgtattatcggggagggcagcatcggctgcctctataacttcaacctctacatgattcgctccgttgtaagcattttttatcctctcggcagaggcggagcgttttctccgcctctctacatttgtttccattttctcacccccttctcgcccttgatttgactatagtcataagcgaaccgctgcgcgggcatttttatgatagataaaaatacccagttaatccatcaaaaacggggtgattcgacaaaaaaagtgtccaaaaaccaagttgtataaaaaatgaaaaatcccaacctcggttttaccaagatcgggtatgatttgttgatactatttacctgtaaacgctgattgtattaaggatatccgacacaagatttttcccgctacgaacatcgctcggtgtcttatgaagggtgatgacgtacttgtcgttccctttgtatatgagcctgtagtggttgctgtcggatattaattcaaagccgattgcctttaactcgagaaggtcgcgttctttgatagtctcccctttggatagcacccttttcaacgtctcatcgacctctttcccctcacctcgtagggcattgagagcaagtattccctcgagaagttcgtatgacctcgtattcgtttccgttgtccgtaaagcctttgccaaagtggtaatgacgaggtcgtattgctctcctgtaaaaaattcatcaatgggcgccgctatcagcattttccgcccatcgtctttcgaatcaagggcttggcggaggctctcattctgcgccgccagcgacctattctccattaccgccctgtgcaacttttctttggcttcttttagttgttcctctaatgttccgttttcgttaatagtctcatttaataaatcctcgctttctttcgctcggtgcgctaatatttcactatgtaattgttcccacgaaactccatcggcttctgtctgcgccgttgagtaccccgccacctcttttattatcgccgcattgactgaaccatatcttcgccaatctgacggtcgatatccttttgtattatgcgagttaggaaagtatattccgatgtgtccgttaaatggatttttcctatttgtccgttcttttagttcttccagatagttgtcgtcttcttctgccacaacaattccgattccggcaaggtccttcgcaagccattgcacatcgacctcatgacccgccctatcaaaaaacttggaaacgaacaccaatggcagacttcctcggtatgagccgtttatggcatcaaccactatgtctacctctttccctgtcaacatgacaggttctgccgatataggaagtacatcctctttgagcaaatcctcttttacaaatgcccgtataacctctgtcctcacagtcgggatttcattgaatcccgtcgtatcgcccaggcaatttatgttgatatataccttgctttcagactccgcttcttttaagattacctcggtgacccatgtctgttctctgtaaatatgagttaatctgcaagcctcatatgtcgcatcttgtcgcgtgagtataaaagattccagtgtgcagtacccagcttttagcgtggtcggtttcgctgaaatctcttcagtttcatatcgctcgccaacctctttgcttggcggtcccgccttgagccactccgcaatcgtgtgtcgaaaatgatctggtgagtaaccgtctttcattgccaaccgtgccgataacactttcatggcagtttcctccttgcctttataataccacaaactccgctaatagtcaatttgaaagggtgagccaatccgctgtaccgcgattaaaaattaccccttgaaatcagacttcttatggattacacgtcattttctaaacggcaaaaaggttgtattttttgtgggaggattttgaaactgtttaacctgcaaagtggcaggacaccctattttgtggtcattttgccccgaaataccctatttagtggctattttatgattagacttttgtacacacaacaaaaggctcgatcacgtgcacccgctcgtcaaattcgggatacaccagccccgacgacgacgcaaatttcccgtatcgccgcgcctcaagctgtccctcgtccatacagctttccaaaagctctatttcctcggcgggaaggtagggattgtcgccccactccataaactcgtaccacacctcggggtcgttgtgccgattgagaaatatctcctcatagacgaaagtcaatcccttcagcggggtcatcgtcccgaagatctccccgcggcgatcgacgacgcgcatgcggcattcctcgtaaatctctttcggcggctcctcgtcgaaccagacgaaatccagcgacgcgccctgaaacttttcccgcccctggtcgcagctcttaaacccgatcaccgatatccccccaaacgagtttctcacgcggataaaatcgataacgccgttttcggggctgtccttccgtccgctctgcatgacgatttcctcgatcaaatcccgccgcaggtaatataaaacctttttctgcgccacgtccctctgcacctgcgcggagagggacacgacccagccgcatacgtcccttttgttttcgcggtagggatgaatgccgagcgccatatacacgcactccgccgccccgcactccgttttccccgaacggttccctccgaaaacccaacggttgcgctttttacatctgtgaaaggcaagctgtttttcgtgcttcctttcgcccgtgttgtaggctgccagcttgtcctccgcccgccgcctgttcagctccgcctctatgcggcacagcttttctacaatttctttcatatttcccgccaattggtcaaaaactcccttttccgtatttttataatagaaagcatgaaaaagtttatcttgtcggcagttctgccgcttctatatttaatctgcgcctgtctttctcctgcggtgcatgtaaaggtgcgggcagaggacaacggctacgcctgcatccgttcggaaaacgtatatttatactccgaggaaaacgataaaagcggattgtttattctgccctgcacctattatgtcaaggttctttcctcgggggtcaaatactcctacgtcgaatatctttccgacggcccgaacacccgaaagatcaacggttattgtaaaaactcggaactcacgttcgtggactatgttcccgtccgcccctatctttactacacgctggacgtcacctattacatagaggatgcgtcgccgtcgatcaaggacgacgattttttgtccacgatcacgattacctgcgcctattacggcgaataccgcgtcggctccaagctctattgctacgtcctgcgggagggcaccttcggctatattcccaagcccgccgacctctcctatgagctgaacgacgaatacgacaaccatactcccgacgagtccgacgcccccgcgggaaactttggcgatcacgagacgatgcctcccgcacaaatcgccattttggttcttctgtgtattcttgtccccgtcatcgcggcgctcatcctgcggccgcccaaaaaaccgccctatgagtcggaggaataaccgtttttctcccgttccttatcccgttcccgccaaaaaccccttttttccgattttttcaaagcggttgaaacgtcgggttttcaagttacccgtcccgtttctttccctttttccaaagctcccgaaaggtcggtcccgcactttttccgtacagaaattctaccagcgagtgttccttcgcggcgttccgcccttcttttccggcttcgataaagcgatagacggacatcagccagtcgaaacgcgcataatccgaaaaaaaggtctctttcgtcaatccctgtgcttgcagcgcgcccgaaaccttcttcagaagcttcgcctgcctgcgatagtagtttctttcgctgcctatttccttgaagtccgtctcgccgcaaaattgcttcaacctgctttttcttcgaaaataccgaagctccagcaaaaacttttcctctttctttagggcgccgatcgcggcgtccgtttttcttttcagctctccgatcaatcccttgcggataatctcttccgccagctcttccgaaagcctttccgccgtcgtcctgtaatcgtacgacatatacgccctgttgcggatatgctcctcgcagtccttttccagcctctccagccgcggatatacgtataaaaccgcctttacgtaattctccaattttgtctcctccctctttgcgcagcccgcgcctcctaagcgcattcattatcccacgttttttgcgtttgtccagccgactgtgccaacttttttataaaatacaaacattcgttcgtattttagataattataacacattaaatatgacaaacgtacgcatgttttaaaaaaatttttccattttttttgaaaacgccccgaaatatggaaaataagaaagcgcaaaaatttttttacaatcaattgcgttttctgtcgtattatgatataatttgtatatgaaacgtttgttgacggcaattttatccgtttgcatgctgagtgcttccgtttttcccgcgggcggcgcaattttttcgcgcgccgaacagagcggggctgatttcctttccgcggcggaggacaaaaacaaagccgatccgcttttaccgtccgtcccgcaaaaggaatatctttccctttccgcacgagaggataacaaggaggacgcccttttgcttcccgcctcgtacgagcaatatctccccctttccgcgccgtccgacgcagcagtgacggaggcctatacggcgattgcggacggaaatctgatttacgtatataaccgcggcgaaaacgaataccgttgctacgagcataccgccaatgtcgatgcggaaaaaaataacgtggcaaagcttcaatttgccgaaaacggcgtcctctactttttggacgcctccacctatctctatacgctcgatcccgcgacgttgacagagcgcaagacttcgctcgtatgcagcaccttcactattttttccgacgtcatctattttaccaacgtgtcctcgtcgaaatcgcagatctccaaaaccaccctggacaacctcgattcctccgcggccgaatcggtggtgggcggaatcacgtccaaacccgccatcacgcaggacaacggcgttttatactatacggagggcggaaaaatcctgtgcaaggcaaacgattcctcttttgcccgcagattgaccgaaagcgaaacggtggtctctctcgccgtttacagcaaccgcctgtactatacggacacggcgaaaaatctctatgtgcgcgatctcaacgaaggcacccttctcgataccttcgagggcggctattccgcgctgaccgtttccgacggttacgtttatgcggtaaaaaacgacgccgtcaggcaatattcccctttggataaagcctttaccgattacgaaatctgcgcttcctccgacgcggaaaaccgactttcttccgccgcagccacgctgcttacgggcgatcttttgcttacggcggacaacggcaacgatcgtatttccgtttacgacaccaaaacgaacgcttatcgttccatcgaaaccgagctgaacgcgacgatgcttgcctccgacggcgccgccgttctcgcggcggattcggcttccgcgattctctatgatctggcgagcggaaaaaaactgcataccttcgaaaactttgccagcgacctcgcgggaatcgccgcctcttacggaaaatattattttatcaccgacaacaactacttttattgcgcacaacacgacgaagaaacgggttggaaggtaaaatccgttcaaaacccctattcgtatccgacgcgcctgctggcgggagatatctacggaaatttatacgtcgcctacgccgacggaaacgtttattcctttacggaaaacgaatttatcagctctcagcccgatatgtcgaaaaaggaaaaagtctgcaccgttcccgtacaggcggaaaagattgccgtcgattacgagcagaccgtctatgcgctccacaaaaaccaattgtataaatacgcacatgaacaagcgagctattctttaggtaaaacgctggtttacggccagacggagtccaccgccgtcctttcctttgcgttcggcgtagaggagcaggcggtgtatctgctctatgaaggcgactttgcggtgcggacgtacgacgtcgatctgcccaccgtcaaatcgattgcggtcaacggcgccgacgaagccatcttcagcgaggaaagcgcctctttttccgtcattcagacaaaggaaaacgccttgatggtcaatttcgacattgccgagcttaaaggagccgaggtattcccctatctttcctttgtgagagaaacgcaaagcagaaccgcgctgaaattgggagaaacggacaaatatcatttgatcgcggtgttcgacgaagtctccaaaagctactcgacggcgcttatcctgaaggactactgtgaaagggaatattccgaagaggaatatctcaagccgcccgcagggtttaccgacggaacgggatatctcaccaacgaggttttcctctacaaatatccctatctaaccgccttgctgacggtgcaaaagctggataaaaacgccgcggtgaccgtgctgggggaaatcgacaccttggattaccgctattattacgtgtcttatacggacgaaaacgggacggtaaagacgggctacgtgcctaaagggtacgtaacgaatttcaacggagcgccgcccgaggcggaagccgtcgaatacggcgcggcggataccgatttcgattccctttggcgaatgtgttttctgcttttgggctgcgcgtgtatctgcgtcctcgccgattatctcattttgcataaacggaaatcataaaaaacaggcaacggaaaatttccgttgcctgtttttaccattccctcttgacaaagataaaattaattgatataattgtattaattaatctgcaagggggaatttttttatgcctggaattatcgccattatattttctttggcaatcattattttctgtattatttaccttaaaaaattttggcgtttcagaaacaaaaaattcgaaacgctcgatcgcttcgacagagcggtgattttggattatttagaaaaacatcattataaaaaaacgcccgaagattttctgaaacgtctcaaagttcaactgatcgctttgataatccttctccttttgataataggaatgtggatagctatctttttatatcttcttttgtaaagccgtctattattaagtcaaatcccgcccgaggcataaacctcggacgggatattttttacttttgattttacgctcagaccaattcgattacggcggtttccgcgccgtcgccgcggcgctcgccgagaaggtaaatcctcgtatagccgccgccctgctgcgtctcttcctttctcgccgcatacttgggtgcgatttcgttgaagagtttgtccatcagcgggtgctgaacgtcggccgtccgcgccttgtacgcgctcttcttttcggcaaagcccttgatctcctgaagatcgtaggtcttggccatgatcgcgcggcgggcggcaagcttcttggggccgtccttgatgttggtcgccttgaattccttgccttttttatccgttttcgtcacttcgaattcgatattgtcgtcgtaggtattgacggctttggtgatcaatttctcaacataggatctcaattccttggctttcgcggccgtggtttcgattttaccgtaccaaaggagctgggatgcctgatttcttaaaagcgccgttctttctttggaagttcttcccaatttaccgggcataatatttaatcctcctgtttatttaatgagagaccgtaagactccaatttctgaatgacttcgtccagagattttctgccgaggtttctcaccttcagcatatcgtcttccgtctttttggtcaagtcttctaccgtatgaatattcgctctcttcaggcagttgtacgagcggacggaaagatccatctcctcgatcgccattttgagaacctgctgctgtttgtcgtcctccgtcttgacaaggatatccatgcctttgatcgtgtcggaaagattgacgaacagattgatatgatcctgcatgattttcgccgcaagggaaataatttccttgccggaaaacgttccgtccgtccatacttccagcgtgagcttgtcataatcgacagcctgcccgacgcgcgtaggttccaccgtgtagttgaccttctgaacgggcgtatagatagaatcgattgcgatataatcgatgaccggttgtttgttttctttggcgggcctgtagcctctgcctcttccgacggtgagctccacgtcgaatttgccgccttcgtcgatcgtacaaatgtactgatccttattgatgacttcgatctcggcatccacgttgaggtcttcgcccttgagttcggcggggccttccttgtagatgtgcaacaccttttcgtagtctttatcgacgaccttcgtctttatcgcaagcgtcttgaggttgaggatgatctccgtcacgtcctccttgacgcctgccacagcggaaaactcgtgcttcacgctgccgtccagaaatttgatcccttccacagccgcgccgggcagagcggaaagcaatattctcctaaggcagtttcctatggtaagaccgaaacctttctccaagggctcgcagacaatcttcgcgtaagaatcgtcgttttcgaggacctcgagtttgggcatatccatttcgatcattatgctacctccttaatacgtttcaattatttggagtacaattcgacaatcatatgctccgcaatctggctgtcaacatcttctctcgtcgggagtgccaatacctttccttccaatttttctctgttgaactcgacccacttcggcagagtgcttcccgccttcgtctccttgagttcggtaaaatatttattgccctttctgttttctttgacggcgaccacgtctcccgcctttacgatgtaggagggaatggtgacggttttgccgttgacggaaagatgcgcgtgattgacgagctgacgagccaacgttctggagggagcgatgcccatcctgaatacgacgttgtccagccttctctcgaggagggaaagcatgttttcgccggtgacgcccttcatgcggtcggccatttcgtaatacttgcggaactgaccttcctggacgccgtaaatccgcttcgtcttctgtttttcacgaagctgaagtccgtattcggagaccttctttctgcccgcgccgtgctggccgggagcgaccggacgcttattgaacgggcatttctccatgtagcatttatcgcctttgaggaaaagcttcgcgccttctcttctgcaaagcttgcattttgcttctctatatactgccataatcttttgatagcctcctgattaaactctacgacgcttgggcggcctgcagccgttgtgagggatgggggacacgtcggaaatcaacgtgatctcgagatcgcacgcggagagcgcgcggatcgcggattctctgcccgccccggggccctttacgtaaacctctacgcttctcaggccgtgttccttcgcggccttcgcggcagtctccgcagccatctgcgcggcaaacggggtgcccttacggctgcccttatatccgagggagcctgcgctcgaccaggatacggcgtttccgttggcgtccgtgatggtgaccagcgtgttattgaaggtggactggatatgaacctgccctttatctacttttttaagttccttacgcttacgaggagcggatgtcttcttagcgtttttattgtctgccataatacttgatctcctcctatattactttttctttccggcgatagcgcgcgcggggcctttgcgggttctcgcgtttctcttcgtgctctggccgcgtacgggcaagccctttctgtgacggatgccgcgatagcagccgatttccataaggcgcttgatgttgagggaaacttcgctgcgaagctcgccctccacacgtacgttgtgatcgatatattctctcagcttggatacgtcgttttcgtcgagatccttcacccgcgtgtcgggattgatgcccgtctccgccaggatttttttggacgtagtcaaaccgataccgtaaatataggtaagaccgatttctactctcttttctctgggtaaatctacaccggcaatacgtgccattgatttataacctccgttaattgtaatgggtaatttttatttgaaatctatcttgaaacaaatgcgccgcgcgggcagtggaaaatgccccctgcgaacccatcgtattattttcggaataaaaagttcctcgttttcaaacgcaacaaaactgagtttccgtaaatttttacggaaattcagcttgatttacgttattttttcttgactttgcggcctcgccggacgtctgtcccgtttttcagtcgcataaaaagattataccacaaaaaccccgggattgtcaagcgtttttatcagccttgtctctgtttatggctcttgcttttggaacaaattaccataactctgccgtttcttttgatgactttgcacttatcgcacataggttttacagaaggtctgactttcattgttttttctccttgaattattgctttatgctttaacggcgccttacgacttgctgcgccaggtgatccgtcccttggtcagatcgtacgggctcatttccagctttacgttgtcgccttcgatgatcctgatatagttcatccgaagcttgcccgaaatataagccgtgatcgtatgaccgttggaaagctgcaccttgaatgtggcgttgggcaacgcttcgatcactttgccttccgcttcgattacatcgtctttcgacacagaaattccctccgattttttattatgatttctccgcttttgcttttcttcagacctcaaagggtcaggatttcgacgccgtcctcgcgcaccaccaatgtgttttcgtaatgcgccgcgggcagtccgtcctgcgtcaccgcgccccagtcgtcgtccaaaagacgcacgcgccaggttcccattgcgatcatcggttcgacgcaaagcaccgtgcccgccttcaggcgcacgcccgtgccctgcttcccgaaattgggaacggacgggtcctcgtgcatttccttgccgatgccgtgtcccgtataggaacggatcacgccgtagccgaaggattccgcgtagctttgcactctgtaaccgatgtcgtagagcggcgtgcccgccttcagcccttcgatgcccttgaagaagcattcctcggtgacctcgacgagctttttgacctcgggcgagacgctgccgatacaaaaggtgcgcgcgccgtcgccgtggtagccgtttttatacgcgcataagtccacgctgacgatgtcgccgtccttcagaatcgtctgaccgtcggggataccgtgcaccacggtttcgttgaccgaaacgcacgccgaagcgggaaaaccgccgtaacccagacaggaaggatacgcccccgacgaacggatataccgctcgacgagttcgtccacctctttggtgctcatgcccgccttgatcctcgaaccgacgaattccagcgtatcgtggacgatcctgcaggattcccgcatcaaatctatttcgctttcgcttttaacgtgaatcatattatcgtctgtccagctcgtcgagctttgcggccacttccgcgaacaggacttcggcgggagcctcgctgcccgtaaagttgagcagtatgcccttttgcgtgtaatattcgatcaaaggagccgtctgttccttatagacgtctaaacgcttgcccaccgtttcggggttgtcgtcctttctctgatacagcgcgccgccgcagcgggagcaggcttccgcgccgttcagcgtggaaacgtgatagctttcgccgcactccttgcacacgcgcctgccgcagagccgatccatgagaagggaaaaatcgatgttgatatttaccaccgcgtcgatctttgcaaacgtgtccagagcttccgcctgcaccctcgtgcggggaaagccgtcgaggagataaccgtttttacagtcctcctttttcagtctctcttccacgattttgcaggtgacttcgtcggggacgagctgccctttgtcggtataggattttgcaagcagcccgataggcgtctcgtttttgatgttttctctgaaaatatcgcccgtagaaatatgaggcatgccgtagcggtcggaaattttcgtcgcctgcgtacctttgcccgcgccgggagcgccgagtaaaataatattcattttcaaacttctcccttcggtttgttttttacatcgggtatttttttccgcgcccggagccttgcggccccggggtcggaatttgtttttttacttcaaaaagcccttgtaattcttcatcatcatctgcgcctgcaactgcttttcaaattccatggccaccgagacgacgatcaggatacccgtcgtagagaacacgttgacgaggtccatggacgcccacgcgaaggcgagggaaggaatgaaagccacgagcgagagatagatggcgccgaacagcgtgatgcggttggatatctttttgagatacgcttccgtcgcttttccgggacgaatgccctgaatgaagccgccgttctgctggatgctcttggagacgtcctcggggttaaactgcatctgcgcgtagaagaacgagaacgcgaaaatcaaaacgcagagaatgagcgaataaatgatacgtccgcccgcgatcgtcgaggaacccgacatccatttcgtccaccaggtatagaaaccggaattgggccagaacaagcccgcaatcatctgcgggaagctgatgatcgagaaggcgaaaatcagaggcatgacgccgctgcccgaaatcctgatgggaatgacggacgactggccgccgtacatttttctgcccttgatctgcttggcgtactggacgggaaccttacgttcggaaagatcgacgaatacgatcgcaaagaaaatgaccgcgcacacgagcacgaaagccacaagctcccagatcgcgtcgccgttggtgctggggatctctttgaatttattgacgatcgccgtgcccgcagtggcgaggatacccacgaaaatgatcatggattgaccgttgcccacgccgtagtcggtgattcgttcacccagccacatgacgaggagcgcgcccgaggtatagaccacggtcatgaaaagccccgccagccacgtctggtcgaaaaagagctgcgtcttgatggaaccgctggagccggcaaagttgacgatgataccgatggattggataaccgccagaaggatagtgagatatctcgtatattgagaaatctttttctgtccctcttcgccctgcttggagagcctttcgagcgggggaatacccacgcagagaagctgcatgataatggaagcgttgatgtaaggcccgatacccagggcaaacagcgtaccgttggcaagcgagccgcccgtgatgctgttcatcagattgaggaaatcgtttcctttaatgctgtcctcaaacgtcgatcttgccaacccgggcacagggatatagcagccgatacggaagaccagcagcagaagcagcatcatccataccttacgccggatatctttgactttgaaagcattgattaatgtctgtaacatttttttctccgatattgggtttttgattgagtgaaaatcactcaaagagacccgcgtaaaccatacgcggctttaaggagaaataaacgcgaactacggaaaaccgccttaacgcaaggcaatcttccgtgtttcctgtttattaaagggtctctgcggtacccttcgccgcttcgatcgcctctttggcggaggcggagaatttcgccgcttttacggtgagcgaaaccttgagttcgccgtcgcccaaaactttgagtccgcagttgttcttgacgtctttcgcaagtccgttttccataacgaagccgtaatcgaccaccgttccctcgggcagatccgccagctgggaaagattgacgataacgtattcctttttgccgttatggttgaaccctttcttgggtacgcgccgcgcgatgggcatctgtccgccttcgaagccgggacgaacgccgccgcccgaacgggcccactgtcctttatggcccttgcccgaagttttgcccagccccgaaccgataccgcggccgagcctcttcgcaggccttgttgctccctctgcgggagaaagagtatctattctcatgataaagctccttagatgttttctactttgacgagatgcttcaccttggcgatcatcccctggattgcgggcgtgtcctcgagttccctggaagaacggatcttcttgagaccgagcgccgccacggtgcctttcaccgccgcgacttccccgatcgtgctcttgacgagcgttacttttattttagccatgtttcagtccctccgaataaatcagcccaggatctcttccacggtcttgccgcggagagccgccacttcttccaccgtcttaagctccgcaaggccggccacggccgccttgacgcagttgccggggttttgggtgccgtgggatttcgtacggatgtttttgatcccgacggcttccatcaccgcacggacggggccgcccgcgatcacgccggtaccttccgcagcgggcatcatcagcaccgcgccgcggccgaaacgaccgagcacctggtggggaatggtgttatcgaccaccgcgacggagatcatgttctttttcgccctcagggtagctttttcgatggcttcggggacctctttcgccttgcccgtgccgacgccgatcttgcccgcgccgtcgccgacgatgacgagcgccgcaaaacgcatatttttgccgcccttcaccgttttggaaacgcggtttacctcgatcagcttcttgatgagtccgtcatcctccgcctgtcttctctgaggtcttctgttttctcttttttcgtctgccattgtcgtttctcctatcagaatttaagtccggcttctctggcgccgtctgcgaccgccttcacacgtcccgtgtaaagatagccgcctctgtcgaatacaaccgcctcgacgcccttcgccagcgctctttccgcggctacggcgccgaccactttggcagcgtcggttttgctaaggcccgcgatcttttccttgaccgccttttccatcgtggaagcagccgccagggttacgccgcctttcgcatcgcccgctctgtcgtcgatcacctgtacgtagatgtgattgagacttctgtaaacgttcatccggggcgtttccgccgttcccgtaatcgtttttcttacacgcgcatgacgtctttgtctgactgtgtttttatcaattttggaaatcatattaacgctccttatttcttgctcttaccggaggtcttgccttccttatgctccacgtactcgcccttgtagcggataccgtagccgtgataaggctcgggcactctgacctttctgatgttggcagccgtctgtccgacaagctccttgctgatgccggaaacggcaatttcggtaagggaaggacattcgaatttgatgccttcgggggcaaggatctctacgggatgggagaagccgacgttgagcaccagcttgctgccctgcacctgcgccttccagcctacgcctttgacttccaggctctttacgaagccgtccgtgacgcccttcaccatgccggcgagcagcgccctgtaaaggccgtgtttcgcgttggtgtcggtgctgtcgtccagcgttttaaggacgatgttgccctcttccgtcacgatgtccagattgccgacgacctcgcgggaaagggtgcccttggggcccttgaccgtgacgacgccgtctttgaattccattgttacgcctgcgggaaccgcgatgggcattttacctattcttgacatagttctgctccctcccgattaccagatatagcaaaggacttccccgccaacgttggcggcctttgcctgcttgcccgtaaggatacctttgttggtggagaggatcaccgtccccagtccgccgagcaccttgggcatattttccacgcccgaatacgcgcgaagtcccggcttggacgcccgcgtaaggccgttgataaccgattttttgtcgctgtatttcagcacgatagagattttgccgttgtagccgtcctctacgatcttcacgtcctttacgtaaccttcgcttaaaagaatgtcggcgatcgcctttttcatattggacgcgggaatctccaccgtctccttatgggcggtgatcgcgtttctgattcttgtaagcatatctgcgataggatctgtcatgtttatctcctcctattaccagctcgacttcttaacgccggggatctctcccttatacgcaaggtttctgaagcagatacggcaaacgccgtactttctcaaaaccgcgtggggtcttccgcagatactgcatctggtgtaggctctggtggaatacttgggcgtcttctgctgtttattgatcattgacttttttgccatgttcgtttctccttacttcttgaaaggcatgccgagcgcgcggagcagctctctcgcctcttcgtccgtgttcgccgtggtgacgatgcagatgtccatacctctgatcttctccacctgatcgtaggtgatttcggggaagaccagctgttccttgatgcctacggaatagtttccgcggccgtcgaacgccttgtcggacacgcccttgaagtctctcatacggggaagcgcgatggagatgaacttatcgtagaagttgaacattctctcgcccctcaaggtcaccttgatgccgatcgtctgtccctctctcactttgaagttggcgacggatttcttcgccttcgtcatgacgggcttctggcccgaaatgagtttgatttcgttttccgtcgtctgcatcgacttcgcgttgtctttgatgtcgccgagtcccgtgttgattacgattttaacgagcctggggcactgcatcacggaagtgtagccgaactttttcatgaggaaaggtacaacttctttctcgtacttttcttttactctgtttttatatactttttctgccatgttcttctacctcgttactcgttttccgcaggcgtcgtttcggtcgtcgcgggcgtctcgggagctttcggctcggcgggtttcgccgcgcgctttctcgtcctcttcttgggcgcctcggtctcggccgcggcggctgccttggcgctcttcttggagtacgccttatcgagcgtcgcgccgcacttcgcgcagacgcgcactttcttgccgtccgcaacgccgtgctttaccctcgtcgccttgtcgcaggccgggcagactaccatgacgttggaagcgtcgatggggccggggatttcgacgatcttgctcgtatcgtttgcctttctcgccttctgatgcttcttctggacgcggacgccctcgacggtcaccgtattcgctttgggggaggtggcaattacttttccctgtttgcctttatctttaccgacaataacaagtacgttatcatttaattttacgttcattgtttcttcctcctcacgattacagcacttcgggagcaagggagataatcttcatgtagtccttatctctcaattctctcgcgatcggcccaaaaatacgggtgcctttcggctgcttctggttatcgatgatcacggccgcgttatcgtcgaatttgacaaacgtgccgtccgttcttctgatgcctttggcgcttctcacaatgaccgccttgacgacgtcgcctttcttcaccgcgccgccgggcgtagccgactttacggaagctacgatcacgtcgccgatattgcctgttctacggaaggagccgcccaatactctgatgcacataagctctttcgcgcccgagttgtcggccgctttaagccttgtctgaggttgtatcataactctttactctccttgaaaattacttagccttctcgacgatttcggcaactctccagtttttgtccttgctgagctttctcgtctcgacgattctcaccttgtcgcccacgccgcacgcgttttcttcgtcgtgcgctttgaggcgcttggtttttgtcactgtctttttataaagggggtgcttgcttctgtcgctgatctccacgaccaccgtcttatccattttatcggataccacaagcccgattctttcttttctcaaatttctttccatgatcgcattcctccgctttacgccttaagctctctcgcacggatctcagtgttgacgcgcgcgatatctttcttgcaggttctgatggaaacggggttttccagctgaccggatgccaaacggaaacgaaggttgaaaagctcgctcttgagctccgcaagctttgcggtaagctcggcgctggtcatctcttttacttctttagctttcattactgttcaccgccttcagccggctcggcagcaaccggagcggcttctttcttgacaaacttgcactttacgggaagcttgtgtcccgcaagtctcatggcctctctcgcgtccgcttcgctgacgcccgacatttcgaacatcactctgccgggtttcacgacggccacccaatattccacgttacctttaccggaacccatacgggcttccgcagggtgcttcgtgataggcttatgagggaaaatatcgatccatacctttccgccgcgcttgatgaatctcgtcatcgcgatacgggcggcttcgatctgattggatttgatccagccgcattcttccgcgacaagaccgtattcgccgtaggcgatcgtattgcccttatgcgcagcgccggtcattcttcccttatgctgctttcttcttttcactcttttaggaattaacattactgctctcctccttccgctgcgggagcgggccttttcgcgctcttgagcacttcgccgcgatagatccagcatttaacgccgatcataccgaacgtggtgtgcgcttccgcgaagccgtaatcgatgtccgcgcgaagcgtctgaagaggaatggacccctcgtgatactgctcgcatcttgcgatttcggcgccgtcgagacggccgctgaccatcattttgatgcccttgacgcctgcgcgcatggagcggccgatcgcctgcttcatcgaacgtctgaaggacatacgcttctcgagctgagccgcgaccccttccgccacgagctgcgcgtcgcagtcgggctttctcacttccgtgatattgatgctgatcgctttgccgcacgtaagctttcccagatcctttttgatcgtctccacttccgagcccgctttgccgatgatgacgccgggacgcgcggtgtagatggtgacgacgattctcgaagctgcacgctcgatcagaattttgctgatcgccgcggcatagtacttctttttgaggaacgtacggatcgtgttgtcttctttcaggtatttggagaattctttcttatcggcataccactgcgtgttccaaccgttaataactccgactctcaaaccatgaggattaactttctgtcccattataattctccttccaactttttaacgtcgagaatgacggtgatatggctcgttctctttaagatcgcgtggcccctgcccttggacacgggctgcatacgcttgagcatctgtccgccgtcggcaaaacattccgctacgacgagatccgctttgtccatgccctggttgtgctcggcgttggcggccgcggacatcaacaccttcttcaccgcgagcgcgcttccgttggtgctgtaatcgaggatcgccttcgcttcctgatagcttttccctctgatcagggcaaggaccgtccttaccttgtaaggggaaactctgacgtatttagcgactgcataagggcgtttttctctgttttcctccacccttttcgtctttttattcatgttcgttgccattttttcgtctccttatttaccgggctgggtcgtctttgcggcatggccgtggaacgttctcgtgggcgcaaactcgccgagcttgcagccgatcatgtcctcggtaatatatacgggcacgtgcttgcgtccgtcatataccgcgatggtatgaccgaccatatcggggaatattgtggatgctctcgaccaggtcttgatgaccttcttttcgttcacggcgttcatcgcctgaattctgctcaagagcttggcttcgacataaggtcctttcttaacgcttcttgacattttttattccctccgattagttgattctcttgagaatgaacttattggttgcattcttcttctttctcgtcttatagccgagagcgggtttgccccaaggagtttcgggacccgcatggcccactggcgctttgccttcgccgccgccgtgagggtgatccacagggttcatgaccgcgcctcttacttcgggacgctggccgagatatctcgctttgcccgctttgccgagggaaagaatttcgtgctcgacgttgccgacctggccgatcgtcgcgcggcagcgcagcagcacaagcctcatttcgccgctgggcattctcaacgtggcgtatttgccttccacagccatgatctgcgcggacatgcccgcgcttctggcgatctgtccgcccttgcccggggtcagctcgatgttgtgcaccatggtacctacgggaatattttcaaggggaagcgcattgccgaccttgatatccgcggcggggccgctcatgagcttgtcgcccacgttgaggccgacgggcgcgagaatatacgtctttacgccgtccgcgtacgcgaggagcgcgatgttggcgcttctgttgggatcgtattgaatgctctttaccgtcgcggggataccgtctttcgcgcgcttgaagtcgatgatgcggtatttggtacggttgccgccgccgatgtgacggcaggtgattttgccctggttgttgcggccgccgctgtgacgctggtcgtgcagcaaggatttttcgggcttatctcccgtcagctccgtataggcggacgttaccgcgaaacgacggccggaagaagtcggtttatatgttttgactgccatttttctgcctcctctgattacgacaacgagtcgaagaattcgatgggcttgctgtcctctttcaaggtgacgaccgcttttttacggtcgggcgtgtagccctcgtttctgcccattctcttgagtttgcccttgcgggtaagggtgtttacgcttgcgaccttgacgccgaacagcttttcgaccgccgctttgatctcggttttgtttgcgtccttcttcacgataaacgtgtatctcttggacgcgatcccgtcgtatcccttctcggtgaggacgggctgtaaaatgatgtcttcggcaaacattatgcgtaaacctcctggaatttctcgacagcagccttggtcataacgatcttattgttctttacgacttcgtaggtgctgagctgtgcaagcggcagggtctccagcttgggaaggttggccgccgcgcggatgacgttgatgtcgtcgttgtccattacgaccagcgcagtcttgtccagattgagcgctttcttgaacgccgccatttcttttgttttgggtgcggaaaccttcaattcgtcgatgacgatgaattctccgtccgccactttcttggaaagcgcggagagcaacgccagccttttcgccgtcgcgttcatcttcttggagaaatcgcgggatttaggagcgaacacgacgccgcccttgatccactgcggagccctgatcgaaccctgacgcgcgcggcccgtgcccttctgtctccacggctttacgccgccgccgcggacttccgtcctcgtgagggtggatttcgtgccctgtctctcattggcgaggcgggtaaccaccgcctgatgaatcaaagactccttatattcgacgccgaacacgctgtcgttaagctccatcgtgccgacctgagagccgctcatattatatactttaatatcggtcatgtctttcactctccttatttgctcttaacgctgtccgacacggtgacgatactgcccctcgggccgggaacggcgcccttgatgagaagtacgtttctgcccgcatctaccttcaccacttcgaggttttgaacggtgacgttatcgacgccgtactgaccggcgagatgcttgtgcttgaatactctcgagggagcgctgatggaacccatggaaccgggttctctgtgcacggggcctacgccgtgggtctctttcagacgctgctgattccatctcttgatgacgcccgtgaagccgtggcccttgctgacgcccgaaacatctactttgtcgcctgcggcgaatacgtcggctttgacttccgcgcccaccgcgaaggtttccgcgtttgccacgcgcacttccttcaacaccttatggggcttgacgcctgcctttttgaactgtcccagctcgggtttggtaagcgccttttcgctggtttcgatgaagcccagcttcaacgcggaatatccgtcgttggctaccgtcttcacctgcactacgggacagggacccgcttccactaccgttacgggaatcatgatcccgttttcagcaaagatctgggtcatgccgactttgcgtccgatgattgctttattcattgataaagttcactccttaaaaatttattttcgaatacctttggaaaagtatttctcggcgaaatagttttcttaaatcagagcttgatcttgatatccacgcctgcggggaggtgaatggaatcgagaagcttcgcgttgggagagtagatgtcgatgatccgcttatacgtcctcatttcgaactgctcgcgggaatctttgtatttgtgcggggaacgcaggatcgtgacgatctctctttccgtaggaaggggaataggccccgagatcttcgcgccgctctttttcatcgtttccacgatgcggctcgccgcttcgtccaccagctcgtgatcgtacgctgccaacttgattctgattttctgaactgccattttggtttctccttttaccgtttatactaacattttatttcgctgtatcaacacatccgtgtgtatcggggttttgcgcaaaataaaaacactcttttttaccgagcgtttaacgcaaagcctcggttagtcgcaggaatcgggttcccacttttgtcaacggaaattatctgccgcggcggctttctgccgcagatttacagtaacttcccgtctcaacccatacaacacatatttacacagcttaattataataccaaatcgtcaacccctgtgtcaagcgtttggacatacttttttttgtttttttcgatttttttcccgatcgggaaatattttgctcctttcccgcatagaaaaaagagctttaccctttcggttattgccctttttccctttccctatacattattatatatcctttcgggtacgcgaaaaagtttttacggaaaaaccccgtaaaaattactgctcttcctcgtattcggcattgtttatataatcgacgttgaaaaattcgcccaacgtaataccgattgcgtcacataacagttttatggtttgcaggcgcggacaacccgaagtccttttcagtattccgtacatagtggtaggtgtaattcccgcgcgcatactccacttgggaattgcgatcttatgttccacggccaaatcacttattctttttataatcgcttcgctcaatttcacaacacttctttccttgtcttatatttttatcttaattataagttaaattttcttttttgtcgtgcgtttagtaagataaaattatatgtccgattttattatctgcaaaaattattttaatatattatctaaaataatgaaatttgtttgacttttcattttgtatatgataatatataaataaatggagaggatataaaattttttgttctacttcgtatttagcaaaaacaggccgccgtcaagtttttgacagcggcctgttttttatccgattgcagcgattataccgagataaacacctcgtcgccgtcgtccgcgctataaagccgcacaagcgggaacttgccgtaacggcggcgatattttttcaacgctttggccatttccgcgcccgtggcgacgatcgagcgcttctcttccgccgtgaaggaaatttctcgtttttgcccgtccctgtccgtgcggatggccgctttcaataccagcttcacgagaagggtactaaggggcagaaaaaacacaaattttcttccgttgcttctgatacggattttcattccacccacacttccacttgatcgccgtccgcgctttgcacttccacgagttttcccgtaacgccgagggaaatcagcgtgagaatctggttgaaatccagcgacctcgcccaattgccccccttatccccgccgccgcccagcttgctcatcagcgcctcgttggatacggcgatttcgatcagcttgacgggcaggttgacatctaccttgtcgccgtccgtactgcggacgcggacgcgcagaagcattttatcggtgtcgggattttccgccgcaagcttggtgacgggttcgctgccgtcgtcgagcagctcgtccacgctgacgccgaacgcccgcgcaagcggattcaaaagcgtgatgtcgggataggaaacgtcgttttcccatttggaaaccgcctgcggcgttacgctgcatatttccgccagcgtttcctgcgtaatacctttctctttgcgatagcccgcgatgttttgtccgatcgttttcataaaaattctccttatgggtttcttgtctccattataccctttccgcaggcaaaaatccaccgactatcggttgattcggtccccgttttcccaactatccgttgagaaataactcaaccgtcggttgttttttcctcaccacccgtcaaatatgcggttcaaagagcatttttccgagcttttccgcgattcagatatgcaaatcggaaaacacttttccgagcttttccgcaacgacgagctccgcccccgcgtccgcctgcgtaggcgttttattgattacgacgaggtgcctgccccgaaaataacgcagcaatcccgcggcgggatataccaccagcgaagtgcctcccacgatcagcgtatccgccgaagcgattgcgtttaccgcacccgtcaccacgccgtcgtccagcatttcgccgtagagcaccacgtcgggctttaccactcccccgcacgcgcagaaaggcacgccgtccgtctcgatgatctctgccatggtatgcgcctttccgcattttgcgcaataattacgccacacgctgccgtgaagctcgaatacgtttttactgcccgccttttggtggaggccgtcgatgttctgcgtaatcactgccttcagcttcttttccttttccagcttcgctaaagccagatggcagccgttgggggttgcggcgggaaaaagcatctttcttttataaaaacggtaaaactccgccgtattttcgaggaaaaatttgtgagagataatcgtttcgggaggatagatgtattcctcgttatacaagccgccctgcgaacggaaatcgggtatgccgctctccgtgctgacgcccgcgcctccgaaaaacaccgcgttcccctcgtcgataatctctttcagcttcccgagcttttcttcataagcgttcattttttctctccactttccgctgaaaagataagggcgcggaaaatttccgcgccgcagtttcgtttcagtcagccaggccttcgttgagcttggccagcagcttgtcgagatcctcgccgtggacggccaccgcctcggctaccgtttcgccgtgcgccatcgcgcagccgaaacaatgcatgcccgcctccatgaggatatcgggtgcgttggggttgagttgcagacattcggcaattaaagtatccgccgttattttagccatcggaatattctccttttgtttttcttaccttattattttaacacattccgcgcaaaaatacaaggcccgaggatacctttttttaatttttacgcaaattttattcttttttctataattgaaccgcggttactttttatcaacattttaacaaaaaacaatgtaataaacaaacaaaaaacctttgttttcgcttttgtttgacatattttgcgctctatgatagaataaatatgtttggtataaacattaatcggaaaaccgattttgaaaatttttgacgcttaaaaacgggaggatttatgagcagactgagtatcattacccaaaacaaggcgcaggccaccgtcgaggagctttacaaggacgtggaacgccgta

SEQ ID NO: 3156 - DNA, 32759 bp, Unknown
  16S sequences of unknown bacteria
gtgcatccgtccgtattaacctatctggaagctaagaaaagccatttttataagagcgttttgaaatcaagtgacgggaggaaagaaaatggaaaaggataaaacttcaaaagttgttttgacagcgctgatgatgtgtctgataattcttgccactatgcttataaaagtaccaattccttttacacagggatatgtgcatcttggcgatgccatgatatttctgtcagtgctgattctcggatggaaatacggaatagtggctgccggagtaggctctatgctcggcgatatcataggcggggcagccgcatgggcaccgtggacgcttgtaataaagggcggtatggcactgattatgggagtttgtcttaagggaggcgattctaagctgaaagaggttatcggtatgatacttgcaggagcgtttatggttgccggctactatgtggcagagggggtaatgtatggcaactgggtggcagcggcaatcggaattccgtggaatatcggccagtttacagtgggaatggttattgcggagatactttccgcagcgctgcaaaagacgccggccgggcgttatttcacatataaaaagagcctgtagaactggaaatgtaaccgctgccggatttttacctacacaagtccgctggcagtgatatatcttgcggaggatagctcttctgcaagaaatctgtgcgctgcacgcgatgacaggactggcattgagtcttcttttttaagctcatccgcaatcataattgcaatggttttgcggctgagctttttgcttagaagctcgaaggtttctacggcaaacagcttgaaagggcgggagccgttaaattgttttgtatccgattttaaaagctcgcgcttcattatactgcgatgttcttttattttttcggcgagcgcagcattgagggtttcgcgagtgtatatgagcgtcgggtcaaggtcaaagagcttggcggcggtgtcggcgccaagcagtgtcttcttgtcaaaggttttgtgcggaaatgtgtaaaaatttccgctgaaaatattaaaagttttcattgcgtcgagataaccgaggcgcataagtcttctggcattgtctttgttaaagacgagcacgctgcccatttcatgcggacaggagatagtcgttatcttatcggctgctatttccgcttttttgaatttatccttgcgcataacgccgacagcatggaggtttacggcgatgatgttatccgcgcctttgttaagcgcaagctctatcggcactacatcggcaaagccgccgtcaatgtattctacgccgtctatttcgtgaggctgcactgcgggggcaaaagatgaacttgcgataatgtagtcgataagcttaccgtgaggaatttcttctttatatatataatgaggcttgagattcggcagttcaacggttgttagaccgtactctatcggcgaacggcggatagcgtcttcatcgagatatttgttaagaatagaagcaagaccatttgatgacgcgccgccgttttttataatttcgcgcgtgtaggcgcgtgcttcctcaagcggcataccggctatgtcaagcgaaacagacgggcttttcttggcggattgcttgggaatgtcaacatcaaaaatcatttccgtttcgagttcatgccaaagcttcacagcaaggtcgaattcatcctgcactataacggccccgtttatcgagccgaccgatgttccacagacgatgtcaagctttatgccaagctcgcgcagtgcctgccatacgccgatttcatatgctcctcttgagcctccgcctccaagaacgagagcggtttttttattttttgccataatttaaccctcctcgtttatattgattcatttaccgcggtaatacaattttaaattatttttttaattattatagtaaaaaaccaagaaaaatacaatgcattaagcctgaaatttaacggaaaatatatacataaattaacatgaaataaaagtgaaattgccgttgaacatatgttctaaaagtgatataatgtgaacacaggtttgcgcaaaagatatgcggcgctgcggccggccaatttgcaattagtggacttacacgtttgtggtatgtgttttgagttagttagccttgcagtctgcggcttcatagcaataatttatattttgtgttttgaagggagcacagtatggacatatatgaaaaacttgaaattttagctgacagcgcaaaatttgatgtatcgtgttctacaagcggtacgcagcgcgcaaacaatgggcggataggaaatgccgtgcgtgagggcatttgccatgcgtggtcggcagacggcaggtgtatatcgctgctcaaagtgcttttttccaacaaatgcgtgtatgactgtcaatactgtgtaaacaggcgcagtgccgagtgcaggcgggcgtcgtttgagcccgaggagattgcgcggcttacgatagaattttataggcgtaactatatagaaggactttttttgtcatcagcggcggaaatatcgcctgactacacaatggaacgtatgattaaggcactgcggattctgaggtacgactacggctttgccggatatatccatgcaaaagtgattcccggcgcagcccccgagctcgtttctgaaatcggttttatcgctgacaggctttctgtgaatatagagctgcccacggaaaagagtctgaagctgctggcgccgcagaagaatgcgggcgctatattcaagccgatgaaacagattacaaatacattgattgaacaaaatggtctgattggcccgggtactatgtttaaaggacaggagcttaatacggatgagcattatataaaggatgaaggactgcatcttgatgacagagctcgcacagagagttatgaggataaaaggcttgcaagtgctcaggaaggaaacagggctgatgcaggcagaagtttcggcaccctgatatcaatgccgaaaaaaggtcttgcatccgcaaaagagcttgcgccggcttcgggaaatatgacggcggtgccggcgcgccggcgcggaaagcgcgagccgtttgttcccgcaggacagacgacgcaaatgatcataggcgcgagcggtgagactgatcggcagatactcaagctttcagaggatatgtatagaatttttaaaatgaaacgcgtttttttcagcgcgtatgtagcggtcagcaattcaccgcatctgccggatgcgggaagtgcgccgccgcttgcacgggaacatcgcatgtatcaggcggattggctgcttcgcttttatggttttagcgtcgatgaaatttttgatgatgagcatcagttcctcgatccggagcttgatcccaaagtatcatgggcactgcgcaatatacacaaatttccattggaagttaataaagcgtcgcttgacgagctccttcgtattccgggaataggagttaagtcggcgcacaggatactgcgtcagcggcgtgtggcggcagtgaaatatgaagaccttaaaaaaatgggggttgtaatcaaacgtgccaaatattttttgacctgttcaggaaagtattacggtacggcgcgctttgagcctgcggatatcagaagcgatatgctcggtatcagtgaagaagaacagctttcgatgtttgcgccggctggcgggaagattacaaatggtgcaaatccgtggcataacttgccgaagaacagcccggctgtgattacgggattataaggaagtgagatgttagatctgaagcgatttttgaggcggttatcgggaaaaggagctaaaaatggcagaatatctttatgacggaacatttgagggatttttgtgctgcgtatatgcccactactataacgaaaaagccacggcaattacggtcaaaggtgatgcggagcagatagcattttttggcgagcttgcagaaattaaaactgacggtaaaaaagcgcagattgtgtatcgcgctatcgaaaacaagatttctgcatttgatttgaagcgtgcataccgcatttttcttgccgaagcaccggataaagaaatgatacttctcaattatctttgcttcggttttataaaagggcaggcagcatcatcgtaccacggtttaccgatcgtgcgcaacgcagagcttttggaaaagaaagtgacgacggaggcaaatagattcagagagctgcttcgcttttccgtgctcaaaaacgatattctttactctgaaatagaacccgataacaacatacttgaacttctcgggccgcattacagcgacagatataaaaacgatcctttcataatacatgatgttaagcggagccgcgcgcttatagctgcgggcggcaggtggtatatatcggagtttactaaagaaaacttgcctgaatatcacgaagatgagagcagcttccgcagcctttggaaaaattactttgaaacaatcgcgatcaaagaacgcacaaatccgcgctgtcagaagaattttatgccggtgcgttattggaagcatttgacggagatgaagtgagaaaatttacagaggcttagtcttttttcccggagtaaaattaaaatgcaaaaatattttgctgctgtccgctgagtttaaactatggtacaatagtaaaagcaaggcaaatacagggagggagaaatggacgaaagagtaagaaaaataatagataaaagcagaagggtcgtgttttttggcggtgccggtgtgtcgaccgaaagcaatatacctgattttaggtcagaaactggtctatacaatgctatgcgccattacggatattcacctgaagaaatgctgtcgagtgatttttatcacagcagaaaagaactgttctttgactattataagaacaatctgatatacagggacgcaaggccaaacaaggctcatattgcgctcgcacagctcgaggaagaaggcaaactgctttccgttgttactcagaatatagacggactgcaccaggcggcaggaagcaaaagagtgcacgagcttcacggctcggtaatgagaaattactgtacaaaatgtcattccttttatgatctcgattatataatggatgaaaaaaattgtgcagaagggagcagtgtgccaatttgcaaggtttgcggcgcctcggttaagcctgacgtcgtgctttacggagaggctcttaacgatgtagttatacgcgaggctgtttccgacatatcatcggcggactgccttattattggcggtacatctttggtggtatatcctgctgcgggcttcataaactatttcaatggggataatatgattttgataaataagactgcgacggcttatgacggcaaggcaaaccttgtcatttacgattcaatcggcaagattctcggcgattaaccatagcagaggaaaagcagtgccggtaatcggcgtccgcaaaagctgattggggaaaggagcagactatataatgaaaattttggtagccaatgatgacggtataaacgcaagaggtatacatgagcttgtatcagcgctttcacgggtggcagaagtttatgtcagtgcgccgcatgtgcagagaagtgctgccggccacggaatgacgctttcaggaagcatttttgtgagcgaggttgaatttgaaggtgcagaaaaggcatatgaagtgtcgggcacaccggccgattgcgtgaaaattggcctgtatcttttaaaacggcagggcgtggaaatagatatggtgttttcgggaataaatcatggcggcaatctcggcacggatacgctgtattcagggacagtatcggcagcgctcgagggaaatcttaagggatatccggcggtggcggtttcagttgaccttgcaggcagaggaggagagccgcagtactttgaatatgcggcggagcttgctgttaagtttgctgaatggggcttcagagggacctatggctgcgcaggcatcagtgagaactgcggtgaaaatgagcgcggctttgcaaagttcggcaaaaatataacgcttaatataaatgttcctgatttgccggcatccgcgataaaaggtgtgaaaacgggagtgcttgcaaaacgggcatatctcgataattatatggatattacggagagcggaagtgaaggcgagagtaacagagcagacaggagcatacacaaagaaagtgacaatgataaagaaggaaaaacggaatacagctacggaggcaatttgatagatcaaatcgggcttccagaaatttgcgatgcagggatcatagcagacggttatgcagcggttacgcctattcatacagatcttacggatttttcaattttaggcgatatctcaataattacggaatttatagcaaattgatcagcgtaaaaacaaaaaagttgttaaaatattaacatttttttcgcgaaaactattgcaattatttttgtgtatgttatgatgttattatatcgagataataataagaaactggttattattaagtaataatatgttttaggaggatcagaaaatgaaagaagttgtaatcgtaggtgcagccagaacagcaatcggaagttttggcggtactttaaagtcagttcctgcatcaactctcggcgctatcgctgttaaggaagctatcaagagagcaggaatcactcctgagatggtagaagaagttatcatgggtaacgtacttcaggcaggtctcggacagaacgtagcaagacagatttcgatggaagctggaattcctaaggaagttccttcaatgactcttaacaaggtttgcggttcaggtcttagagctgttgagcttgctgctcagatcatcaaagcaggagatgctgatatcatcgtagcaggcggtgctgaaaatatgtcactttcaccgtatgttgttcctgcagcaagatggggagcaagaatgggagacactaagcttgttgacgttatgataagagacggtctttcagacgctttcagcggagtacatatgggtatcacagctgaaaacatctgtgagcagtggggtctcacaagagaagagcttgaccagtttgcagcagcttcacagcagaaggcagaagcagctattgcagcaggaaagttcaaggacgaaatcgttcctgtagaaatccctcagaagaagggcgatcctaaaattttcgatacagatgaattcccaagagcaggagttacagctgaaggtcttgctggactcaagcctgcatttaagaaggacggtatggtaactgctgctaacgcatcaggtatcaacgattcgggcgctgctgttatcgttatgtcaaaggaaaaggctgacgagcttggaattaagcctatggctacaattaagtcatatgcatctgctggtgttgatcctcagatcatgggtatcggtcctgttcctgcaactcagaaggctcttgcaaaggctggcctcgagatcaaggatatcgacctcatcgaagctaacgaagcatttgctgctcagtcggtagcagttggcaaggaactcggatttgacgcttccaagctcaacgtaaacggtggagctattgctcttggacatccaattggagcatcaggctgcagaattctcatcacccttctttacgagatggcaagaagagacgcaaagactggccttgctacgctctgcatcggcggcggacagggaacagctcttatcgtagagagaaactaagtgcgaaaataaaaaatcttgtggttgaggtttaataaattcgcaattttttagaggagccctttcggcggacattttggacgtgcgaaggggctcttcctttttttgtattcgtaattgtatttattgaggctttgtggtatactacaaataagatttttttggaggaatgatatggcggaatcaaataattttattcataatatcatagaaaaagacaatgaaacgggcaaatacggggggaaagtatatacgagatttccgccggagcccaatggataccttcatataggacacgcaaagtcgatatgccttaacttttcgactgcaaaaaaatacgggggcaaatgcaatttaagatatgacgatacaaatccggtaaaggaagatattgaatatattaattccatcgaagcggatgtaaagtggcttggctgggaatgggacgagcgtctttgggcttctgattattttgataaaatgtatgaaggggcaatagagctcattaaaaagggcaaggcgtatgtctgcgacctgtctgcggaggaaataaaggaataccggggcacgctcaaagagccaggcagggaatctccgtacagaaacaggagcgtagaagaaaatctccgactttttgaggaaatgaaagacggaaaatatgcggacggagaaaaagtgctgcgtgctaaaatagatatggcgagctccaatatcaatatgagggatccggtaatttacaggatagctcatgcaacgcatcacaatacaggagacaaatggtgcatttatcctatgtatgattatgcacatcctatcgaggatgctatagaaggcataacacattcgatatgtacgcttgagtttgaagatcacaggccgctctacgattgggtgctccgcgaaataggatggtgggaaacaccgccgcagcagatagaatttgcaaggctcaatcttacaaatacagtgatgagcaagagatatcttaaagcgcttgtggatgacggtgcggtagagtcatgggatgatccgagaatgccaaccatagccggacttcgccgccgcggttatacgccggagtcaataagggatttctgcgagcgtataggtgtatcaaaggctaacagtatggtggatgtggcacttctcgaatattgcgtgcgtgaggacttaaagacgcgcgttgagtcgaggaatgtggtagaaaatccgctcaaagtcattattacgaattatcctgaagataagacagagatgatggagatagaaaataataaggaagtgccggaaatgggcagcaggatggtaccgttttcgcgcgagctttgggtagatggcgcagatttccaggaagtgcctgagaaaaagtattttcgtctcttcccgggtaacgaagtaagatttaaaggcgcatactttattacctgcaatgaagttgtgaaaaacgaagacggctcgataaaagaactgctctgcacatatgacccggagacgcgttcgggttcgggctttgaaggcagaaaggtaaaaggcacgattcactgggtagacgcaaagacggccattcctgtgacaatcagaaattacggatatctgatgctgcctgatgaagagggcaacaatcagcttaatccgaaatcggttgaggtgatacagggttatgcagagcctgagcttgccaaggccaaggcgggggatcgtttccaatttttccgccacggctattatatagctgacgcaaagctgtatagtaaggaaaatccggtatttaacagaattgtagacctcaaatcatcgtggaaaaagtaaaagcggcaagcggcagaacgatataacaataagaacaagggcagccagtaaaatatatggctgcccttattgtataggaaatattaaagcagcgattattgacattaaaatatgaaacaagttattataaaaggaagaagaattgcagaggaaagtaaaacaaagcggagggcaatgccaagcaaaaaattattataggagggaaagacgatggattataatgaagtggtaaaagcagcgcgggagtgcataggcgacaagtgcaaggcgtgcagcatatgtgacggtctggcatgcggcaataaaattccggggccgggctcaaagggtatgggtgacactgctatcaggaattataaaaagtggcgcgatatcagagtgcaaatggacactattactgaaaatcgtgaggttagcacggaattcagtatctttggcaagtcatttaagtatccgttttttgcagggccggtaggtgccgttaatctgcattacagcgaaaaatacacggatatgacatataacaatgtgcttgtaaaggcgtgctgcgaagcaggaattgcggcgtttacgggcgacggcaccgacccgaaagtaatggcagcggcatcacctgcgattgcggcagcaggcggcatcggtgtacctgtaataaagccgtggaacgcagatacagtgcgcgagaaaatggagcttgtaaggaaatcaaatccgtttgcgatggccatggatatagatgcggcgggactgccgtttctcaaaaatatgacgccgcctgcgggcagcaagagcgtcgatgagctcagagaaataataaagatggcgggagtaccgttcataatcaaaggagtaatgaatgtgaagacggctgaaaaagccattgcggcgcaggccgacgccattgtggtttcaaatcacggcggccgcgtgctcgatcagtgtccggctacggcggaggtgctcgaggaaattgcagaagctgtgaagggaagagtaaaagtgtttgtcgacggcggcatcagaagcggtacggatgtgtttaaggcgcttgcgctcggcgcggacggcgtacttatctgccgcccgtttgtgacggcggtatacggcggaggcgaagaaggcgttaggtgctacatagaaaaaatcggtgctgagcttgctgatacaatggcgatgtgcggggcgtattcgctcggtgaaattacacgcgatatggtacgcgttttcaaataggaaacagcagaaggaaaagacataatgaaagttaaaagagcccgctctgcattttatgcagagcgggctctgtatttatgcgggcaaaagccgcagcttatatctgaaataggcttttacaaaattccggcctttgagttgtactcaaaactgtaaacagcaagatcgtaatttgtaattgcgctgtatacgccgagctgtgccgcagacgaattgttctgagccgtctggagatctgtaagcgtgcacattcccgtatcgtactgaagctgagtcagacgggctgcttcctttgcattttcgtatgttgactgtgcaacatcaacggccttcttaaggtcttcaagctccatatatgcctggcggatttctatttccacacttgtgagctttgtgtcatatgcaagcttttgtccctgaaacgaagcctgagcacccatatatgttgcggaatttttcggataagctttgacgctgttgaattcgagttcggcattatccatattgtacttggcctgcattacgtctgctctgtttgtgagtgctgattcaatggcgctgtcgaggtcgattgacggagctgttactaatgtgaggctgtctgtcagcgtgagattctggagtgtgtcatagttgagcgccatatttgtctgcattcttacagtggtaagggatgtcaaagcttcagcttcagcctgctgagccgaaaggtaagcgttttccgcttgcagtacatccatctttgaagctacaccgaggtcaaattttttcttcgtattatcgagaagagtcttctttatatccgtactttcactggcgatacgataattttcctgactcataagaagtccgtaataagcctgaatggtctgattcttaataccgtttatgcctgcctcgtacgcgataggcgagtaatttttgtagtattctttggcgagagtagcctgtttgcctgtaagcgagttcaaagaaggaacacttacaccgccgagggctgcctgctgctccggagtcaaagctttgtattgatcgcgggcttcttctattgcctttatcgcttcaaactgacctcttgccgccgcgtcgttgccgtcctttgtgagcattacggattcaaaagccgggcctgtcgtcgtcattctttctattgcttcgtcaagagaaagctttatttcctcaccgctgaaagtaaatgcaggcgagcttgctgtctgtgcagaatcagcaaatattacagatgtgctgccaaatacaagtgttaatactaaaataaaactgagcgcttttttcatatctttttcccctttattttttaatgtcatatataatatatgcggcggactttctcctgcccgcatatatgagccgacccgcgggtcggaaacttaatatcattattatatatgttttaatatgacaattcaagtaataatttattaagaaatcataaataattctttacacttgctatttattttttggctgcgataatgtaaaatattaaggattggatttgatcacagaaagggtttaagaaaatatatacaagagcaaaagggaaagagaaataggtagctgacaatgaacgcagaaagaaaaagacagaggagacacgaaaagagggtaataaagctcgccaaaaagagacagaaggaagaaagaaaagcagctcgcgcacagggaaaaggaaaaagcaatatctcaagcagtgtaaaagcggaaagaaatgaaaaagaaaaaaaacggtttatcaggatatttgcaacaacacttattatatttctcatagtgttaataccggcagcgtttgccattaacgcattcttggaaacaagtccgtttaagggcagtatcaatttaggacaggacaatgaagtaaaatttgaagtgcttgtagacccggaaagcccattttttacggagttttcggattcagaaagaatcaacatactgcttatgggcgtaaacccaccgcttacggatgtacttatgctcggaagctttgatccggaaacaaaacatgtggacataatttcaataccccgcgacacgtattactatagacctggatatgcagaaacggattacgcgcagcttaaaataaatgccgcatacaggggtaatccgctcaacacggcaaaagctgtaagcgatgtgctctgcggaatacctataaattattatgcggtaattgagtacgatgacatcaggaaaatagtggacgaaatgggcggcgtgccgatgtatctcgaaaaggatttggactatgatgatgaatgggacgatccgcctctgcacatacatcttaaagcgggtcagcagactttaaacggcgatgattcggtaaaattcctaagatacagaaaaggctatgcagagggcgatatcggaagaataaaggcgcagcaggtgtggatgaaaaatgctatgtcgcaggcgatagattatggtatacttaaagtagccgatgtagcatttcaggaaatagattcaaatctgacgtacaaagcgatattgagtctcggaacaaaagcgcttggcatagaagcggaaaatattacgacgtacactatgccgcatacactgcagcaggagcctccttggtatgtatatccgcagcagcagggaatagaggatatgctgcgcgagatatattcgctgcaacctgaggaagagactacggacggcgcgataagcggcggcgctgtcgagagcgttgagacgcaatagagaagctgaagctgtaaaaggcgagaaaataaaaggggtaaggatatgaaaagaaaaacaggaagatcagtaatcgcagcagcgcttgctgctgtaatcataagcggtatgccgtttttaggagcagaaccgcgggaggctgcggccgcgactgtaagttttacggatgtagcggcgggctattgggcatacgatgatatagattttgcggcgcagaagggcattgtaaacggatatgatgctgctggaggcacacatgtgttttatcctgaaaatcaggtgagctatgaagaagcggcgacgatgctgtacagggcgctggcggccgcaggaaaactcagaacagacggagatgcaggtgcagggcagacagacagcgccaaggcagcaggacaaagtgctcttacagaagagcagcaggccgcgctcgttgaaaagcacagcgaagccttaagtacagcgaacatagctgattgggcaaaagtttatgttgcatacgttcttgaatataatataatagaagaaagtgagcttgcgtattttgtggatgcaaatacaaagctcggcaatccggcgccgcgacttgctgttgcaatatggacggcaaaggcgctcgataaacaggcggcaggcgcatattatctgccttttacagacgcatcgcaaatagacgatgcatcggcaaaatatgtcgatatgctttacaggcacggaattatgaagggctcatggcaacctgacggaacagttgcgttccagccaagagcgggtgttaagagaagcgagtttgctgcgataagcaatagggtttttaacaacgcagggtcggagtacgacattactaaagaaatgtataattataaaatcgaagcgggagcgaaaccggaaagtgaccaactgagattttcgagcgaagctacagtaataggaaatgaaaccggttgcagtgccgtatcgggtataagtacggcaagcggtgaaacgccgcagatttttcttgtaggtacaccggaagcattaaagggcacaataaaatctacagaaaacatcacctccgatgtaataaaagttggtgtgcaggtcgatgataaaggtgttggcagggaaacggtttattacatattcgataagaatacggaaaatacagcaaaaataacgagcggaacggaaataacgttcatagctgacggtgttaaacttatagaagtgaagtaaattcttgatagaggcggggtagaaatgcccgcctcttctgaaaaaacctgaaattttcttagatagtcttaaaattcccataaacaaaaattaaaaattgagaaaggaacggggttttcccgaatacttaaaatggaagaaagtattttgaaattaaaaaaggtagctgagctgagagaaatagcaaaagcatacggtatagacggctgtgataaaatgaaaaaggcggagattattgccgcgataatgggaaacagcgaagatacagatgaaaaaatacaggtagaagaaatcgaaaatgttaaagagcctgagctggagtgcgtaaaggagcagaggcacgggcaggatggacagcatatacagcatgtacagcgggagacgaggcagaaaacgagacaggaatacagcgagcaggagcgtccgcaggttgaaggaatacttgatatcgcggagggcggatttggttttttgagattttccaactttctcacgagcgaaaaagacatatatgtttcgcagacgcagataagaaggtttaatctcaaaacgggcgataaaataaaaggcattacacgacttccgaatgagggagagcgctttggcgcgcttctatatgtgaacacggtaaacggagaagaaccgggagctgctataaggcgaaaggatttttcacggctaacgccggtatttccatatgagagaatttctcttgagggcaacagccgcgacctggcgacgagactcatcgaccttatagctccgataggaagagggcagagggggctcatcgtagcgccgcctaaagcgggtaaaaccgtgctcattaaaaatattgcgaacacgatagaaaaaaattatcccgaaatagagcttatagtgcttctcgttgatgagaggccggaggaagtaacggatatgcagagaagtcttaacggcggcgaggtaatatattcgacattcgacgaaacgccgcagcatcacgccaaagtagcggaaatggtaatggcaagggcacaaagacttgtggagcataaaaaagatgtggttatacttctcgacagcattactaggcttgcgagagcctataaccttgtagtacctgcatcaggacgcacgctttccggcggccttgatccgggggcgcttcatatgcctaagaagtttttcggtgcggcgaggaaaatggaagaaggaggcagtattactatacttgccactgcgctcatagagacgggaagccgtatggatgatgttatatttgaggaatttaagggtacaggtaatatggagatacatctcgatagacagctttctgaaaagagaatatttcctgccatagacataaataagtcgagcacgagaagagaggatttgctgctcagtactgaagagctcggtgctatctggactatgagacgtgcacttgcgaacagaggcgtgcaggagataacggagactgtcattgataatctgatgtatacgaaaaacaacaaggaatttattgaaataataacaaagacaatgagggactaagggaaaatggatttaaaaaggatatttattaaagacgcctgcccgacaaaaataggaggacaagctataatcgagggcataatgatgcggggtgcggatagaacggctacggttatacgtctgccggatagatctcttcatattaagacagaaaagctgcctaagccaaggaagataaataagatacctgttctgcgcggtgtagccgcatttgtgagctcgctcgtaatcggtacgaaaatacttatgtattcagccgatgtgctcgaagcgtacgaagagcctgaggacgaaaacggagagaaaaaacaaaaggagagcgaaggcagattttccgcgtggtttgcacgcaaatttggtgaaaaagctctctggaatctgatgatatacagctccgtgatctttgcggtgatatttacagtcggcatttttatagtgctgccaacggcactggtgaatttttgccaccgttttacggaaaatgaaataattcttaatcttatagaagggctgctgagaatcgtaatgttcgtgatgtatatagtgctcataagaagaatgagcgatataaggcgcgtgttccagtttcacggggcggagcacaagtgtatacactgttttgaaaacgggcttgaacttacgccggcaaactgtcagcagttttatacgcttcatccgcggtgcggaacgagctttatgatgttcgtaatggtaatatcgctggtattattttcactgctcggctggccgaatctcgttatgcgcatagtatcgaggcttttgctcatacctgtggtcgcaggcctttcatatgagcttctgcgctgggcgggtcgttctgacggtatcgtggtaaaggtgctttcgctgccgggcctttatttacagaagctgacgacatgcgagcctgatgatgagcacctggaagtggcaatagcggcgatgaaagccgtgatggtaagcgaagatacgccgacctttacgggtaagtgcgaccttgacggcaatctgattgcggggacagaggaataaatatgggacttttaataaaagacattttgaaaataggtgaaacgagacttgaaagagccggaatttttaattttaagactgacgcggcagagcttttttgctatctttacaatattgaaagaaacaagctttttatgagctggtcgaaaagtgtggatgataatggctgtgagcagtattttcagctgctcgacagaaggtgcagcggggtgccgctgcaatacataacgggacatcaggaatttatgggctttgatttcgaggtgaacgaaagcgtgctcattccgagacaggacacagaggtgcttgtgagcgaggcgctcgatattataaaggacaaggacaggaaaattaaaaaagttctcgatctctgtacgggaagcggtgccatcggaatttcgcttgccaagctttcgggcgccgacgttatggcttcagatataagtgaagaggcgctggcaacggcaaaacgcaatgccgaaaaaaacggtgcgaaagtgacatttgcctgcggcgaccttcttgctcctttcaaaaagaaatttggcaggaccaaatttgatatgatagtgtcaaatccgccgtatataccgacggaggcaatagaggggctgcaaacagaggtgaaagatcacgagccgcggcttgcgcttgacggtgggagcgacggacttgaattttacaggcgtatattaagagaggcgcctgattttctgagaaaaggcggaatgctgattcttgaaataggctgcgatcaggcggcggctttagcgagtatggcatccgatgaacagaaatacggcggaataaggatagttcgtgatcttgcagggcttgacagggttgcggtactttcagttttataagaaataaaaaataccgagaattttctcggtatttttgtctcttatttaaattggtcgatcttatcaagtaaaccttacataaattagtcaattttgtacttattcttgaatttttcgactcttccgcctctgttgacgaatttctgctgtcctgtaaagaatgggtggcactgtgagcaaacatcaagtcttatttcttctttagtcgacttagtgataaagctgttgccgcatgcgcaagttactttacattccttatattccggatggattccttccttcatgctttttacttcctttcctgctcggctgctgccacgcaaattttttgcctgcggagttttagtatgctccgatatagcttttatactatatcacatatgaaagcaaaaaacaagagatttttgcaaaagactcaagctgatgagattggcaatgtttatatgttgacaggtgaagagcaaaagtatataatatctatatggtaaataatgtaattaaaatgttgataataacaggtgtgtttttgccgcttgggatatttttaggctgcggtgcggtttatgtttttaacaggattccggcaaggtggctctgcgattacggcgaggaacctgcggaagagctgcttgatatgagcattcagcggataaaagggtttcccaataagctgatgttttcgtttttgtttgcagcgcttggaattttttttggaataaaggattacgtttatgcagcggcgacgctgctggagctttggctgctgcttatgattgcaatttccgaccaaaaatatatgataatcccggatcagtttgtaatttttctcgcactctttgcgtttccgatgtcgatatatagggaaagtgtgcttgatatgctgctggggctgtgccttggaagcggcgtgatgcttgccgcagcgctggcaggcagacttataattaagcgtgaagctttgggatttggtgacgttaagcttatgggcgccattgggcttacagcggggctcggcggtactgcgtttatactggcagcgagttcgcttatgtcgtgctgcgcgtttgcatataagcttgcagcaaagaaaatgaaaaagagcgatgcgcttccgctcgctccttatattgctgtggctgcggctatatatatgtttataaacggggcaatgatgtgaaagtaaaaatggacaataaaatagcaggtggcaaatgagagctgtgattggcaggctgtaacagtaaatgttaatgcgaatttggtttgattgcggatactgatggtgaatattaaagaagagaaagtgcagaggcttatggaaaaacagaatgttcttttgacaatagaatatgatggcacgcgctttgcaggctggcagaggcagcctgcaaaacgaaccgttcaaggggagctggaacgggttctgtcggagctgtgctgcatggagatacacattaacggaacgagcaggacggatgcgggtgtgcatgcgatcgggcagcgcgcctcgttctgcgcggagttcggcataccggtagagcgcataccgcttgccgcaaacaatatgcttgcagacagcaagcttgcgggcacgggagacatccgcatattgaaggcggagagcgtacctatcgggtttcatgcgcgcttcgatgcgcgcggcaagaaatacatttaccgtatcagatgtgcagagacgccggatgtatttctcaggaattacagatatcagataacggagcagcttgaccttgacgagatgcgcgaagcggcaaagcttatagaaggaacgcatgatttcaagtgctttcaggctgccggcggcgaagaaaagacgacgactgtaaggacgatacacggaatagagatatacgaagcagcagcaaacgataatataattgcgaaatgcgatgatatgaccacactgagcaaaaatattgaatgcgaaagagaagcaggcaggagcgcagagtgcgaaatcagaacaagcaagaatgcagagcgcgaaattgcaattgcggtgcgcggtgacggcttcctctacaacatggtcaggattattacgggcacgcttgtcgaggtaggactcggaaagaggaagccgtcttcgcttgcggatatcatcgccagcggcagccggcagaatgccggtcataccgcgcccccgcagggactctatctcgcagaggtttactacgatgctactactttttgaaataagtatttgataaaaactcgggaacgatgctttccgagttttctttcctaagcggataattgctttgaagcattatcaatacaaaataaggtaacagcgtttataagaaaatgcaaaagaaatgagaaaataacttctaaaaaatatcaaaatgtttcttgcagtatggtataatatctataactgcgcatatatgcaggcaaacccagaactaaaagcaggtaacatagatacagagaagaatcgaaaggagtagataatggatacgagaccaagctgggatgaatattttatggagatggcggtgcttacagcaaagcgttcaacatgtctcagacgtaaagtaggagcggtgattgtaaaggacaagcatataattgccacgggatataacggagcgccgcggggaattatgcattgtgccgaaagaggcggctgcgtaagagaaaagctcggcgtgccgtcgggggaaaggcacgagctctgtatggcccttcacgctgagcaaaatgcaataattcaggcggcaacgctcggacagagtatagagggagcaactatttatgtgacgcatcagccttgcgttatctgcgctaagatgattataaatgcaggtatcagaagaattgttgttaaagaggggtatccggacaagctttccgtagatatacttgcggaagctggtcttaaaattgttatgttgggggagtattaaagaaatggcgttttggttagtatttttaacggcgtttgtgctcgcgttaatttttacgccgatagcgataaagatagcgccgaaaatcggcgcggtagatgtgcccaaggatgacaggcgcatgcacacaaagcctgtgccgcgtttcggaggtcttgctatttttataggaaccacgacagcgcttatatttacggtatatggggcgctgcctatgtatcagaagtattttgcagaagcatatccgggagcagagttcatagaccagcccgtttctaaaatgacgggtgttattgtcggcggagttctgatatatattctcggcgtcatcgatgatcttaaaggaatgccggcaaaagtaaagttactcggacagctcgtatgcggtggagtggcatattatttcggcgtcagaataaattttgtaacgaatcatttttcggcgctgacagatcatatctttttttcaggtgcaatttcactggttattacgcttatatggattgcgggcatcacgaatacggtgaatctgatagacggtcttgatggcctttcttctggtatttcgtcgatagcgtctttgtgtcttgcgtacacggcttatatacacggcgcttatttgacagcctttgcgatgctggctctggccggcggcgcgctcggctttcttccatacaattttcatccggcaaaaatatttatgggggatggtggatcgctgttcctcggatatatgctggcgacgctttcgatagtggggccgatgaagggcgcgacggtgctggcgatgatagggccggtgctcgtgctcggtgtgccgattttcgacaccggctttgcaattttaagacgtcttgcaaatcacagaccgataatggaagctgacaaaggccatttgcatcaccgcttgatggcggcaggaatgggtcagaggcgtacggtgcttacgctttacggtatcagcggcgttatgggtgttgcagccgtgcttttttcacgcgacctatttgtggagatgctcggacttgtcgctattgctgcgatgtatatttatatctttttaacggacgccaaccattggaaggtatcgcttaaagcggtgccggcggaaagtgcggaaactcaaataaatggaaatactgaaataaaaatagaaactttgccgccagaagcagaggaaaaggtgaaaatggacatcgagcagcaaatgcccgagggaataacagtgacggaatctgatggcacggatgacgaataatgtctatcgtaaataggcgatttaaaagcaaggaaaatgtatttgcacgtgcctatacatataaaacaatgtaagcaggagaacaaaaaatgaaaatactaagcgtattcggaacgagaccggaggccataaaaatggcgccgctcgttaaaaaattaaaagaaacggaaggtatagaatccgtcctctgcgtaacggctcagcatagggaaatgctcgatcaagtgctgagtcttttcgagcttgtccctgattatgatttaaatataatgaaacctaatcagacgataagtatgattacaactaatgtacttctcggactcgatgagatttttgagaaagaaaaacccgatatagtgctcgtgcatggcgatacgactacgacatttgcggccgcgctttcagcgttttatcatcaggtgagcgtgggacatgtggaagcaggactgcgcacatatgacaaatattcgccgtttcctgaggaaatgaacagagttctcaccggacacattgcggacattcactttgcgccgaccctgcgcaacaaggaaaatctgcttcgtgagggcataaatgaagcagatattttcataacgggtaatactgtgatcgacgcgctgcttgaagttgcggataagccttatgaatttgaggaggagacgcttaaaaaactcgactttgaaaataaacgggtaattacggttacctgccacaggcgtgaaaatcttggtgagaatatggaaaatatctttggcgcgattaggcaaataggcgatgaatttgacgatgtggaaattgtctaccccgtacacttaaatccaaaggtaagagaaattgcagggcgtatactcgacggcgcggagaatatacacttaatagagccgctgcagtatcagccgtttgtaaaccttcaggcaaagtcgtacctcataataacagattcgggcggtatgcaggaagaggcgccttcactcggaaagccggtgctggttgtcagaaaggaaaccgaaagaccggaggccgtagctgcgggcactgttaagctcgcgggcgtcgatagagataccatatatgcgctggcaaaggagcttctgactgataaagctgcatatgatgaaatggcgcacgcggctaatccgtatggagacgggcacgcttgcgaaaagataattgaaatactaaggaacaggggataatggcggactcatttaatatgggaaaaaagcccgtggtgatagaaagcaaaaccttatataagacactggctgtcatagcgctgccgatggcgatgcaggaacttatctcctgctcgcttaattttgttgataatcttatggtaggctcgctcggagagacggagctttcagcagtcggcgtaggagttcaggtgtttttcatacactggatggtgcttttcggattcgtttcaggcacggctacatttacggcacagttttttggcagcggtgagataaaaaacataagaaaaacaataggtttggcggtaacggtatcgagcattgtcggcgtaatatttttttcagctgcattttttatcccgcacactgtggtgcgctgtttttcagatatacctgaggttatagagcttgcggctgtttatgtcaagacaggagcgccgcttcttttaatgctcggtatcacagttccttttacgagcgcgctcaaatccacgcagcagacaaaattgccgttttttatatcgcttgtgacattcagcgtaaatactggcctcaattatatactcattttcggtaaggcgggtgcgccgatgctcggagtcaagggcgctgcgctggcgacgatggcagcaagagcagttgagcttacacttgtttttgtcatagttttcgtaagaaaaaatattatagccggaccgcttaaggatttctttggctggaacaaggcttttgccgcaagaataataaaaaattcaataccaaccaccataaacgaaacgctgtggggtcttggaacctcaatgtatgtggctgcatatgcgcgcataggcgtaacggaatacgcagcagtacaggcggccaatacaatacaaaaaatgttcaatatgacggccttttccgtgggagcagcaacgcttatactggtagggcaaaaacttggtgaaggtgatcttaactacgcagcagagctcggacgcaggctcgttaaaataggtacttttatcggcgcagtatgcggacttatgctcatagcggcgggcagaccgctcataagcctgtttgagtttacagatgaagcgcgtacatattgctttattatacttgttgtatacggtggctttatggggtttacgctgcacaatggcatacttataacaggggtgctgcgcgctggcggcgatacaaaatatgcgatgatatgtgaatcattgagcatctgggcatttggtgtgccggtcgcgtttataacagcgcttgttcttaaatttcctgtatacatatgtgctctgtgtgtagcctttgaggatgttgtaaagtttatttttcttagaagaaggtttaaatcaaacaagtgggtgcgcaatgtcgtgagtgatattgaaagccgataaaaaggtaaaataaacagcaaaaatgtgtgtttaaaaaacaacaaattagttgttttacagtcgggaaaacaggcaaaataccgttaaaagtcttttgttttatctgttttttaactatagtttgacaaaatgaaaaatttgggtataatagtatcataatatgacaaattagtgaaattagcgggagagccgcatagaaaggaagccgcattgatatatattataagcgctgtcgcagggctcgtttatggggcgttaatgggcggtttaaaatatatagcgctctggcgaaaaataataattgccggaccgaatgaagagattactgcaagggcaatttatataagaatgccgatagactacggtataaatgttatgacatttgtcatattatttttagtaagaaatattattttaccgcttgattttgcggtgacggcgatcgctgcagcagtcagcctttcgctcatcggcaggtttttttcgataagaaaagtatttgacaaaataagcgcagaaacgggtgcggaggaaaaaacgaatgattgagactttaaattcactcggaataacaaacggaatgataacgagtgcaggtataacgatagtgatatcgcttattgcgttgataggcggaaagcgcatagaaactgtaccaaactcgaagcttcagggtgcgcttgagcttgcagtagaaaaactttacaactttttcgtcgggattatgggtgaaaaggcgtgtaaaaaatattttccatttgtagcaacattatttatatatatacttttgtgcaattactcagggctgctgcctatggcggggcacattccgggattggcggcaccgacaagctccatcaattttccgatagggcttgcgcttgtagtgttttttgcaactcagataataggtataagggaggctcacggagtgagattttttaaacatctgtttcagccgtttgcgtttctttttcctattatgcttatagaacagtttgtgagaccgctttcgctgacgttgcgtctctatggtaatgttttcggtgaagagtccgtaataagctcgttcttcaatatggtgcctcttgggttgcctattcctatgcaggcgctttcgctgctgatgggatttgtgcaggcaatggtattttcactgctcgctgccatatatataggcgaggcggtggaaacggcggagcacttgcagtgataaagtatatattacgtggaaaacgaggaaaataaatgcgatattgatttccggcacagcttctgcggcagaacgctgcagataaaatgccgcaattgatatataaaaaagtcaaaggactgcgggttaaaattttccgcagatatgaaaggagattataaaaatgacaacaactacaattgcaatcgcagcagctatcgcaatcggtctttcaactattgcacctgctattgcgcagggacttgcggcatcaaaagcgcttgagggtatggcgcgccagccggaagtggcaggagaaattcgtacgacaatgatcctggcacttgcgtttatggaagctctcacaatttacggacttctcgttgcgatacttctcgtaaacaagctgtagatgttagaaaaaaacagacccggaaaatcaggagggttttaacttatggttgaagcattaggcattgatttaaaagaaataatatttgccattgcgaattttctgatactgctcgccgtgctcgcgaagtttatgtataagccttttttggcaaatctcgagcgcaggaagcagatgatagaagatgctatcagtaacgcggaggctgtcaataagcgtgccgacgagaagatgaacagttataataagcgaattgccggagctgaacgcgaagccgcgggtataataaacgaggcaaaaatcaaggccgacaagcaggcatcacagattatagatgatgcaaatgagaaggctgcgcttattatgcagaaagcagagcaggagattgagaggcagaaggatgccgcgatcacggaggcaagagagcaaataggaatgcttgctgttatggctgccgaaaagatcattgaaaaagagcttgacgatgtgggacagacgcagattatagacagcatacttgatgaggcaggtgcagcgggatggcagaattagcagttgcaagaacatatggaagcgcgctttttgaagcagcaagagatcttgacaagatcgagcttataaaaaatgaaatcgcggaaatgctggaaatatttaaaagcaatccggaatttatgctgtttttaaatgcgccttcgatttctcacgacgagaaaaaagctgtacttcatgatttgtttgaaggccagtttagccgtgagtttttaaactttatggacattctcatagaaaaaggaagaatgagaagatttgagaaaattgcctcagtatacacagaacttgtgaatactgaggagggcattacagtcggaattatttattccgcagtgccgctcgattcagacaggcttgaaaggtttgaaaaggaaacgggcaagcttctcagaaagaacgtgcggctggaaaacgaagtggataaaagccttatcggcggagtaaaaatattcgctgatggtaagatgatagacgcgtcgctcagggcgcgtgtgtctgcacttatggacacaataaaatagagaggaggcgagtcgatgaatttaagacctgatgaaataagcgccgtaataagagaacgcatcaagggttataaaaatcagatggaagtttcggacttcggcacggtaatacaggttggagacggcgttgccagaatttacggacttgaaaattgtatggcgggagagctgctcgagtttcccggtgaaatatacggtatggctatgaacctcgaagaggacaatgtcggcgcagtaataatggggcctgatacgggtatcaaagagggagatatcgtaaggcctacaggccgtgtaatagaagtacctgtaggacaggagctcataggccgcgttgtcaatcctcttggacagccgattgacggcaagggagaaataaaggcggagggctttcgccctatcgaatacccggcgccgggtgtgctgcagagaaaatcggtaaaagagccgttgcagacggggattaaagctatagactcaatggtgcctattgggaaagggcagagagagcttattatcggagacagacagaccggaaagacggcaatcgccatagactctataataaatcaaaaaggaaaagatgttatctgtatatatgttgcgataggtcaaaaaaaatcgacagtggcacagctcgtgcagacgctcgaaagcagaggtgcaatggaatacacgatagtagtatcagcgacggcttccgatgtagcgccgctccagtatatagcgccttacgcgggctgcgcgataggtgagcactttatgtatcagggcaagcacgtgctcatagtatatgatgatctttcaaagcatgctgtagcttaccgtgcgatgtcgcttcttttaagaagaccgcctggacgcgaagcatatccaggagatgtattttatctgcattcgcgacttctcgagagagcggcaaagctgtctgatgaactcggaggcggctcgattacggcgctgccgataatagaaacgcaggcgggcgatgtatccgcgtatattccaactaatgtaatttctattacagacggccagatattcctcgaatctgagcttttcttttctggacagagacctgcggtaaacgccggaatctcggtaagccgtgtaggcggcaatgcgcagataaaagctatgaagcaggcggcaagtaagataaagctcgagcttgcgcagtatagggaacttgcaaatttctcacagttcggctcggatgtcgataaagatactaaagcaagactcgatcacggagtgcttcttatggaagtgctgagacagggacagtacagtccgcttgatgttgcagatcaggtaataatcatatatgcggcggtaaatgactatcttaaggatattccgccggcaaagataaaagaatttgaaaaagaactctatacctttatggatgcacatcatcctgaaataaagcgaaccatacagcagacgggtgagcttacggcggagacagaggcagtacttaaagcgggacttgaagagtttagaaagcttaagatacgcgatcttgatatgtaaaaacgaaagtggacgaaaagacgaaagaatgtataaagaaaggggtgaatcgcaggtggcaacggaaagtatggccgacatcagaagacgtataaagagcgttaattcaacggagcatataacaaacgctatgaagctggtatcggctgctaagttgagaaaggcgaagaacacctttgaaaagacgagagattattttcactatgtgacaggatcaatcgcagatatattttatgatggcaatgaagtgcctgagaggtaccttgaaggcagcagagaagtagtgaacacatgctttataattataacatcggaaagagggctctgcggctcatttaattccaatgttataaaacaggcggaaatagagatagaggacgaccccaacaggtcggtgctcattatgataggaacaaagggcaaggaatactttgaaaagcgtggcaaatatattcacagcgagtatgaaatgccgcccgaaaatatttcgtttgccgatacaaagatgatagctaagaccgtcgtcgatatgtacgataagggtgttatagacaaggtggtgctcatttccacggcgtttgtaaacaatctggagcagaaagtcaagagtcttcagctcctaccttttaagatgcaggataaggaagattttacaacgcacgatgcgcaggtttttgatacgcgtgaaaggcaggttgaatatgagccgtcgatagatgaggttttcaactatctaattccaaagtatgtagaaataatgctttacagttccgttatcgaatccgctacatgcgaacacgctgcgcggcgtatggcgatggaaagcgcaaccgacaacgcgcgcgatatgctttcaaagctttcgctatactacaatagagcaagacagtcggcgataacaaatgagataatagaagtcgtatccggctcggaagcgcagaaatagagaggtgaagattttgaataagggaataataagccaaattataggacctgtaatagatatcagatttgctcctgaagagttgccaaagcttttaaatgctattaacatcgaaaatgacggcaagacgatagttgcggaagtggcacagcatatcggagatgatgtggtgcgctgtatagcgctttcttcgacggacggacttaggagaggtactgaagcatttgatacgggtgcgccaatatcagtgcctgtcggacgagaggtgctgggaagactcttcaatgtaataggagagccgatagacaataaaggccctgtgcaaacggagcgaaaaagctccatacacgcacaggcaccgagctttgaggagcaggatacaacagcgcaaatatttgaaacaggaatcaaggttatcgatctcatagcaccgtacacgagaggcggtaaggtaggactttttggcggtgccggcgtgggtaagactgtacttatacaggagcttatcagtaatattgccaaggagcacggaggcatttccgtattcgcgggggtaggcgagcgtacgagagaaggtaatgatctctactacgagatgatagaatcgggagtaatagaaaagaccgcgatggtattcggacagatgaacgagccgccgggtgcgagaatgcgagtagcgctcacaggtcttactatggcggaatattttagagacgtggaaggacaggacgtacttctcttcatagacaatatttttagatttacacaggcgggctcggaagtgtccgcgcttctcggccgtgtaccgtcagctgtaggctatcagccgacgctggctacagaaatgggcgcgctgcaggaaagaataacatcgacaaagcgcggctcaattacatccgtccaggctatctatgtgccggctgacgacttgacagacccggcccctgcgacaacgtttgcccatcttgatgcgacgacggtgctttcgcgttcgattacagagcttggtatttatccggctgttgacccgcttgaatcgacatcgagaattatggatccgcttattcttggcgaagagcattacgaaacggcaagaggtgtgcaggaagtacttcagaaatataaagatcttcaggatattatagcaatactcggtatggatgaactttctgatacggacaaactcatcgtatcaagagcgagaaaaatacagcgtttcctctcgcagccgtttagagttgccgagcagtttacaggtatgcagggcaaatatttgccgcttaaggaaactataagaggatttaaggaaattctcgaaggcaagcacgatcaaatacctgaatcgatgttcctgtttgccggaggtatagacgaagtcgtagaaaggtataaggagagcaatggcgaataatacgataagacttgaaattattacgccgacaaagatgttctaccgagatgatgtggaactattagtcgtaaaaacgacgaagggtgaagagggatttatggcaggacatatgtgggcgcgcaagctgctcgcgataggtccgctcaagataagagaaccgggagcttctgagatgagatacggcgttattgcaggcggttatatagatgtcagctcgaccggtattatgatatatacggatgctgcggagtgggacacggatatagatttgaaacttgcgacagaccagaaagcggcggcggaaaaatatcttaaagagcataaagatctgccggatgatgatccgaatatcatagccgtgcagaagggtcttgcgcgttcggaggccagaatacatgcagcaaaaagacgcgacggactgcttaaaatgagatgaaaaataagttcataacgatgacattttaaccataaaaatgcgtttatttatgtgaatattttgtgataaaaacggccgaaagcattgaatttcagccgtttttaaggtttataatattctgaaaaaggcaaaaaaggtatactttttgaataaatatggtataatgataatgtctgcgcaagcaggcaaaggaaagagaggagaaactgaatatgaaaaagaagcttattcttgtgtggcttactttactcatggtgctgttctcatcaatttctatttatgctgaagaagacgttcaaggagatttttttgaaaaacatgttattatcaacggagaggaaattataaattataatttgcagtatccattccttatgtataataacatcacctactttccattatcccccgagatgcaagagatcttaggcttggaagcggagatggattgggaaagccgcacattaaaacttctgaaaactgatctgacgagaaaaaatatcagttcaaactggatgaaaaataataacgaaaatgtaacacttagcgttatttcagaagtaaaagttctcgcgtttgttccgggtgaggacgatgaaattcaaaatgaagacacaggtatcatagataccccggaacttgccgttacagagctcgatcttggaggtgcgccggtattggcagcaggtaaattcctgttccttcctgtgagagcaatgacagcggaagacagctttaattgggatatatatttcgatccttattacggcttgtgcataagcacagaagagggtgtatcc

SEQ ID NO: 3157 - DNA, 32233 bp, Unknown
  16S sequences of unknown bacteria
aaaacggaatctcaagccgcgcgcaaaaagaataaaaaataaatttattttattgacgaaaatcgtcttataactttttacaagtgtcattaaaatgaggaaaaaacctgtgtttccaatggttttcccttttgcttgccgggcccaagccttcgtgcaaacaataatttgtctgtggcttatatctgaacggtatttaccgtatttccgtgtttctgaataagtttcactaagtcttttgctttaagccaaactgttgcagtgttatcatttgggtgaacacctatcaaatccgaatcgtccataaagtcattatctaaaaatagtgtcaccttacattcggaatcattcaacagcccaagaggtgttactgctccaggtatcaatcccataatatccattaaatcgtcagccgatgcaaaagataatgctcttgtgttattgtttttacgaaactctttcaaatctactcgcttatctcctttaacggtaataagataataatttcttttcttatcatcacgaacaaagagatttttcgcatcatattcaggataaggtatttcaatctttgaaagttcagccatattataaactgcttcgtgttctgttatctcatgccaaatattttcttgtattaaataatcgtatatttgttgtttattcatcaatccatcccgcctgccaatcaaaatttacatgtctgcattatatcacctgtatatgaattcttctattattttcgcttgttcattaataagcagaaccaatcgccttcgccgacgtcaagatgaacgggcttcacccgccgctgacgagttcgtctgcccctgcttatatgacagacaagagggcgaaagcactcgttgctttcgccctcacatagtatgtttttttcttatatctgctcgtatcgttttataccaccacaggaaatccgggcaccatttgggcaccaaagcgtcaaaaatcatcgttctttaatatgcttcaatagcgcaaaatcaatactattttttattatcaccgcagacacatttcataaatcttttccacatcagcagatgtaagatttctcggacccgaaattataccgcctgcacaggcgtgttcggccatctccttaaagtgcttctcatcaattcccagatcggaaagaccggatttcaggccgagcgtattaaaacagaaatcttcaaccgcttctatcgtttttttcgctccatccattacatcgagattctcggaaatgccgaacacctttgtgccgagacgggaaacagctggcgcggttgtttcatctaaaatatatttcagccagcgaggagttaatatcgccaggccgtggccgtgggtgatatcatagtatgcggacagttcgtgttccataatgtggcaggcacagtcgtgaaccgttcccgcgtcaagtacggtgttgagcgccatagaagaagcccacatgagattagctctcgcctcgtaattgtcaggttctttcatcgcggcaggcgtccatttcacaacagcgcgcataaccgcttcctggaattccaagatcatatcaaaggttgcgtcacctgcgaagtagtaattatctaaaacgtgattgaagatatcaaaagcgccgcaggctgtctggtaagtcggaagtgaaaaactcagttccggattttcaaaagcggctctgggaatcagcgcactgccgcccagaccgatcttttcgttcgtgtccatgtttgaaataaccgaccaggcatccatttccgagcctgttgcggcatttgtcagaattgcgacgacgggcagagcctccgttatccatattccgtctgcaacaagaggccaaacatcgccgtcctcagtcacagccgctgccgcaaccccttttgcgcagtcgatcgtcgatccccctcccactgctaaaacgacatcgatattttcttttttgcagatttctgcgcctctgtttgccgttgtatgacgagggttcggttcaacgcccgaaagttcgaatatctctatctcgtttgctttcagcaattcgacgaccttatcataaaatccgttcctttttatagagccgccgccgtaaacaagtaaaacctttctgccgaattgcagaagctctccgggcaaatattctaactgatttctgccgaaatatactctgtcgggattgtgaaatataaaatcattcattcttccttcttgcctcctttatttaacagaattttacaatttcattcctgtttcataggcctctctcagagcccgatgtcccttgatatcgcccgcatcactgactcctcccgcaaagatcgtctttttcagcgccgctttctcaaaacagtctacccagccctgaaccgcggtcacggctccttttaccgtttcatcttcatcctccgcggccgccgcaagaagataaatatcacggaagctataatccgatgcaaaaagagcattggctctgtcaaacaaagtcttcagctggccgcaaatgctgtaataatagacgggcgtcgcaaaaacaatcacctcagcacgaaacattttctcggtgatttccctgctgtcatcatttatgatgcattttcccgttttcagacaagtcagacatcccctgcagaaacttatcgtcttctctgcaaggctgattttctctgcactgtgacccgcgtcttctgccccgcggagcaattcgtcggcaagcgcttctgaattgctgcctctgcgcaaactcgatgaaaggatcagtacctttttactcataattattcctccgtatcactgtggcaattccagaccaatattcctgtttctatggcttcttcgtattttgaaattttaaaatcaagcttagcgagcgtctcttctatctgctttttttgtgtctgcagaagcttcctctgttcgttcagcaagtcgagccttgcctgaaaagtggaatctccgccgctgtacagcttctgatattcgattagaaattcaatcgaaagccctgccgctctcatgcacttcgcgttttcaacccaggagatatcatcctcgctgtaatctcttattcctcctgcagttcgtgtcaccggaggaatcacgcctattttttcataataccgtaaagtatcggcgggaatggcgtattttttactgacttctctaatcgtcaaacccatatctttacaccgtcctttctgagacaacactattgtacaacttagagctgacttcaagtcaagagcatttctaaaattgctgaaataaaaattttcggcttctacttctgccaagactcctctgccgctgagggatctttccgtcttcctccttcacccggcagaaaaaatagctccaaaaacacagcaggacgccgtcactgatgcccggcgtcctgtaacttcccgctattctgctgctcggttttattttacccgctgtatgtctttttctttcttttgctctgttgtcttttcatttcagttttttctgagataaccatgaatctttctcagattatcagctgaaagaaatcctcgtcgttccgattccgatttcgtaccaggcgtcagagatcgcctgattataagcgacgacggcgctaatacgccccagcttagcctgtgttaccgacagctgtgcactttcaatgtcggacagagttcccataccgatttcataacgtgtctttgccagttccaaagaatcctctgctagacgaatcatagaatcgtaacgggtaatctgactttccagagccggaattttctcgtaggccgtctgcaggctgtttttcttattgagcttcatctgctcgatacccatctgcgcctgatcgtaagcggatttcgcttttagatatttcgaggaattgctgtttgtggaacttcgcagagattcgaactgtattttggtcagttctgtcagatattcataatatttcagctccaggctgtttttcagcatatattcctgtgcgtcattcagggacggcagatcgtttacggctttggtcagttctgtcgtcagattcaatttgcggccggcatccatacccatgagcatcagaaaattcgactgcgtagactgaaatgtattttgtgcctgagtcagtgaatcctgcgccgtcagtacattattctcctgactttgtacttccagcttcgaagcggctcccagctcatactttttcttcagcagattcagagtattctcttcagaaatcagcgtttcctcgcagactttcacattttcctgcgcctgcaggagaccgaaatacaactgttctgtcgtctgctcgatcttattcatatccgcctgataattgttgtcgatattttcttttacaaagtccctctgaagctgtgtaatcttcagatttgattgggttacgccgctctcctgcagctgatactgctgatccagcggaaggagatctgcgatatcgagagaatcagagatcgtctttgccgtctccttatatccctgggctatcgctttatccgattctctggcgagctgagcgctctccgcctgcagtccctctgtctgcatgatctccacggctttctccaaggagagctctgcggcgtcctgagcgaagacgacagagatcagttcatccggaaacagatagccttttgcggactgttcctctgccgcatgatatatattgctcaccgctattgcggtattgccccgggtagccgcggccgaaccgtcatcttcctttggatcgaattccttcatccctttatacatccccagttcctgcgccgcggcgatatagctgtcaggccagctgcccgccagttctgacgtatctgttccggcggcgcgtacgcacatcgctgccagctcattgtatgtgatatttccggaaggtttgaaaattccgttgccgtaaccattgactattccgcacagggacgctgccgctatgtaaggctgcgcccagacacagctgtccaggtcattgtaaagagtcagtgcgatctctgtcagacgatcgctgtcgtggagatcctgcgagagctttttcgccagagcttctgcatccgtttgctcttccgtgtccgacagcttctcctcggaagatttttcctgatcttcctgcggtgattttccttcttcctccgaagggaaaaccaaaccggatagatccgcatcctccgacagaacgatctcggtgtcttcccccacgatcagagatgaaaatattttcgccacctccgctctcgtaatctgatgatccgggcggaacgttccgtcctcatagccgttgatcacacccttttcggacagaagcgccactgcgtcttcgcactcttctcctctggtatccgaataggaactctcggccgcccatgcgccgggagaaaatatcagctggctcagaagaaaggctgacagcgccagactcgccaaacgaatccaggcgctcgccttcctttgacacagcgatctgtataatcccatatcgatatttacctctctttcttttctttcctggcatttcgcttcgccagccacagagcctctctgtaaagtctgaccttcttctttgccagacgtctgctgcccctcttcgtctcaatatcatccacaatcgcatacagtacaggtatgataaagagagtgaggagagtggaagcgataagaccgcccatgacggaaaccgccatcggagccatgagctccagtccctcgccgatgcccagcgccatcggtaccatactgatgatcgtcgtcagcgtggtcatcaggatcggcctcatacgggtacttcccgcttcggcgatcgcctcatcacgtcccatggtttctctgttctggccgatgaattccaccagaagaatcgcgttgtttactacgataccgatgagcatgatcagaccgataaaggacggcatcgatagtttcatccccgccaggaacagtgacagaaatgctcccgacatggcgaaaggaatcgacatcatgaccatcaccggtaaaataaaggactcaaactgagccgctaaaacgatatataccagcagaagcgctacgatgagagcgatgagaagatctccgaaagcatccatcatctcctgctgcataccgctttccgcgtagtaagttccattcgggaaatcataatggtctaccacatcatagatttcttccgaagcggtattcagatctactccgtctttcagggtaacctctacattctgaatcactttctggttcatcttgctgatggttaccggcgaattgtccgactcaaagtcagcgatctgatagaccggtacagacattccggtagatccagtcaccatgatatttttcagaccttccacagaatcggaatactggtccgaaagagacagaaccacgtcgatggtctcaccgtcgactgtcacactggtggccgtcgttccggaaagcgatccggacagtgcagaagccagctgataggcggtgataccgtagtttgccgcattggcgcggttgagaaccaccttgatctccggggttccctcctctacatctgtaatcgtttcactgacagcatcgctggcgctcagctcttccgccagccccagggctgcttcgctgacactgtccacatcttcacccatcacctgcactgtgatatccgaaccggacagactcatactcatgctggatgtcacctgataggtgatctcggcaccggccaggtctttgaagtgttcttttacatccttcatgacttcttccgagcttcgggagcgttcctcaattcccttcagagtgacagaaatcgtattggaatccgacgacgtcagcggtgaagaggaagagcctgcgctgaatgcgacatgctccacctcgggaagcgtcagacagtattcttcgatcggcgtcaaaaatgcatctttatcttccagagaagtaccgtaaggcatttcagcggtgatggtgaaggttccttcgtctgtctcaggaagcaattcccatcctacgaaagagacgagagaaaccgaagcgataaagacgatcagaagaatggccagcacgcgttttctgcgctttaaaacccaccggcatccatacttatagctctcctgaagcgcttcgatcatcgctgcaaaacggtttacgatcttatatttatagaaaaacggtccgatttttatgtattcctgggaaatcgaactgtccagaagcttcgacgagagcatcggcacgacagtaagagagacgatcagagagacgatcagagcgccgataatcgtaaaacagaaatccttaaagagcattcccgtcatgccgccggaaactgcgatcggaagatacacgaccacacttgtgacagtggacgccatgaccgccagtcctacttccttacttccctgaaccgcagcgtctttggctccgagtcccattctgtttctgcggaaaatattttccaaaacgacgacagagttatctaccagcattcccaccgccagcgtgagagcgcccagtgtgatgatattcagagacatatccagaaccttcatcacacagaacgtcgcgaaaacggaagcgggaatcgagataccgataatcatcgtagaacgcacgtttctcagaaataagaaaatgatgatgatcgcaagcagcgcgccctctaccgccgactggcctacggaacggatggaatctctcacataatctgactgatcgaaaccgacgacaaaacgaacttcatcgccgaattctttttcgatggattccatagcggactgtacatcgtcggacagctctacgatatttgcgccggaagcctgcgtaatccccagagctatggtatcgttgccgtcaagccggctgacagactgagcgtcagattcgccttcggcgacggttgcgatatctttcaaagttatgacactgccgtcattcaaagtaaccggcatatctgaaatctcggacaccgcctcgaattctccgtaagtccggacgataacctcctgggagccgttttttgccgttccgctcggcaggctgacattttccgcctgcagaagagaagtgatcgtagacatagtcaggccgtaccccgtgagcttatcctgatcgaaatcgatcgtcacctgcgactccgtatttcccgtcatagatacggaacctacaccggagatacgctcgaagcgcggtatgatattatcttcgagatactgtgccagctccgccgtgtccttgtcggagtatgcgtaaatctgcatcaccggcacagcgtccatattgactttcatgatcgtcggagaggatgcgtcgtccggaaaagaattctgaacgagcgacagcttttccctcatatcgagagtagcgaaattcatgtcgatatccatgtcgaattccagcatgaccatcgccgcgccttccgatgtcatagaaatcatattttttacaccttctaccgaggcaaaagattcttccatcggttcggtgataagagagtcgatctcttccgggccggcgcccggataagtgaccatcgccagagcgtacggataatcgatatccggcatcaacgcctgcggcgttttgatgagtgatacggtaccgaggataaatacagcaaaaagagccatgatcatcgtcaccggccgttttaccgctaatttggataacataagccggctcctattctacgacgttgaccagttcgccgtcactgacataattctgtcctttgactacaagtttttcgctggggcggagtcctgaagtgatctccgtcagcgtaccgttgtcgagacccacagtcactttgcggagctcgatcttattttcctctgtcagcagagcgacataatcctcgcccctcttcttcactaccgcgtcggaagggacggcgacaacgccggatttactgctggtcacgagagatacttccgcgaacatgcccgcttttagatctttatagctgttgagtgctatttttacctcatatgtaaaagttccctgagccggagcatccgccacagtcatcaccgtgcctgtaaaaggctggtccgagaccgattttatatacacgtcgactttctgcccttctgtaatactgttcaccagatattcggagactttcgcttccagctccagcgcatcggtatccgagatgaccaccgccgcggaagtctgtccggcagcgccgccggccactacatttaccgcggtggcgcatccgctgacaggcgccgtcaccgtataatatcccaaagaggaagaggctgctttcgcgctgatcttcgcctgttccaaagagttgagtgcggaattgtactgtgtctgcacggattccagatccgacagagaaatcgcgcccgcgtcatagagagcctgcatcctgtcgagagacactttcagagcgtccaccccgtcctgcgccgattttatgcccagctgtgcctgttccgactggatctgcgcctgttcgctgtcgatggtaaacagcgtctgtcccgcggtgacatactgtccttctttcacattcacttccttgacttctcccgctacaagcggaatgacatttaccgcgttagatgaagcgattcttccggaaaccggagacaccacggaaatatttcctctttccaccgtctgaatctgaacgttggtaagagcttcctcctcttccgcagtctcgtccgtcatctgaatctgaacggcgcgtactatcccgaagattacgagcaaagcgaggataatgaggaaaacctttcccgcctttccgcgctttggaacggactctttcgcttccgtgattttttcctcaatttccggaatcatttcttctgcactttctgcgtcggattcggctgcgagatttctcacttccagggcatcgttattgttttcttctttctgttcttccgtcattattttctccttatccctatttttgcgcatatatcgattggttttgcccgatgaacggcatccattccgtttttaacctctgatttcatcggggaaaacttctttcccattctaacatacttttatctcctgttcgcaattctgcgatgcattcgctcataaattatgattttcgtattccgtcacttcctcctccctgtttcggcagcatttccgtaatattcgataccattttctcgatcagcatctgaaactgcgttttttcctcccgggtaaagcctttaaaaaaaatctcttcgatctctttttttcgcaaacacagatcatttatcatgggatcggctttttccgtcagcagcaagtgagaaatcttcttatcctgctgatcctgcaccttctctatgagtcctttttttaccagagaatccacagacagagatacatgagatttggaaaaaagcaattcgttcacgatatcagaagcggtatccttttcgctgatactgagatatgagacgacagcaatttcattatttgtaagattatattttcgggtcatttcgaggtatgccttttccacgattttctttataaaattaccgtaattaaacatctccatggtcacgtcagctccttttgttcaattttaaactaatgtaattatgctatatatttttttgttcgtcaacacaaataaatttctattttcattctgcattcgtccgacaattcacaattcatccgagtttctcttgccgggccgcttttctcaaaagaaaaagtcctctccgacgtgtaactgccaaagctgcagaacactctgaagaggacttttttctgtttcctgtcccatgaaacagcagtctgtctaatttagacagcgctaactgcaatttccggcctatgcatagtgatatttatctctcatcttgatgaagaaagtaatcgtcacacagagagccaaaatttccgccgtaaagatggacagccagattccgttgagaccgagaaacagcggcagcagaaagagcgccgcgatctgaaacagcagcgtccgcaggaaagagatcgctgcggagaccgcaccgttgttcagcgccgtaaagaaagcggagccgtaaatattgaagccgtttaccaggaacgccagacagtagagacggaatccgtgatttgtcatggcctggagttccgcgtcatatcccacgaaaaactgcgtcagaggtccggcgcaggtctccgccagtatcagcatggaaatcccgaaaagtcccacgatacgcaggctgcgccgcagcagattcttcagttcgtcgtgatgtcccgcgccgtagtgatatcctacaatcggcgcgctgccgatggaataaccgataaatacggcgataaaaataaagtttacatacatgatgacaccataagccgctacgccgtcttctccggcaatccgcatcagctgaagattatacagcatattgaccagagaggtggagatattcgtcatcagctcggaagatccgttggtacaggccttcagcagtatttttccctgaatccggcatttggtgagacgcagcagactgctgtttttgaacgtgaaataagtcagcggtatcgccgctccgatggtttcacttatcgctgtcgccgctgccgcgccggctacgctccattggaaaacgccaacgaagagatagtccaataccatattggtcacgcccgccgcaatgatgacggccaggcccagctgaggcttctgcgctgtgacgaaaaaactctgaaatacgttctgcagcatgaactgcataatcgaaagaaagctgattctgccgtacaggatgcagtattccgccatatcgccctcggctcccagagcataagtcaccggacgcaggagtatttcacccaggacagctactaccaatcccaggaccacggtcacatagatcatcatggaaaaatattcatttgccttttctctgcgcccttctcccagagttctggctacgatagcgctgcctccggttccgatcataaatccgagaccgcccacgatcatgatcaccggcatgatgaaattcaccgcggcaaattccgtcttgcctgcaaaattagagataaagaagccgtctaccacaccgtaaatcgatgtaaaaatcatcatcacgatagacggcagtgtaaatcgcagaagttttttgtagttaaaatggtctgaaagttgtattttcatttctcttctcccgtattcatcggcggcatcggacgatttcaaacgccgtcttctccgccggatatgatattcataaaattgctgaaaatatcaccgcatattcataaaaaacacccggctgcaaaaccgggcgcatctaacatcttctccaacgacgcagctgcgatcgcgcatcttccgataactttaatgacacagtttcaggacaaaaacggccgtctggaaaagtgaaaaaacaccgaaaagggaagataacccgcagatgaaaagagacgcggaagattttaacgggaaaggatttccgcaccgtcatccgtaaccgcgatcgtatattcgaactgcgccgatggctgcccgtcatatgtataaatcgtccagccgtcatcctcatcttcaaatacatccggttttcccatgttgatcataggttcgatggtgaataccatgcccggcaccagaaggatatcatgacctctctctccgatatggctgacccacggttcttcgtggaagtcctcccctattccgtgtccgccgatttcacggactacggagtacccgttgtctttggcatgtttattgatgacgtagcccacatcgcccagaaatccccagggtttcacctcctgcagtccgagatcgagacattctttcgtcacccgtaccagtttctctgcggcctcgctgacttcgccgatacagtacattctcgatgcgtctccatagtaaccgttgaagattgtcgtacagtccacattgacgatctgcccgctcttcagaatcgtatcttcgctgggaataccatgacagacgacatcatcgacggagatgcagacactcttaggatatccctcatagttgagaggcgcgggaatcccgcccagttctctggtgtaccggtcgatgaggacattcagttcctccgtgctgataccctcgcggataaactgctccgcatagtcgagaaccatggtgttgagacgaccggcttcccgaatcccctcgatctgcgcaggtgtcttgatcatatacccggaaggaaccagatgtccccggtcttcgaattcccggattttccggtcgaattcactgtgacaattcttgtattttttcccgctgccgcaccagcagggatcatttcttcccagtctcattaaaatcctccgctcgaacctgcgctgaaaccgcagacctgaatttacatgcactttttattttcttcgccgctcctgtcagccgaaaattccgaaccgcctttacatgctgtccagaaagctctgcagtatgatcaccgccgcctgcttatcgatcacctgcctgcgtttttttcgggatacgtccgcttcgatcagaacgttttccgcgattttcgtcgtaaaccgctcatcctgaaatactacgcggatatcttttataccggtgctcatcatcttgttctccagcatttttctgaaatcccggactttctgcgtctgaacgctgtcactgccgtccagattcagcggaagtccgatgacgatggtgtcacatccgtgttcttttacgaggttcagcaccttatccgcatccttccggatcccgatccgatcgatggtcatcagtccgttggctgtaattcccagcatatcgctgagcgccacgccgatcgtcttatcgcctacatctaaagaaatagcgcgcatattagtcctttctgtcaatcgtatattaaaatgaatgcccgggcgcaggcccgggcaccaggatatatcatttgtttaaaaaattcttaagcaatgcctcaacgagatcgtctctctctacctgtctgacgaggtttctcgcattattatgacccgtaatataagaaggatcacccgacagtatatagccgaccatctgatcgagaggctgatatcctttttcttccagcgcatggtacacctgctgaagaatcatttctatcgttttatcctgaactttttcaggactggtgaacataatcgtgtccctatccatgcctatcacctcccatggcatttgagaagaagtacaaaagcgtatgaaatcgcgatgactattttatcttaaatcaaactttcggcaaatgcaagggcttcttcgatctttgaaggatcctttgcgcccgcctgcgccatatccgcttttccgccgccgccgccgccggcgacctttgcaatctgtttaatcatatttccggcgtgatatcctttttccaggagggagtcggacaccgaaacgaggaatgtcaccttgccgccgttttccgccgccaggacattgacgacgtcttttgcctccgctttcagctgatcggacagagatctgagatccgcaatatccgtattttcaaacttggctgtaatcagcttcacgccgttgatttctttcgcattcttcaccagatctcctgcggaatcgcccatagactgacgcttgagttcttccagttcttttttgagggcttttacttcttctgtaagagccgatacacggttgacgatatttgccgccggtgtcttgagcttttcggagacttcgctaataagggcgtcgtcttctgcgatgtaatcgtacagaccgatgcccgtaatcgcttcgacccggcgaacgcccgccgcgatgcccgtttcactgatgatcttcaccgcgcccacctgaccggcattctgaagatgtgtgccgccgcagaattccttgctgaagtcgccgcctatcgatacgacacgaacctcgtctccgtatttttcaccgaagagcgctgtggcgcctgtctttttcgcatcttcgaaactgaggacttccgtggaaacgtcttcaaaacggctgatgatttcattggtacgctgttcgatcttctgaagatcttctgcggaaacagcctcaaagtgattgaagtcgaatctcagactgtccgccgtaacactggaacccgcctgcgccacgtggtctcccagaatttctttcagagccgcgtggagaatatgcgtcgccgtatggtttctggcgatattattccggttaatctcatcgacttttgcagaaacggatgcccctttcgacacactgccggattccaccgtaactttatgaacgtacaggttctttgcctttctggtatcgtttacgatcattctgcagtctgcggtttcgatcacgcccctgtcgccggcctgtccgcccatctccgcataaaatggcgtacggtcgagaattaccgtagcttcatctcccgccgagatgctgtccgccggttttctgtctttgagaagagcgatgactgtaccttcgtccgtcagagtatcgtatccggtaaagactgtcgcttcctccgaggtgaagaaccccagttcctcatcctgccacgcgatttcatcgtcggattttctggccgctctcgctttttctttctgctgttccatacacgccaggaatccttcttcatctgctttgattccgctctcctccagaatttccaccgtgagttccagaggaaaaccgtaagtatcgtaaagtttgaatactttttctccttcgagggtcgtctttccttcttttttcagctcttcaatgcagtcacagatgatacacgtaccctgatcgatcgtctcgcagaatttgtcttcttcaatggagaggattttaaagatatagtcttttcgttcttccagcgcaggatacgcttcgccggacacttcgatgacgcgctccgccagtctggccatgaatttcccctggattcccagcagtcttccgtgtcttgcggctcttctcagcagtcttctgagcacgtagccccggccctcgttgctcggaatgataccgtcgctgatcataaatgtcaccgaacggatatgatccgtgatgatacggatagaaatatcttccttcgttctgccgcctttgtaagggacaccggagagctctgtcacgccgtccagaatgtatttgatcgtatcgatggcaaaaatggagtctgtctcctgcatgatgcaggccattctctccagtcccatgccggtatcgatattcggatgttccagaggattgtaattgccctcttcgtcacggtcgaactgtgtaaacacatgattccagaattcgatatatctgtcgcagtcgcagccgggcttacagtccgggcttccgcagccgtactccggccctctgtcgaagtagatctcggagcacggtccgcacggcccgataccgatttcccagaaattgtcgtcttttcccagcctcacgatgcgctcttccggcattccaatcttatctctccacagagcgtacgcttcatcgtcgtcctgatagacggtcgcccaaacccgttcttccggaagcttgagccattttgtaataaattcccatccccactccagtgactgttctttaaaatagtcgccgaaagagaaattgcccagcatttcgaagaaggtaccgtgacggtcggtataaccgatattttcgatatctcccgtccggatacacttctgacaggtggtcattctctttcccggcggcgtttccagaccggagaagtacggcttcagcggcgccatgccggagttgatgagcagcagactcttgtccttttccggtacgagagaaaaactctcatgaacgatatgacccttactctcgaaaaattcgagaaacatttttctgatttcgttcagacctaacttttccattttttatatcctcctgttaaaaattacgaattttttctatgcctccgcgaaagatccggcgccgatgagtcagcagcaaaatattgcggcatcttccccaaaatagaaaaacccgcccccaaacagggacgagtcaatgccgcggtaccaccctgattaccgggaaccgtcattctgccttcgacacagcgaagtacgccgaacagtcggcataccgcagatgcaaaatcgaaaggaaaatgccggaattatccggtatctctcggcatataacgctgccagccgcttcggactacacacgcagcgtttatatccaatccccggagctccactacagccttctcgctccgatttgagatataaaaccgcgctttacccgaagaactcggaagctgcttcgaaagaaccgccaccggaaggcttccaccgtcccttcctctctgttcatggcgccgtgtctctctacttctcttcgtcaaagtctttcgcgcttatcgttttctatcaaaattacccgattattatactaaagatttatgagtattgtcaatcattctgaaactgaaatccgcggaacaaaaagaattccgtgaagaaaaataccggtatcgctgtattcaggaaaaacgattggaaagacgggctatcgtctcggatcttaccagcgaaggatttctttttttatcagtttaatcataatcgaagtattgagatccatagcctctttcggataagtctttacgaaaccgccacagcggtatttcagccggaaactttctgtgatatccggatcagacacgcctctttccaaatgatcagcaataaatctcaccgcttcttccgtctgcggcctgatattctccatataaaaagctgtctgtctttcagataaaatcccttcatgaggaagcagcagccggtttacgctgagcctttttgctttatcaatagaatcaaacgtcatctgtacgccggtgagaaacgccgggataattgttttttccgcgtcatacagccccaaggattcgcaggacaaaaggagaccccggttctcctcgtaaaatgcgacagaacatttggtatgtcccggaagagccaccgtccgaaagcgcatcgatcccgcttcgatcacatcgccgtcttccaccgcaatatccgttcgaagtttttctccaaggaattcataatcctctattccccgttctctcgccacactattgtctaattgcttcatggactgcctgaccttttctctcgcaagcgcggccgccgcatacacgccggctgtgacctttgcctccggataagatacaagaacatacgcgctgcccaaagcgtggtcgtaatgcgaatgtgtgagaaaaatataatttagcggacgccgtcccagatagtttttcactttttccgcgagagcaaatccggtaaacccgaaacccgagtcatacaaaatcgccgtctcggaatcatcgatcaaaaatgcgctgtcgccgggctgcactcgcatgtcgattatcttgatgtctttcataatgaaacctcccgtataaccgtcccgctttatatttattttagcacacaactgtcagcacatcaattttttgtaccatgattttagatcgggaaaacgaagcacattctgagacgagccgcctttttcagatattatcagagctgaggatcttcagaaatccgcagaaaatctcttcgggaaaacactttctttcttattatataatacgctgccagtacagacgctccggtgatcagccaggaaatcggatagacgatcatcaggattctgaaatccgtaaatattctgcagacggtatagatccagaccagacgaaagagacaggttccaaatacggtaagcacagccggcgtcatagaatatcctatgccccgcagcgacgcccctccgatctcataggtgctggcgagagggatgaacgacagcacataaagcatacgaatcaccgcgaagcccgtcacatccggatcggtagtaaacagcgatacaaagaaccctctgcccaagaggaaaatcagactcattcctcctgtgatcagtatactggatgctatgcagcaccggtatactttgcggcagcgctcatactgagccgcgccgaaattctgactggtaaaagtcacagctgtctgattaaaggcgccgataacgaaataagtaaaatattcaaagttgagcgccaccgccgaccccgctaccgcatcggagccgtaaccgttgagagccgtctgaatacagacgttggctatcgaaaacaccattccctgcagtcctgccggcataccgatccgcagggtcttcttcagttcggttttcgatattttcagttttctgaaagagagacgaatcggaccgttctccttcataagaaagtaccagaccatagatgcgctgatgacattggatatcaccgtagcgatagccacaccggccacatccagatgaaatacgatgacgagaaacaggttcagtcccgcattgatcagtccggataagatcagacagtacagcggccgcttcgtatctccgacgcttcgcaggatcgccgcaccgaaattataaatcatgataaaaggcattcccagggaaaaaatgcggagataaagaaccgcatactccagcacatcttccggggtatccatcagaattagcaccggacgcgcgataacgacgcccagcacgagcagaatcattccgctgatcgccgctactaccatggaagtatgaaccgcatcctttattttctctttttcccgtcctccgatataattggcgatgactacattagtacccacggaaatgccgataaacaggttgataatcagattgataatcggaccgttgcagcctaccgcagcctgagcctggctgttggcaaaatgtcctaccaccgctacatctacggaattaaacagctgctgcagaatactgctgagcgccagaggaacggcaaacagaaaaattttattcagcagacttccgctgagcatatcgatccgttctgtcgtctgcctcatttcgttctttttcatatcataatctcctctctgtcgaacaatgcttttattgtaacatgtccactgcggctcagtcttcgtcttttttcaaaatgacccgactgccgccgggagacagaccgctgtccgtctcccaaaatcagagagttcacagatccggaattcggagctatcgcgttccttttcttccgccgcaaaggttgatcacagagccggcaagaatcagaacgacgcccaggatgatattccacgtgatctgctctttcagaatgacggcggccagaagaacggcgatcaccggtttgataaaaaatgcgatggaagcattggaaggccccgcctgttcaatcgctttcatgtaagagaagtaaccgatgcccgtgacgataatgccggcataaagaactaccggaagcgttgccgtactgatgccttccaccaccggttcgccccggacgagaagaaagaccagttctgcggctgaagcgatcagaaagctgaagctgttctgcaccatgccgcccagacgctctacccgcagctttcccagcgtagtgtaaagagaaaaagtcaccgcggaaacggcggaaaaaatcagccctttcgcggtattgccctccgccatattcgccggattagccacaaagatcaatcccgcgatactgaccagaagcacgagagcttttctcttcgtaaaagcctcgtggatgatgaaataagcgaagatcatcgtaaacaccggatttgcggagatgatgaccgccgctgtattcgcattggaattcataacgcccagctgaaaacaggtcatgctgagacagacaccgatcagccccagagccgcaagatagagcatgtcaccttttgtgattctgatcttccgcttcctgatatcatgcagcgcgaaaggcaggagaaacaatcctccgataaaaaacctcagaaatgtcatctgaagcgctgtaaaatcttcagctccaaatttcagtgcgatctccatcgtcccgaaacatacagccgtaatgatgataaataaaacactcttattactgctcataatctgccgccctcctgcgctcgattttaagacatccggcgcagacaagaagcaaaaagccgtttcctgcgctgtatcaaagtccattctgtattgtattttttcatttaagtattataatcacccttcaggaatatgtaaaatatatattagttatatttactatatcaaaaacatatgatattttgtaaatgatgaatactaattgcatgaaagctgataaaagtaatgtaactatgtccgctgatgattaattactttgtcatccgaaaactcaagaagttccccagatgacaaacacgccttttctttcacccttcaggaggtttcccatgtcagtcagttacgattattaccgcatcttctactatgtggccaaatacggaagtttcacccgtgccgcatcgatcctgatgaatagccagccgaatattacgcgaaccatcgcaaatttggagaaagaactggactgccgcctttttctgcgcaccaaccgcggcgtcacactgactccggaagggaaaaaactgttcgcgcatgtggaaatcgctcatgagcagctgcagaatggagaacttgaacttgccagtgaaaaaaatcttcagaccggaagtatttccatcggcgtcagtgaaacggcccttcaggcagtcctgctgcccgtgctgcagcgattccgccggcgctatcccggcgtccgcttccgcatcaccaaccattccaccgcacaggcggtcacatctctgaaatccggtctcgtcgaactcgctctcgtctcttcgcccaccggagcgacaaaaccgctgaaggaatttcgcctgacggaatttcgggatgtgctgatcgccggcccccatttccgcaggctgaccgccggtccgcaaagcctgaaagatctcgccgcatttccgctgatctgtctcggtcctcagacgaagacctatcaccttctaaacgatttctttaccgctcacggccagagtctgcagccggacatcatcgcttccaccacggagcagattcttcccatggtaaaaaatgatctgggactgggatttctgccggaaaaattcgcggatgaagcgataaaaaaaggagaagttttctccatcgatctcaaagaaaaacttcccctgcgtcatatctgtctgattcgcgataaaagccgttccatcggtatcgccgcgcgggaactcgaaaaaatgtgcctgcacttcagagaagaaatacaggagtgattcgatctgctccctcagcgactcatcaccacatcccgcagataccggtcgaatttccggtaggtctcttccggcaattcccggggccaggacatcactacaaagctgtgctcttccaactccttccggtagcggggaggaatatgagtataaggattcactttgtatcccgccgcctcgtaaaacgcttttctgctgacggagatctcatccaccggcggatcgatctcgagaatgacagtctttttcgcttctctgagaagttccagcgtccgctgtccgtatccccggtttcgcagctgcggccgggtgcagaaatgttctatgtatataaagtcttctgtttcccaacagaggatcatccctacccaggtttcctcatcgtaaatcaggtgaaaacgatattcctcatgtcccatgatttcgatctgggattccggctccctctgttcaaagaccgggaaactgatttcatacagttccatagctctttgatacaggtcgctgccgccctccgtcaatcttctgaattccatttttactccttttgattttgttacttctaagatgttacttcagatattgctgcgctgttccagactcattctgtttcatacggccagtcccggatacctccgaactcgtacacctgtgtatagcccagtccggccagtctggcggaagctgtgcggctgcgatttccgctgcggcagtataccagaactgtcgtatcttttgtgggaatcacctgcgctgcgcgcgtctcatcgatagagttcaccggcagcagcaccgccccgggtatatggccgctgtcatattcgtcctgctcccgcacatccagaatcacagcgtcggtattttcgtccatgacagacttcgcttcctctgcgctgatccggtgatatccgtcctcgacggaagacatcgctgtattctgcccgccgctttcatcctcctgttccggctctgcgccgcatcctgcggcgaatatcacaaaaaacattcccatcagtaaaatcagcgccgtctttttcgataatttctctttcattcggtctatccttccgtcttcaaagcgatcttcatcacaccgtctctgtggctttcaaaaagatcgtaggccttttcgatttcgcgcagaggataggtatgggtgatcagcggcacggtatcgattttcccttcccggatcagttccaatatctccgcacagctgcagccgtccacacctccggttttaaaggtcagatttttgccgtacatgtcgggaagaggcaggatctgaggaccgtcgtacagcgccaccacggtaaccacggcattgggccgggcacattcccaggccatgcggaaagtctcttcgctccccgctacctccagcaccgcgtccgctcctccgtaccggctgtattttctcacggtttccgccgcctgctgcggatccgtcaccagaacttcgggataatgttttttcacaaactcccgccgctgctcttccctctcgcagacgataatatgtctcggattcttcagccggacgcactgcagtgtacagatacccgcaggacctgcgccgatgatcagtacggtatctccctcctttacttccgcaatctgcgccgcccaatagccggtagccagcacatctcccacgagaagcgcctgcagatctgtgaccccgtcaggaattttatcgagacacctgtccgcataaggaacacgaacgtactcggcctgccctccgtcgatgcggcatcccagcgcccagcccccctgaggatcggtgcagttgttcacccagccgttctgacagaaaaagcactccccgcagaaagtttccacatttaccgtcacccggtcgccgggcttcagatctgtgacttctgcacctacagattccactacgccaaccatctcatgtcccacagtgattcccggtaccgcccggggtacggagccgtgcctgatatgcaggtcactggtgcagatactgctcagcgtaactctgaccacagcgtcccgctctccctgtaaaaccggcttcggtttttgtgtcagctgaaattttcctttttctatgtatgtgtatgcgagcatcagtattctctcctctatacgtacagtttgcgataaagggcagtctccgacaaaaagagaaacgtaatccattctctcccgttccatcggatcgtcatcccttcatttcttcgatattcaccgcattttccgtgatcttttgaatcgtctgtaccagagctgcacgagtcttgggatcaaacatcttaataaagcctatcggcttgtcgaaaggaggcttctgcagatcggatacattttccatatagccgttttgttcgatatgattgatgattttatggacgaaagcgatctgtttctgattcagagattcgtcattgataaattgtgaaaaagcctgcatcgcagcatcgtgatccaactttgcaattcttcgtatcatcagtccgaacggcgtatcgccgtattctctgacgtagtcctctctcgttcctaattcactggtgagaatcctctccagctcattaaaatctcccggactcagcgcgatattgtgcttcagtttatagatcgcaagcgtatttccgttttcctccacataacggctgacttttctcctgtaattctcgaaatcatatgctggcggcagctgcgccccttctcgcgcttcgatcaccggatcgtccagctttgtatagatcaccggccggtgtcctgaccgttcctcttcgagaaaacgcatcagaccgcgcagatcgcttctgacagactcatatctgaggatatcttccgattcccagaattcttccgaaagaatttgccggattatctttattttctcttttacctgaggaatattcgctctctgccccaacaactctgcagtatagcagaggctgtttttcgtattttcaaaagacggcgccgactcgatatcctccagaatcaaccgatacatgaagctgtcaaatctcttggccgcttcgtctttttcttccatatagaccagcggtgcgatataccgttccagctctttttcatctccgtctccgataaagtcaaatgcaccctccgttttaaacttttccacgtaacgaagattcagccgtaccgaaatcagactggtattcagattgtgaatctgatccgcgcagactgcgattaaggactttctgtaattctgataaaccccatcggcaaaggcggcttcctgcagcgcctttatgagacgaatccgtttcatgaaaatattttctgtcagagtcttcgtctccctgctttcgattccattcggcttttcctcaaaaaattcgaaattgcggcagtaatcgaaaatgagaaaccggcgctttccctgatattctccatccagggaatccatacacatcagttcgggcgccaatcgggtgccgcgtcctatcatctgccagaattttgtctttgatctgactttcttaaaaaatacgagattgacacactccggcacgtcgattcccgtatccagcatatccaccgatacggcgatatgaggctctttctgcggatttttaaaatcatctatgatgctctgcgcataactgtccgtgtagacgactctctgcgcccaaagtcccctatactgcggatacagtttgtcaaagcgttctacgataaactgcgcatgagttttgttctgagcgaaaatgatcgttttgccgatgcggtcccctcccgcgactttgatcccccgttccatcagatcctgcagtacagtatcgactgttttttcattgaaaataaatttattcagcgcatgggaaggaatttcctccggcatcgttccgtcttctgcaaagtcatcttcgtaacgccgcttgtcctcttcggaaagatctctgtagagaataccgtccgcttcaaatttcgtcttgacttcataagtaaaatatggaacgagcacatgatctttttccacagcggtatcgtaatcatagacgtaggtcggtacgccgttttccatctcgaagaaatcgtaagtattacgatccacatccatcttcggcgtcgccgtcagtcccactaagacagcgtcaaaatattcaaatatggctttatacttcttaaaaatactgcggtgactctcatcgatgataatcagatcgaaatgcgccggtgagtaaagaggaaagccgtctttcgtcctgacattatcgatggcgttgagcatcgtagggtaagtagagaaaacgacacgggcatttctgtcgtctttgctctcacacagattgcacagagacatatcgggaagatgatttttaaaatcatctttcgcctgttttaccagagcggtccggtctgcgagaaacaagacatttgtaatgtgccgcccgcggctcagcacgtcggtcagactggatgcagtccgcgtttttccggtgcctgtagccattacgagaagattttttcgaatgccctgctccacatggtcacagacggcgcggatcgcctctttctgataataccggtcggtgatccggtcgctgatcggtatctccgacagagtcctgcgctctgctctgcgatttatcaatttctgcagatctccttttgaaaaaaatccgctgacttttctctgaggtcctgcctggtcgtcccaaaaataatgttcgaatccgttggacgtaaacatcatcggccggcggccgaattttctttccagagcgtccgcatagagaaacgcctgccgcttcccgtcattggggtctttgctggtgcgtttcgcttcgatgaccgcgaggggcagtccgtcttttccgaacagtacataatccgccgcacctttctttcccggtacgccgttcatatcatcgataggatattcctcccgaacgtccgcattttcaccgtcaaattcccagccgatcaatttcaggccgagatcgatataccgtttgcgggtctcatattcactgggatcttctgcattaaattcgcgctgctgctgatgctgtcctttctccgctgtgtacgccgctgacatagccgcgatccggcggcgcaaagcttcgatttctgcatctttctcctcaatcagactttcctgttctctgatctttttgacgtcgaggatcacctgctgtacgggaattttttcctctttaaaagagcgttcttcgtaatctcttccgtaacagtaatcgatccactgaataaattcaaacagccccttcagtgaagcgagggcatcgctcttctttatatttttgccggtatgcaccgccagatttccaagatttacgatgtatgggagcttactccaggtgtcctgatctaccgcaaaacgaaacgaatgttcgtgtatcagcgactgcagattctcacgatacggcattttaatctcatcatccgcagaatacacccatttgacggccagttccaaagcctttctgcatccgacggcacacatggcaggagacgacgcatagactttttcggcctcggcagctgcggcggaaaacagctcgtattcttttttttcatacaaatattcaaagttggtcatagctaaactccgttaatttatagtatctatactttggattgcagttcaaaaatcattctgcccattgattttacgaaaaataatcctacagtgtctctaatacgtcccgataacgaatctctacttctttctgaagtttcattaattccggaatgtactcattgagaatttttcccaccagtctttccgccgcggcgccatcatagatatacgccatatcatttcggtcccgcagcatcgataatcagatcctttcatcaagaaaatcatatactgttatgcgcttttgataatttcccttgttgaactggtatttacttcatttcatccttcgtatttcaaaagttcttttaaaactttccatcccagttcaaattgaagtgaaaatttatcgatgactccgctcctctgcaatgatcatccgaaatactcctgcatcagagaatcaaagagaagctgcgtctccttcagagacttttggatgacggatttcgatttgtcaacttgggtgacgaaggcggaaaattgtttttggagtgtatgatcaggcaccatcacatccaaatctgatagaatttttagattaatattcttttgtgcgacctgcggtgcctgatcctctaatatcctttggaaaaaactaaaccaatagtgcatgtaaattacgtttatagcatcatttggaacgaaaccaacaacactatctggaaaacatgcatcaaaagtcagaatagccgtctgtgcaatattggcagcgatcgttatgcaaagagtaccggagttccacatcttactttgtcgtaatcccagctccgaataagtattctgatactctgtaatatataatcctgcacttgttatctctccagtttgaatcaaaggatacggtccatttaagagttctggcgcattacgagggcgatgcttcgacctacctcgctctatcgctccaagttctcgtagtttcttagttggaaacttattcctattatgtaccggattaccaaacagttcaacaaatcgggctttgatgaggttgtccagtttttggagctgttgttgtcgcaatgatataacaacttccactcttttaagtatttcaattacatcggcctgcttgtcgagcgaatcaaggttaaaaacttcatttttgtaatcacgaaaataaatgtgcggaattgttgcacctgaaaaatacttttccaaatgcatataacgaaccacataacaaagatattccggcaatacattattttttggaagaagatattgcatggttccaataactgatgatttggcagggtataaattagtccttccaatacctgcaccatcttttacgacagccacatatgactgttcctgatgataaaaatcaatatttccaatatgccctgatgcgccgaacacgggatattctcccattttacctattatatcagattgtttcaaatttgaagaaccacgtttacacacatcttccaattttactttcataatttccccctacaaatccgactttcccatctccagcagctttttcagctcctgtacttccgtctcaatttcccggttcagccgttcgatatccgccagaatctccgatgtcggcgggtattctaccggaatatattccacttccttgtacttattgatcgacagatcataattattatccgcgatctcctgtttcggtacaaaaaaactctgttccgtgcgctgccgggtggattcccgctccagattgtgaaacctttcgatgatatcgggaatatcattctcctcgatttccgaacgcttatcgtcgaggctgaaaccgtcggccttcatatcgtaaaaccacacattttccgtaccgccggcgccggttttcgtgaagatcagcacagcggtggatactcccgcataaggtttaaatacgccggaaggcatagagattaccgcacggagctgatgattttccaccagctcctttcgcagtgatttatgagctttgctgctgccgaacaaaactccgtccggaacgatgcaggcacagcggcctcctgtcttcatcatccgcagaaacaatgccaaaaagagaagctccgtcttcttcgtatcggtcaccgccttcagatcatcgttgatggatcccgcatccaccgttcccttaaaaggagggtttgccaggcagacggtatattttcccctgatctgattctgctttgacacactgtccctgtaatccacatctggattgccgatcgaatgaagcatgagattcatagcggagatacgcagcatggtgcggtcggtatcaaaccccgtgaacatttctccgccgaaatgatcccactgctccggcgtcatcgtatcttcatacttattccgtatatattccgatgccgataccagaaaacccgcggttccgcaggctggatcacagatcagatcctccggcgtcggcgcgatgagttccaccatcatttcccggatatgcttcggtgtacgaaactggccgttctgtccggcggttgccagcttacccagcatatattcgtacagatctccctgcatgtccaaatctgaaatatcattttcatacagatcttccaatccggtgatgattttctgcagaacctgcggcgtgggaatcagaaacatcgcatcatccatatatctggaaaaagcagtccggctttccgctgtctttgccggctcatccgcaatctccaccagttctcccgcttcgtcaaaatcgggaagccttccgtatttcatcttctttatcgccggaaacactctcatcgaaatgatctcataaatctcgcgggaatcccgatccttaaatctgctccagcgcatggactgcccttcggccgactgcgggaaaatcctctgtcccgtcccgcctgtcatatgatcaaattcctcctgttccaattctttttcatccaaagaacggataaacatcagatacgtcagctgttcgatgaccgtcagcggatttgtaatccctcccgcccagatatccgtccagatcttatctattttatttttaataattcctgttatcattttaaaactcctgttttttcagcatttttcttttccgtaaagattgcttctccgtctgaggttccgacaaaaccgccgctgaaagactgcgggtaccgaacgccgaaatatatcgcatgacatcggtacacgcccaactgcatgctgcccctattcctgcgccccgatcaaacgaacttctcagaactttacgtctatttcagacgtttctatatttattatgtaataaattataatcattcacaacagatttttctgataaaagaactctgaccgtcgggaaagacagaggaaagatctcacctttctcctgaaagtttttgagtcccgccgctctataaaatcgcagacagcgtttcgcgtttatggtaaaataaagaaaaaacttaccgggaaaaagatattgagaaagagaggatttgtcatggcaaataaaaaagctttagattatatcgtcgaaaaaacaaaggaattaatcggcgctccgacctgctgcgacgaagcgaaggcagcggctcaggcatggctggacgcagtaggtacggaaaaccaggcggcagagacagaacgttattttgctgaactggaagaagatatcatgccgattgaaaatctcatcgccttttccgattccgacgccggcagagaatatttcggcgcggaagcggccgcagacatcgccgcccatgcaaaagagattcagaaaaacggtgccaaatattgtgactgtccggcatgtgcggcaatcgaagccatctttgaaaaaagagaggaaatttaacttttgaggtatttttatcaaaaatctgatccttgtgataccttttcgcattctgtcaggtgaagtacttcaaaatgtattttcggagacagtctgaaaaaggaagcaaaacaggcggtcagacgaatggcggaccggaagattaaaacttccggcccgccattttctctcttctattattttcttcatccccttaccaaatactacagacctgacgatgtctgcatccgttttccatttcctctatcgctcggtctgcggtagcacacagactcgttcagctaatttatccaaatctgtcccagataccccgctgcatccgcgttcagattctgctgcatactgataaaattccacatatcctcgatctcttccgcatccctgcggcagataagttccgcctctgaaaaaatccgcctgccttcggcctcaccgattccggcttcctcaaaagagcgccactgcgccgaactgcgccgcatcacatgagcctctgtgcctgcggcacgctgaacaaggcagccccgctcagaattgagataatacatcacaaaaactttcttatagatatccgtcgctgtacggtaaagatccctgtctgcggcatccgtgagaaaacagtccagccagtccaaagcggcatc

SEQ ID NO: 3158 - DNA, 14278 bp, Unknown
  16S sequences of unknown bacteria
tgccggcatcggcgacaccatcgactggtccaccatcaaacccttgatggcaatgatgtgtttgcctctggcggaaagtggttcttttatcgcgcccatcatttactttgtcttggttgccggtctcctaactgccgaagaatttttctttaccaataccggctataaaatgggaacgcaagccgcacttaccattttggaaggcggtatggttcataagtttatctccagcgcttctgtactgggtatgttcatgatgggtagcttatctgcctctatggtcagtgtatacaccaccgctcaaatcccaaccggtgaaggcaccgtgatggcgatccagggcgacattctcgacgcggttgcgcctggtctgttgacgctggctacggtattgctggtatacaaatacctgcgcagcggccacagcatgatgaaggcgatgttctggattttgggcatcggcctggtactgggtgcagttggggtcattggtgatggtggttttctgattaaaccgttggtagaggcagctgcctaatcgccgcataacattgcatacaaaaagagcccttgaaaaagggctcttttattgtatctgatacggttttcccttccttttcccgccatgcaaaaaagccctgctagggcagggcttttttaatgtttaatatgcgctcttaatgatacgcagccgtacaatttccggaatggcctccagctctttgaccgcttccggcgttacagttccttccagatcgatcatggtatacgcgatcttgtccctggagcggttgttcatgctggtgatattgttattctccttggccagaatcgtggtgatctggcttacgatgttcggtacgttttggtgcacaaacgtaatacgctctccctgatgcggcggcagcgcacaggccggcatgttgacggagtttttgatattgcccgtttgcaggaaatcatacaactgctctgctgccattttagcacagttttcttccgattccggggtggatgcgcctagatgcggcacggcgatgatgccctctacgccgataacctcctcgtccgggaagtccacgacatatttagagataatgccttttttcaaagcatctttcagtgcttcgttgttgaccagaccgccgcgcgcaaagttcagcaggatcgcaccctttttcgtctttgccagtacctcttcattgatggtgtccttggtcttatcgctcagcggcacatgaatggtaatgatatcgctctgcgctactagctgctccagcgaaacagcacggcgcacttcctttttcaacgaccaagccgcttcgatggtgataaagggatcatagccaatgacgtccatccccagcgaaagcgcatcgtttgccaccatagcgccaatggcacccaggccgattacgcccaatgttttgcccttgatttccgggcctacaaagcgttttttctccgcttcgatggtctttgtcacaccttcttggccctttagcgtctgcgcccaagctgtggcttcaaacacattgcgcgaagccataatcgcgctggccaaaaccaattccttcaccgcgttggcattggcgcccggcgtattgaaaacaactacgccgttttctgtgcagcggtcaatggggatgttgttatacccgacacctgcgcgtgcaatgccgagcaggctcttattgaattccatattcaggcagtccgcactgcggacgatgatgccgttcgggtcctctatttccttgccgacctcatagcgttcgcccggcagttcattataaatcacgctcgaaatattgttgagcagctgaattctttttttcatcgtttcatgccttccttatttgttttccatttcaaatttcttcatgaatgccaccaacgccttgaccccttctaccggcattgcgttgtagatggaggcacggatgccgcctacgctgcggtgccctttcaggctcaccaagcctgctgccgtgctttccttgatgaatttggccgtcaattcctcgttgggcagtacaaacggcacgttcatcagagagcgctgcgccttgtttgtgaccgtacccgtgtacaggctgctgttatcaatgcagtcatacaaaatggcagccttctcttcgtttaccttttggatggcctccacgccgccgtttttcagcatccactggaataccagccctgccatatagatggcaaacgtcggcggcgtattgaagcaggaatcattgtccgcatgcgttttgtagttcagcatggtgggcgcgtcctccggacagaagccgatgaggtcatcccgtacgatggcaatggtcaggccggccgggccgacatttttctgagcaccgaaatacaatacgccgaaatcgttgatatcatatacctgggacaagatgttgctggaagcatccgccaccagcggcacgcccgccggcggggtgggcagcgcatcataccgcgtaccgtaaatggtgttgttggtaacaatgtagaggtattcggcctctttatcgaattttgcggggtcgatctccggaatgtgggtaaaattgtcctcttccgaagaagccaccacattcaccttgcctacttttttcgcttccttgatggcctttttggaccatgcgccggtattgatataatccgccttaaaggatttgcgcatcaaattcatcggtatcatggaaaactgcaaagacgcgccgccctgcaaaaacagcaccttatagttgtctggaatatgcatcaaggtacgcaggtccgcctccgcctgttgcagaattttggagaacgcagcgcctctatggctcatctccatcacggacatgcccgtatcctgataacataccaattccgaagcggccttttttaagacctcttccggcatcacagccggacccgctgcaaagttatacactctttctgacatcactcatgtctcccttccctgaaaagcgcattgcgctctatcgaccctgcaatttacattgggggatagataaaaactttaattagagatattatagacaatagaaacttagattacaatgtattgtaacactttccttgtgcgaaagcgttgtattttctacatttctttaagtttttgtaccttttttcaaaggagatttcaaaaccatggaggacttattcagccaattggccaagagcaaagcgccgttggcggaccggatgcgcccccgcaccttggacgagtttatcgggcaaaagcatgtggtaggccctggcaggctgctgcgccgcgccatcgaggcggacagcctgacctccagcattttctttgggccgccgggctgcggaaaaacaacgctggctagcatcatcgcggaggctacacgcagcaaattcgtgaaaatcaatgcggtttccaccggcgtaaaagagatgcgccagatcctagagcaagctgaaacagacctaaagctgtacggaaagaccaccactgtattgctggatgaatgccaccggtggagcaaatcgcaaagcgacatcatgctgcccgcgctggaaagcggcgtggtgcggttcatcggctccactacggaaaatcctatgatttctatgacgccggccatcgtcagccgatgccgtatttttcagtttaccccgctgacgcaagcggatatattggaggcgcttggccgtgcgcttaccgacgagcgagggtttgccggccaggcgatcgagttcgagtccggcgtattggaatactgggccaacgtggcaaacggtgacgcgcgcacagcgctcaatgcgctggaattagcagtgacaacaacgccgccggatgcacagggactggtgtatatttccaaagagacggcgcaggatagtatacagcagcgcatgctgaatatagatgatgaacatttctataatatgctgagcgccttttgcaaatccctgcgcggcagcgatgccgacgctgcgttggcctggtttgcgcgcatgatgtatgccggcgtggacccgcgcatcattgccaggcggctcatcgtgcatgccagcgaggacgttggcatggccaaccctcaggccatggtgcaggcggttgccgcggcccaggcgctggagttcatcggtatgccggaggcgcgcttaaatttggcgcaggccatcatttacatttgcgagtccccaaaatccaacagcgtcttgatgggcattgaaggcgcgctggccggcatacaaggcaatgtggaggagccagtgccgctgcatctgcgcgatacgcattataagggcgcctcacagcttggcaacggcaaaggctacaaatacccacatgactatcccggccattatgtcaagcaagactatatgccgcgttccgttcaaggcgatacctattaccacccctctgaaatgggacaggaacgcaagatcgccgagcggcaccggcttttgcatacatcgaaataagaccataagaaaaggatgaggtgaaaccattgatccccaaagaaacagtgcaaagggttttgcaggctgcgctccatgagggcgcggattttgcagagctctattacgaaaatacccaacgaaactctcttcaataccgggatggcaaggtggaaaccgtgctcagcggcctagacgcaggcgcgggcatccgcgtattttccggtacaaacagcgcatacgcatatacctgcgatatttctccaagagcgctgatagatgctgccgtatcggcggcccaaactctgcgcgcccatgccagggaacactgcaaagattttgtcgtggcgccggcaaggccgatacagcaggccctgatccgcccgcaggcggtggaggccaagcagcgtgtgcaggtggcgcaaaaagcctatcaggccgccaaagccgtctcccctgaaattgtgcagacgcaagtcgctgtgatggatgtgttaagccatgtgctcgtggccaattcctacggtgtatgggcagaggatgaacgggcacgtgccaggctggctgtttccaccgtggcaagtgcaaacggagaaatacaaaccgggtttgaaggcccgggcgctggacgtgggtttgaatttttctcggatcttgatatcgagggcgcagcccagcaggcagcacagaccgccatcaccatgctgcatgccccctatgccccggcgggtaagatggcggtggccgtcggcggcgggttcggcggtgtgatcttccatgaggcctgcgggcattcgttggaggctacggccgtggccaagggcaacagtgaatttgtcggtaagctggggcaaaaaattgcttcggaaaaggttacggcgctggacgacggaaccctgccgggcgcctggggcagcattggatatgatgatgagggccatccctctcagcgcaatgtgctgattgaaaaaggcatactcaaaggctatttgatcgaccatatgggcagccggcggatgggaatgccctctaccggcagcggccggcggcaaaactatcggtatgcgcctaccagccgtatgaccaacacctttattgcagatggggaggatgagaacgtcatcgccggcatgcaaagcggcctgtacgccaaaaagatgggcggcggcagcgtcaatccgctgaccggtgaattcaactttgccgtgcaggaagggtatcttgtgaaaaacggacagatcgataggccggtacgcggcgctaccctcatcggaaagggcagcgaggttttgcagaaaatcgatgccgtggaaaagggcatgtggatgggagaaggcatgtgcggctccatttcgggcagcgtgcctacctgtgtaggcgagccgctgattcgtgtcagcgaaatccttgtaggcggaagggaggcccagtgatgctggatatttgtaaaaaattggtaaacgaggcgctttgccaaggggcggatgcggcagactgcattgccagcgctacggaaggcatcagcgcagatatttatgagggacaggtagattcgttccaaaaaagccagacccaaggggtcggtcttcgtgttctcaaaaaagggcgcgtagggtatgcctatacggaacgcctggaaggagccgaacgcatcgtagcgcaggcgctttccgccgccgaggtcacagaccgggacgaatatgcctgtatttatcaagccgcgcagcgctatgccagcgagcagccgggacagacagacctctcccctgttgtttctcagcaaatcgtggacaaggcgctggcgctgtaccatgcggtcatggccctgccccatgtagaaaatgtgcagggctgctcggccgagatggaaaaaacctatgtatatttcgccaactccgccggcacggaaggcagcgccagcaggcagaatactgccttgtttgtggacgcggtagccaagatcggagattggacggacagcggttggtcctttgccattggaaaaacgctggaggaggtagacgagcaccaagtcgccaagcgggcccaggaaaaagccatccagtactatcaggcgggacggacccaaaacggcgccatgcccatcattttccatgggcaggcaatggtagatctattgggggcctttgctcccatcttctccgccgagcgcgcgcaaaaggggatgagccagctagctggcaagcaagggcagaaaatcgcagcggactgcgtgaccatcgtggatacgcccgaccatccgcagctgggtcccggcctgccgtttgacggtgagggcgtacccaccggcgtgcataccttggtggatcacggcgtgttgaaaacgctgttgtattccctatcctctgccaagcaagacggcgtgcagagcacaggccatggccgacgcgggtacagcggacaggtcaccattgccccgcatgtgtttaccgtacagcctggcacgcaaacgctggcagaactttgcgcccaggccggccacggcgtggtcatctatgaggtatccggcctgcatgccggcgtcaacgatgtttctggagatttctcgcttctgtgcaaggggcggctcattgaaaacggcgcagagggccgggctgtagagcaaatggttgtatccggcaatttctttgccatgctgcaagccattacggcgctgggcaacgatacccagtatagcatccccggcggcagctgctatgccagcccttcggtatatgtaaaagaattggccattgccggcaactgagcaaagcctttacaaaccgcgaaaaatcccctataatacatggcaaatacctaggatggggacgcgtctgcggcacaaggaagcgccaaagcgaggcaggagggtgaaagctgccgcgcagccggctgtcagaacatcaccccggaggtcccggttcgaaatagagggccgggcgtgcgccgcgcgttaagcggagaacaagagtggcattccccgtcgtatcggcaagaggggcatgcaattcgggtggtaccgcgaaaagcacaacgctttccgtcccgttggtggatggaaagcgtttttttatccacaaaaaataaaaatcgccgtttcacaaagaaaggggaacgccaaacacatgtataagaaagtagaaaccgggatggacttttgcgcccgggaattgcaggtactggatttttggaagcaaaacgacattgccaaaaaatccatggcgccgcagccggacaagccgccgtttagcttttttgatggcccgccgactgccaacggaatgccgcatatcggccatttgatcacgcgcagctttaaggatttggtgccgcggtataagcgcatgcgcggatatgatgttttgcgcaaagcaggctgggatacccatggcttgcccgttgaattggaggttgaaaagctgctgggcctggatggcaaagagcagatcgaggaatacggcgtagagccgtttatccaaaaatgcaaggaaagcgtatggaaatacaagggtgaatgggagcagatgagcgaccgcatcgccttttgggctgatatggatcacccttatgttacctatgaaaatgactacatcgagagcgaatggtggagcctaaaacagatctatgaaaaagggcttttgtataaggggcataaggtcgttccctattgcccgcgctgcggcacggcgctgtcttctcacgaggtggcgcagggatataaggacgtaaaagaacgctccgctacggccaaatttaagtgctgtgatgaggatgcctattatttggcctggacgaccacgccctggacgctggccagcaacgtctgcctttgcgtcaacggcaacgttatctactgccgtgccaaaaaggagggcgtcgtctacattctggccaaggatctggtagcttccgtgctgggtgaggaaaatgttgagatcgtagacgaattccccggcagcgctttggtcggccgttcctatgagccgttgtttgattgtaccgtcaacgcgctgaacgggcaaaaagcgcatgttgttattgccgatgattatgtaaccaccacagacggtacgggcattgtacacaacgcgcctgcttttggtgaggacgactaccgcgtctgcaaggaaaacaatctgccgtttgtgcagatggtagaccccgaaggaaagatgtgcggcggcacgccgtgggacggcctatttgtcaaagacgccgatcccaaaatcatcgagacgctggaggcggagggcaagctgtacgacgcgccggaatttgagcacagctatcccttctgctggcgttgcgatacccctcttttgtactatgcgcgcagcacttggttcatcaagatgagcgcggtgcgcgatcagcttgtgaaaaataccaagtccgtcaactggctgccggaaaacatccgcgacggccgtatgggaaactttgtggaaaacgtcatcgactggggattgtcccgcgaacggtactggggtacgccgctgccggtttggacctgtgaatgtgggcatatccatgtcatcggcagccgacaggagctgcgtgatatgggcgcagatattccggatgatttagagcttcacaagccgtttatcgataaagtcaccttcccctgccccaagtgcggcaagcccatgcaccgggtgccggaggttatcgactgctggtacgacagcggcagcatgccgtttgcgcagttccattatccgtttgaaaataaggagctgtttgagcggttcttccccgcacaattcatcagcgaagccatcgaccaaacgcgcggatggttctatacgctgctagccatctctacgttgatttttgataaggccagctatgaaaactgcctggtactgggccatgtgcaggataaggacggccaaaagatgagcaaacacaagggcaatgtcatcagcccttgggaagcgatgaataagcagggctcggacgctgtgcgctggtatttctacaccggcagcgcgccgtggctgccgtcccgtttctacgatgaggcggtcagcgaaagccaacgcaaattcatgggcaccttatggaacacctatgcgttctacatcttatatgcagagatcgatcagttcgacccgcacgacgcctcctggccggcgccggcgtatacctgtatggatcgctgggtgcagtccaagctgcaatcgctggtgcagttcgtcacaacagagctggatcagtatcatatcaccgaagcggctcgcgccatcgccgggtttgtcgatgagctttccaactggtatgtgcgccgcagccgcgaccgcttctggggcggagagcgcacagcggacaaatctgccgcctaccggacgctgtatcaggttttggagacgctgacccgcatctgtgcgccgttcgtgccgtttatgacggaaagcatgtatcaaaatttggtgcgcagcgtggattcttctgcgccggaaagcgtacatttgaccacttggcccgatgtaaatgtagcggccatcgataaagacttggaagcgcagatggaaacggcgcttcagcttgtggtattgggtcgttctgcccgaaacgcggccaaggtaaaaaatcgacagccgctgagccgtatgctggtgcagggcgcagaaccgctgagcgatgaggtgcaatccatcattctggacgaattgaacgtaaaggcgtttgagttggccgatgacgctgcttcgtatgtaggctatctggtaaagccccagatgaaaacgctggggccgaaatacggcaagctcctgcccaaaatcggcaatcatctgaaaaacggcgacggcaacgccatcgtcagcgcggtagcggacggcggcctgtacgaatttgagattgacggccagaagatcgcgctttctgccgacgaccttttgattgaggccacgcagaaggaaggctttgccaccgcccaagattacggtatgaccgttgcgctcgatcttaccatgaccccggcgctgctagaagaaggcctgctgcgcgaaacggtcagcaagatccaaactatgcgcaaggagcggtttgaagtgaccgaccgcatccacatcgtataccaggcggaggaggcgctttctcaggtatgggagcgccatgcagatcgtatcatgaaagaagtgctggccgtttccatggagctgggcgatgccgctagcggccaggcctgggagatcaacgggcaaaaggcacaaattcttttgacaaaggcggatgtataatgtggctggcagatcaatggcgtgatttttccctgctggatgccggccatggcatgaagctggagcagtggggtccctatctgctgtcccgcccggaaccgcaggccatgtgggccccgcaaagccccgccgcgtgggaagcggcccatgccgtctaccaccgttctcatgccggtggcgggcagtgggagtataaagaacccctccccgaccaatgggaaattacctacgccaataaactaagattcatcgtgcgccccaccggttttaagcataccgggcttttcccggagcaggcggtcaactgggattttatgggcgaaaagatccgtgcggctggcggccgtgtgcgcgtgctgaatctatttgcctataccggcggcgctacgctggcctgcgcggcagctggtgcggaggtggtgcatgtagacgctgccaaaggcattgtgcagtgggctaaggaaaacgcggccaaaagtgggctcaaggaagcgcccatccgctatatcgtggatgactgtctaaagtttgtgctgcgcgaacaacggcgcggccgggaatatgatgccattgtgatggaccctccctcctatggccgggggccggatgggcagatgttcaaatatgaaaaggacgtctatcctttgatttgcgaatgcgccaagctgctgagcagccgtcctctgttctttttgctgaacagctataccgcagggttcgccccacaggtagcggccaatatgctgaaatgtgcgctgtccaagggccatgtggaagcgcaaaacatcggcctttccatgggccgcgatctggtgcttccttgtggcgccaccgcccggtggacgccatgaagccacacattttatacgaggacaatcatctgctcgtggtcgtaaagcccttcaatatccccgtgcaggccgacatttccggggatatggatctgctgaccttttacaagcagtatttgaagcaaacctaccacaagcccggcgatgcatatctcgggcttgttcatcgtctggaccgccccacaggcggcgtgatggtgtttgccaaaacaagcaaagcggccgcgcgcttgtcgcgtcaaatgcagcaaaaccagatgcaaaagacgtatcttttgcgctgtgaaaaggcccctctgccgcccagcggcacgatggaggattatttgcgcaaggaccgggatcaaatggtgcgcgtcgtaccggctgatacggcgggggccaagcgtgccgtcttgcattatcagatcctgcataccaatcaggacggcagcgcatgctgccgcgttgtgctggaaaccgggcgctctcaccagatccgcgtacagtttgccagccgcggctttccgcttttgggcgacgcgcgttatggcaaaggcgggcgtcagctatgcctttgggcctcgtcgctgtccctgattcaccctaccaaacaggagcgcatggtgtttaccgcccctgcgcccatacagatagaggcaaaacaatgaaacgatctccttatggcaaccgtgttttgatcacaggcgttacaggcggcattggcctagccattgccgatctgtttatacaaaacggttttcgcgtagcaggatgctcccgtcataagagtgaaacgctccctgaagggctgtcctggttttctatggacgtttgcaacgatgattcggtacgcatgtgcgtcgaacaggccgttcaagcgctgggtggcattgatattttgatccattgtgccggcatgggcatcggcggttctgtagaggatgtatctccagaagagctaatgcatcaactggatgtcaatacgttgggattcattcgtacagcgcgggccgtcttgcccggcatgcgggcacagcatcgtgggcttttgctgcccatttcctccattgctgggtttatctccattccttatcaatcctcttacagcgccagtaagtttgctctggaagcgttggtacaggcgcttcggatggaaaccaagccgtttggcattcaagcctgcctaatagagccgggcgataccaaaaccggttttaccggcgcccgcaagctttgcgcacaagtgcagccctgctaccaagcgccgatgacggctgccatctctaaaatggagcaggatgagcagcagggaaagtcgccggataccgtagccaaaacggcgttaaagctagcctattgttcgcacgtccccatccgccgcgctgtaggcgccagctatcgtacgatccgcatactgtgtaagctgttgccggatcgcctagcagagtttattgtgcgcaggctatacctgcataacggctctccaaaaggggaaactgtaaaagccccatccagatgacagattttaacaacaagttttcgttttgatttacagtcacatgcttgtaaccacttatcaagtatgttagaatacgtttcacgggttgttgaatcttgggtttagtaaggagctccgtatgtctgagcaaaaaaagaacaaaacaaagaaaaaaatctttctaaatttgttgtacattgctttgaccattggcatcatcgtagtcattggttttttggatcctagcgttacggatttcttttccgccattgggtctcttcacatcggctggatcttggccgccgttggcgcttgcatcatcaactttgtttttgagggcttggctgtgcattgcattatgcggtttgtccatccgaatttcaaacttagaaagtccatcaaaaacgggatcattggcatctactacagcgctctgacgccgttttcctctggcgggcagcctgttcaggtcgtctacatgaaaaaggatggcgtgcctgtgggtaccagcaccagtgtattctgcatcaagtttgtcatctttgaatcggtcatctgcctgttttttgtgttttcccttcttttccgggggttggacttttttaccagcaatcccggcgtgctgccgttgacctgcattggctttgccgccaatgcgctgattaccggcatcgtcatttttgcgatggtaaagcaggggccgcttctgtctttggctacccgtctggtatggtttttgcataagatccatatcatcaaacatccggagcgtgctgtgatttccctttccaaaacgctggaggagtttcatcagagcgcgcaggttttcaaacacagcacaaggatgtttttgagcaccgcactcgtcatctttatccagatgttcgcctacttctccattacgtttttcatctataaggcgtttgggttatctggctacaatttgtttgaaatcgtggctttacagtcctttttgtacctcacggtttcatttgttcctctgccgggcgcttctgtggccagcgaaggcgggttttacttgttttttgcccaagtattcccggccgagcttaagtttgtcacgatgattctttggcggttctttacctattatgtcaacatcattttcggcgctgtgtttgtgttggcagattcgctcatcaatgtcttccgtaccggcaaacatgtgccagcggaagcaaaggaatgaataagacgtaaagcaggagttttctcctgctttttttattttgctgctg

SEQ ID NO: 3159 - DNA, 19180 bp, Unknown
  16S sequences of unknown bacteria
gctatcatatcgatcgcatggtcgatatccgcggagacacattcaagttccgggtaatttttgtatatcatatatccgctccagtagtttttctgattttctttctcacgaccgcgcgatccccgaggtcggccgtgatctcaaagccaagcttctcatacatcccgaacggtccgacgaagtcgtactgctcactcatgaattcctttatcgggtacgcctcgatataatcatatccctcagagtcggagcacaccttccggcagagctccgtcgcgacgccttttctgcggtattccggagatatcacaaaacacaataccgacctgaccgccgcgtcatcctcacggctcagcggcgcgagatatctccgcccggaatgacaggtcaggtattccgactttctcccggcggcgcaccaaccgatgaccttcccatcctcatacgcgagatatccgttcagcttcttctctctcacgagcttttccgccgcgctcctgcggctctccgcggttgagaagtcacatccgtcgtcgccggcggtattccagcacacacagtagcatctgccctccggcgtcccgtcgtcatgcggtgttctgtcaaagaactcaagataatcccggacaagctccggagtcagtctgactatctccatagcctctatttttctcccgtctcggcgacacagagagccgcgacatcacctatagactcgccgagcgccgccggaagtatcctgcacgccgacacgctctgctcaagcgccctctccgcgataacacgtcgcatcgcgggctcgatgaactcgcgcgagcgcacatagatgctgccgatgacgatggtgtcgggattcagtatgtcgatcaggatggcgagcgtctttccgagatcctctccgaccttttcgtatatccttattgcctcttcgtctccatgctcggcgcggattccgagttccttcgcggtgccttttccgtactgcgctatcccaccgccgctgcaatagccctcaaccgcaccgcgcttgttgtagccgatatgaagatcgtccccctcctcgcagagggtcacatgacctatctcccccgccattccggaagcgccggagtaaagcctgccatcgagtatcagtccggcgccaagtccggtgccgaaagtcaggaacgccatattccggctcccgatccccgcgccgcatttccattcggcgagcgcgcaggcgtccgcgtcgttgcacagatacgcgggaacgccgaattcctctgtcagcatcccggttatatgaacgtcgtcccatcccgggaggttcggcggggacattatgattccattctccggatcgagcggcccgccgcagctgacgcctatcgccgcgcagtccggcgttatcagttttctcacggcgtcaaatatgttcgctatggtctcgtccttcccggtcgtctcaaagcgtatcttcccgtcgacagtccgcccgccgccgcgaacgaccgcgcatttcgtgccgcctatgtctattcctatgtatttcttcgtgcttatcatttttcctgtcttcattcattcaatcgattcgagcagcttcgtcagcttctgcctgacgctctcctcgttcttcgcgaccaccgacgcgtaatcgtcctttccgtcctttatcgaggatttcagcgcgtccacgagcccggacgtcacgccgaatatgagacccgactcactgactctcgtctcgtttatgatactaagcatctcaatcgaatcctcgtccctcagtcccttctgagagatcgtctgcccgtaataaagcggcaggacatcccgatagctctcataggacagcgcgtcaaggatcacgcctgtacacgacagatcgcttacagtgaccggaaccgtgcagcgcacgatattctcgctggcataggttatataattctcctgattcaagtcgaatttcggagacggaagtatgccgtaatccgtctcaaggctccgcatgaccttcgcgcccttgagctcggtcgtaaggaagcccgctctccccgagtagaacagattgtagtacccgcccgcgtcggtgaacttgtcattcgaattcaccagaaccttaccatccttcgccgaatacacctccgcgaccttggttataacctcgtaaaaccggtcatccggactctcatacaccagatttccagtatcgtcatgctttatgaaatactcaccgccgccaaccaggaacatatagcttcctgtgtcgtgtcccgcgatgccgtatacggcgttgcctttttcgttgtacctgaacgagtcgtcgccgttgagattcgtgatcttcgtcagatacgtgttcatctcgtccattgtccacttgccttcacgcaccgtatcgtacggatactcaagaccatatgagctcagcatatccttgttgaacagcagcacccatgtaagatcgagcgacgtaagctgaagaggcgtggcggcggcgtagagctttccgttcagccacatttcggaattgagcacgttatcccaccagtccttatcaaggttgatctccgggatactgccgagatccacaaggcttccctctgtaatgacgccgggcgcgtaggatatcggaagaaacgccgcgtcatacgcgtcgtcccccgccatgaccgcgctgctcagcagcttcgtgacacccgtggcgttgcctccgtcattgaacgcctccgtgatctcactgatatgtatatcgaacctgtcctcgatcccgcggtttctcttccacaccgcgtcgtcgaccacctcgccggtctgctccgtgatgtccacacgcacataacagctccagaactcgttgaaattgagtatccggaactcataaccgccgtagctcttgtcggggtagacatactcttcagcgacggcggcagtctccgtgctttcctgggcccggctgtcagcgccggatgtttccttctctcctcccgcttttcctccgcatgacataagaaacgacgccagaagaattatcgccgttaccctaccagattgaatcctgctcataaccatgacccttcctttattgttcttcaggatacactgagcaacccggatttttcacagaaaaagggcttcgattcatgggtatttttccgtgaagacaaccttgaatcagtgtttcctttatttctgaggacaccgccgtatccgctgaaatataacttattcagcgtgtccctgtgtatattatacactatttatcaggtcatgatgtctcgttttataactatattattgcgttttttcggatagataagatcggcctgtcattgcagctgcctctccccagaaacgcacggtctgccgcggttatcctggcggaatttcagcggactcaccccgaaacgcgacttgaaggtgcgcatgaagttcgagaaagactcaaaaccgcaggcaaagcagatatccgttaccgacatatcactgtttgccagcattctgcacgccgcgcgcatcctgaggtcgatgagataactcttgaaggtctttccggtcgactcgcggaacagttcggagaaataattccggctcagatgcgttatcccagcgacctcgtcaagcgtcaggtcttccatataatggctgtgaaggtacagtatcgccgtgccgaccggcgacttccccgccttcctcccatccgaccggaagcagcgcagcagctgaatcagaagacagtcgattatatggcacatatacatatactcatttccgtccggcacggcggtatcctgtgtcccggcgatgagcgcgtccagcagagccttcgcggcagtgaagctgcgcccggcaaaattcgcggtcagattcgcgcccatagtctcatgcgtcagtatctgctcatagaccgaaggagttatcatcctctcgtcgaacatgataccgattatatcgagcggttcatcgacgtgtatcgagtgacagtccgctggggtcagcatataaatctccccctttgagagcggatagcccacgccgttgagaatctggctgccccgcccagacaggatcatctcaagctcacagcactcgtgccagtgctgcctgtagtcacgatctatcagcttgtgccttatagctatgctcccggtaccgaaatcatctatcgaatatttctctggctgctttgtcatatcctgcctcctgaacatatcagcggtaaatcagaaacggggacgcctcagaaggggcatccccgtgacctgtctcactcagccgtgaagtgaatgacgcggctctcgccgtctctccagccgccggtcaggttgagcccggcgttcatcagcagcgcgccggaatagcgctttccgtcgtccgaaacatagatcctgtccggatcaagcccgcggagcctcagatagcgcgccacatgagcctgcgtacggatgacaacatatgtcacgagaacctcgcgcttgtcttccgatacagactcccacgccgcggcgcaggttatcttcgccttgtcctcggtcgggttgatcaggcggtaataatcaccgttctggatgagatcgtagtacttatgataatcggcgacctgttgtctcacgagctcgcgctcctcgtctgtcagcttcgtgaggtcgagctcatagccgaacgctcctgccatagctacatcgccgcgggttctgaaggaagtcacgcgtccggtctggtgattcggcaccgcggaaacgtgagcgctcatcgaggagagcggatagaccatcgacgtgccgtactggatctcaaggcgctccatggcgtcggtgtcgtcgctcgtccagatctgcgggctgtagtagagcattccggcgtcaaagcgtccgccgccgcccgagcagccctcgagaagcaggcgcgggaacgcggtaagaagtctctcaagcagctcatacacgccgagcatatatctgtgcgccgtctcgcactgtctctccggcggaagaagctcgcttccgacctcggtcaggttgcggttgaagtcccacttgacatactcgatgttcgcgctcgaaaggatcgccgacatctggtcgaatatgttatccctgacatcctttctcgacatatcgagaacgagctgacggcgtccctcggagcgctcgcggccgttcacgtgcaggcaccagtccggatgagcgcggtaaaggtcgctgtccggcgaaatcatctccggctcgaaccagatgccgaatttcagaccgagagcgttcactctgtcgacaaggctcccaagcccgccgcggagcttcttctcgttgacgtaccagtctccgagcgagcagttgtcagtgtttctcacgccgaaccagccgtcgtccattacgagcatctcgattccgagatcggcggcgtccttcgctatcgcgacgagcttgtcgtcgtcgaaatcaaaatacgtgccttcccagttatttacgagtatcgggcgcttcttcgtcttccactcgccgcggcagagattgtgcctgtagagcttatggaaggtgcggctcatgccgccgacgccgttctccgagaagaccattacgacctcaggcgactggaactcctcgcccgcctcgagagtccatccgaaatcctcgggattcagacccatgaggatacgcgtggacgccatgcagtcgacctcgatctcagcggcgaagttgcccgagtagacgagcgagaaaccgtagacctcaccgctctcctcagtgtacccgtcccgcgcgagggcgacgaaaggattgttgttgtggctcgaggaaccgcgcttcgagtgtatcccctgaagaccgaactcgagatggcgcttgacgagcgtgcgctcctttgcccagcggccctgaaggtgaagcatctcgaaatccatgccggtgaaatcgacgcatgcggaatggatgcggtcgagcttaaatttcttgtccgacgtgttcttcaccctgacgcttctcgtgatcgcgtcaagcttcgcgaaggcggtgtagatgagcgtcacctcggctccggtgagggagtccgtgcagatgatctcgagtgtttccgcctcggagtcgtcattcgtgtaggtcgcggggaggccggcgagattcggttttcccgcgtatatcttatgcgacttatagcggatgtcggtggcgctgtttccgttctcgccgcgtacagacagggcggagacgcggaaatcgccggtgccgttcaccggatactcgaccgccgccgtgtcaagcgacagaccgtgctcctccggagctatgacgttcgcgctgaacgacgcgttgccgagacgcatacggagataatcaaggtcggtgtccggcacgtacgcgccgtagtagaggtggagaagataccctgtcgggctcacctcgaatatgtagctcgacgaaggcgtgtcgagcttgaagattttcttttcgctgtcgaaaattacaggcattactaatagttcctttcatgattcggtatctgtgtttatcagaccgtatacctgttattataccagattttccccgaaacgtcaagacagacagcgtgaatttcctcattttttttgcgccgcgccttccgtgcccccggacgtcctgccgcgcaggagcgggataactatcgcgagacttaccggaagtagaaagagaccggtgagcccgaacagcttcgtcccgacgaacatcgcgatcagagtcacgagcggatgcagtccgacctgacttccgacgatcttcggctcgattatgttccgaactaccgatatgacgacccacacgacaataagtccgacggcaaagccccagtctccgccgagcgcccgtatcacagcccacgggaccattattccgccagtgccgaagaccggcaggatatcgaacagcgcgatgccgagagccgccgcgatcggtctctgtgcgccgacaatcgtcagcccgagcgcgagctccgcgaaggttatcagaagtatcagcgcgtaggagcgcagatatctcccggatgtatggacaaatcccgaccttatcccggaaagcgtccgaaccgcgccctccggcagattctccttcagaaaaccgattatcttctcgtagtcgatagtgaagaaaaagctcgatatcaccgcgaagaccatcccgacaaggacgcccggcaccgacgccgcgaacgcggagagcttcgacagcagcttcaccgaaagctctgacacagccgttccgatagaaccctcaagcgacgacagcagccccgatatcccggcggaaatatactcggcgtccggaccgccgaaaataccgtcaatgcgctctgtcaggtcgcttaccttcccgaaaagaatattcagcgacggttctatcgagtttttataaagcgtcggcagagaatccgaccaccgcccgacaacgacggcgagccgcaccgacagaaaagtgaacagcatcccgatcgtcgcgtagaagatcagtagtagcattatcccgcacggtctgcgcttcatcccgaacctttgcgacaggaaccgcacgaccggctcgacgagcgccgccgccgcaaacccgacgagaaacggcattacgacgaatatcgcgtatttgaagaaaagatatacgatgccgcagacgagaagcaccgacaccgtgttgattatgaacgcgcgccgcttttccataagacgccacctccggatgaatttactgctctaaaattattgccgggcgcagtccttttattccacgggcggaaaatatcaatcagtgttcacacagtcttcaagcttccggcacaaacccgtgctataatatatgttagtatttattcgtaaaatccacagtaaaggaagtaacgcaatgtcaaaatcacagagaacacgcgcggcaaacgccgaaaagaaaatgctccgcgccgaacgcgaggctcacgcggaaaagcagggcaagatcagaaaaatcactgcgattgtcacgtcgtcggtgatcggtgtcttcgtcgccgccgtcataatcgcgaccgccgcgtactcgatacgcatgaattccggcggatacctcagaaaccgcacagcggcaagctccgcggatatcgacgtagacggcgccgtcatgagctattacttcaacgacgtctataatacatttatcgaatactacggcagctatgtctcctattacggtctcgacacgtcgctgagcctcaagtcgcagaagatgtccgacggtcagacgtggttcgactatttcatgtcaggagcgaaatccaacgtcgagggcgtcctcgccctgaacgaggcggcaaatgcggacggagtgacgctgagcggcgacgagataaacgcgatatcgacccgctccgacaaaaccgacaccgggctgtacggcaggggcgtgaagcgaaacgatatcttcaacgcgaaaaaactcgaagcgctcgcctacaagtaccagttcatgaagcaggaggagttcacgccgaccgaggatgagatcgacgccggatacaaggcttctcccgagaaatatcaggctatcagctactactcctacgatttcacatggtcgaacgagactgacggagagaacatcgtcacaaaggaagacgcaaaggcgtccgctgacaagctcgccggagcgaccggcataaaccgtttccgcgttgagctgaagacactgcttaaggaagcgtctccggaggcgtcggatgacgacattgagtcctcgcttgaaaagagactcacctcggacacttactattcctccgcggacgacggcttctcggagtgggcgttcggcggagctgccgtcggtgagacaaaagtcatcgagcatgagggctcatcgaagtacaccgtctatatgctcgcgtccgagcctgtacgcgacgaatcgcgcacggtcaatgtaagacacatactcctcacatccgacgagtggggcagcgccgagaaagcgaaagcgcaggcggaaaagctgcttgaacagtggaagtccggaaacatgaccgaagagagcttcgcgctcctcgctctcgcgtactccgcggacgccggttcctactacaacggcggtctctatgagaacgtcaccgagggcagaatggtcgcgtccttcaacgactggtgcttcgacgagagccgccagccgggcgacacggagattgtcgagacaacctacggataccacgtgatgtactttgtcggcgacggtctcgaccagtggcagtcgctcgtcgcggactcgataatatccgagaaattcacggaactcaactcgcaaatcaaggaaaagtatccggtcgcgttcgacgacacggtgcttgaggatatcccgggctgaccgcaattaaatgaagtacccccgctgaccataaaaatcagcgggggtttatttatgcggttatttttctgacaatccgtcggatccggatcagagctttccgaccataccgcgtatttcgtcaaagcccggctcatcatgaagctccgcgataagatccgaatcaatcttccgttcaagacgcctccgcgcgacctcgcagtcaagccgcgggcttatcgaacttccgctgacgaacggcgacccggacctcagatcgactggatcatcgccggctctgtcaaacatcccgacataatactctacggaatcccgcaggcacttcatcgccttcgccttctcaccgagcgtgagataagccttcgcgagcagcagataacagtcgcccgaatcgaaatcatgatacggacgcggtctctcgccgtcgaatatcactttcatcgccgcgaaataccgctcgaacagaaccaccgcctcacggcttctcccggacgcgatgtacgctctcccgagctgtgccgcgctgtcctcgaactcctgcaagcagtaatcgatgttcgtcgaaagctcctttatcaccgcttcatgattcccgcgggaaccgtcaatatacgcgagagccattccgcgcgtgaaatcgcttcgcaccgggaatttctccgcctcgctcaccgcgcggtcatattgtcctttcgagcaccagaactgtatgagccccatacgcgcgaacattatgtcgtcgatattccgcgaatacgccacaataagccccgcccaacggaccgacctcgctgcgatctcctccgccctctccgcgctgtaaagctccgaatcgggcatacacagactcatcccgagcgcgaacccgttcatcagcagccgctgatcgctcggatacttccggagaccctcgcttatccggtcataagccttgatatatgacgccgcgcctccgcggaccttatccgcctcggcgtcgcggagtatcttcgccacgtcctcgccggcggtcgtcgtatcgagaccgaatatcacatcggtgctcaccccgaacacacccgccagcggaacgatctgcgagatgtccggcattccggtctcgttttcccatttggagactgcctgcgcggtcacgccaagctgctccgcgagctcctcctgtgtaagcccacgctccttgcggagtctgcgtatggtctgtccgaccggcgttgtgctgaatacatatggcagcatttcgtttacctcacttattttttccctatcctcatgacaccgcgtcatgccttatcgggtataaacattctaccatattccgccgcgttcatgaagcgactggtcagcaacccatcgctcaacggaacgttgaattatcagaccttaagactgacagcgccgttctcagcctgccttaaccgcctggggaagcactgaacaattcggttttcgcagaaaaaagccttggatttataggcctttttctgcgaaaacgaccttaaatcactgttttcccagatatctcgagaggaactctctcgtcctctgctccttcgggtttccgaatatctccgccggtgtcgagtcctccagaatataaccgccgtccatgaagattacgcggtcggacacgtcgcgggcgaagctcatctcatgcgtgaccacgatcatcgtgagtccggtcttcgcgagcgacttcatgacgtcgagcacctctccgaccatctccgggtcaagagcgcttgtcggctcatcgaagagtatgacgtccgggttcatcgaaagcgagcgcgctatcgcgaccctctgcttctgaccgccggagagctgtccgggtctcgcgttcagatacgctgacataccgaccttcgcgaggtattccttcgcaatcttctccgcctcagccctcgggcgcttcagtacggtaacctgcgggcagacgcagttcgcgagcgcgttcatgttattgaacaggttgaacgactggaacaccattccgaccttcgtgcggaactcggagaccttcatctccttttccatgatgtcacgtccctcaaagactatcctgccgccggtcggctcctcgaggaggttcacgcatctgagcatagtgctctttccggagccggacggtccgatgacgcttatcacgtcgcccttgttcacggtcatgtttatatcgcggagcaccttgtggtcgccgaagctcttctcaagatgctcaagtctcagtatctcggacatttcagtcgatctcctttccggtctctgctttcacgtgtatctccgcctgcgagtcggagcccgaaccgcagatcgtgtagttgtccgagccgtcgagcttcttctcgaccgcccgcagtatcctcgtcaccgagaaagtcaggatgaaatacagaacgcagatgacggtatacgtctggaacgtctgaagatttatcctctttatgacgcccgccatgtaatagagctcggtcacgccgatgacgttcagcaccgacgtatccttgatattgatgacgaactcattgcttatcgacggcaggatattgcgcagcacctgcggaatgacgaccttcaccatcgactgccagtgggtcatgccgagagagtacgcgccctcgagctgccccttgtcgacggatattattccgccgcggacgatctccgccatgtacgcgccggtattgatcgagactatgaaaagtcccgccggtataagcggaagcgtgtttccgccgttcaggaaggcgtagccccagtaaatgaccatcgcctgaaccatcataggcgtgccgcggaatatctcgatatatactgcgattatcgcgttcacaatcttgtggagcaccctgaccgccgccttcttcgacgccggagctgtgcgtatcacgccggtgagcagtccgatcagaaagcccgccgccgtacctacaagcgctatcagcatcgtgtatccgatacccgacagaagatactgccagtatttcgtgacaataccgatgacctcgcttaaaaattgcatcccaaaaaatcctttcagtcaaaacatggtccgcgtcacacagggttcctgccccgcgggcgcggaccgcgacgattcttattattctaccgttttatcacttcttgtatatgataacgaggttagaattgtagtagcagtcggtaaagtcgacctgctccgctctctcggctgtcggggacataccggcggcgatagcgtcgacagcgccagactgaacggcggcgatcagggaatcccactcgtaggagtaaacctcaagagtcatgccgagctttgccgctatgtaacgcgccacgacgacatcgtagccgttcgcgtagaggttatccttgccggagatcggcacggcgccgttggcgtcggtcgtctgagtccagttgaacggggagtaagcgcactccatcgcgaccttgaaggttccgttcgagccgtcggtctccggaatctcaagagcgagcgcggacgcgtactcgacgtcggtattcgcgctgatctcgacgatctgacgcatgagctcctgtctcgtctcggtcgggatctcgtcaattatcgcggaaacggtcgccaccatatcggagcccttcttgaacgcgacggcgattccggtctcctcatcggtcgcggtgaagccggtgtcattgttcttcagcgggacgaaagcgagcgacgaatccttagagcagacgtcatacgcggtcggctcctcggcaacataaccgtcgatagctccggagttcagcgcgttgagaaggtcggtgaaatccgggtaattctttttctcgatgccctcgacctgatcaagagcctcaaggtggaaagttccgttctgagcgccgagcacggcgccgttcaggtcagcgagggacgttgcggacgagagatccttctttgttcttccgccgcaggagacgcaggcgcacacggacgccgccgcgagcataacggaaacgacagataataactttttcatgatacaaattcctccgtaaagatattattagtaaaacaaaagagccgggacgaagtgccccgaccgcttgatatcgcctaaatagctcaaaccaaatcggatatagcactccgcaaaaactgcgacagccgcacgggtatttcccgtacgtccaaccaatcgcctgacggtcaggcaaaggatttcggcgaccgtgcctttcgcgccccatcatcgacaccgttgtctccgggtaactactattcgcgcgtcgcgcctctatatctaaggaaacactgatttgatgttgctttcacagaaaaaaatccataaatccaagacttttttctatgaaaacccgaatcattcagtgtattcctaactttattccggtataaacctttgttttataaaattatatcacaaccacgcaccgaaatcaagtactttacgaagatttcctgaaatttcccgttttggataaatagtcagcctatatatcactgtgatttatatattaattttgccgcggcttcccaatatatgtgtggcgtcattgacgttcagcttatccataaaaattactgtataccgcgtgtttgttagcaatacgtcattcagaactataattaagttaaaaaatttgtgaaatctcataaaatttcgaaaaagctcttgacatagcgaaaaaataggtgtatactatctacaatccgatcagataatgcgggcgtgggaccgaggctattgccaggataaccgttctagttcctgattagatgacaatgtcagcatatcagcgtggctgccctaaatttttttgaatccggcgcgaggcggtacaatacggcgctccggattcgcctgtttaattatttttttggtaaattgtttgttttcagtaatttgtgacactttgatgcagctccatagcgttcgtcgggacgtagtacctgtcagcagatctggcaggtactttttcaatatacaggcggagcggctgctccgccaacatttttctgtgaggatgtcaatatgtaccacgacctgacaaaaggcggaatcgcgaagagtctgatactcttctctctcccgatgaccgccggaaatctgcttcagcagctgtataatatcgccgacacgctgattgtcggacgcgcgctcggaagggacgccctcgcggcggtcgggtcggcgtatacgctgatgacctttctgacatccgtcttcatcggactcgcgatgggctccggcgcgctgttctcgatttacatagggaaaggcgacagggagaagctgaagggctcggtctggcagtcgttcgtactcatctttgccgtgacagcggcaatcaacaccgctgtgtatatcttcatcgacccgatactgcgctttctgaaggtgccggacgagctgtattccgatatgcgggaataccttgtcataatcttcgccggaatcgcggcgacctttctctataattttctcgcctgcctgatacgcgcggcgggagactctgtgtcgccgctgatatttctcggtgtctcggcggtcataaacatcgggctcgacctgctgttcgtgctcgttttcgattacggtatcgccggcgcggcggcggcaacagtcatttcacagtacatctccggaatcggtatgctgatattcacgctcgcgaagcgccccgagcttatccccgagagaaaacacatccgtcttgaccggaaaactctcggtgaaatctgcgacctgtcgctcctgacgtccgctcagcagtccgcgatgaatttcggaattcttctcgtccagaggctcgtcgacagcttcgggccggtcgtgatggcggcgttcgcggcggcggtcaagatcgactcgttcgcgtatctgccggtgcaggacttcgggaacgcgttctcgaccttcgcggcgcagaactacggagcggaaaaaaccgaaagggtgcgcgagggcttccgtaaggcgaccgcgataagcgcggctttctcggcatttgtctcactcgttgtctgcgtcttcgccggtccgctcatgcggatattcgtgagcgccgcggaaaccgacgtcatcgcggagggtataaaatatcttcgcatcgagggctcactctatgtcggcatcggctgtcttttcctgctctacggcttctggcgcgcggtgaaaaagccgggaatgtcgcttgttctgactgtcgtctctctcgggacgagagtcgtcctcgcctacgccgtcgccggaatcctcggaacggcgggaatctgggcggcgataccgataggctgggcgctcgcggatattgtcggatacgggtattatttcattgtaaggaagaatatcctgccggtgaaacgatgatttttgccaagtttgactttaccacttgatttttgcttaaaagtatgttatactggataaacggcatagagtaccgtgaagccgaccggttgggggcggcttcatttttacgcttcgggaaaatttttcaaacaaaggagatgcttcaattgctgttcggaaaatacatcaacaggtattatctgcgctacgcgccgactctgataatcggtctcgcggcgctgatactcgtcgactatatgcagctcatcgttccagagctctacaaaatggtcataaacggcataaactcgggcgccgtcgagtacggcggggaaacgctagcgttcgacatgaactttctgcttgacaggatatgtctgccgatgatattcgtcattctcacgatggtcgtgggacggtttgtctggcgcgtctgtttcttcggctcggggatcaaggtcgagaccgacctgcgctcgaggatgttcgcgcactgcgaggagctgtcccagagctattatcaggacagcaaggtcggaaatctcatgagctacttcacgaacgaccttgagacggttcaggactgcttcgggtccggagtgcttatgttctgcgacgcgctgttcctcggcctgctcgccatcatcaagatggcgcggatgaacctgcttctcaccctcttctcgctcatacctatggcgctgcttatggcgtccggcgccattgtcgggcgttatatgatgaagaagtgggactacaggcagaaggtaaccgccgacctctctgacttcgcgcaggaatccttctccggcatcgccgtcatcaaggcgttcgtcaaggagacaaaggagctcatggcgttcagacgcctcaaccggaagaacgaggacgcaaatgtcgactatgtcaaggcgtcgaccctcctcaacataaccgtcacggcgttcgtcgagtctgtcatctgcataattctcggctacggcggctggctcgtccatgaaggagtgttcaacgccggtcagctcgtcgagttcatcggctatttcaccgctatagtctggccgatcatggcggtctcacagctcatcgagatgcagtcgcgcggaaaggcgtcgctcggacgcataaccgagcttctcgacacgaagcccgaaatggtggacaaaccggacgtcgaagacgtgccggagcttcgcggcggaattgagttcagagatctcaccttccgctacccgggcggagagttcgacgtgctgaagaacgtctctttcactataaagccaggggagaacgtcggcataatcgggcgcaccggctccggaaaaacgaccctcgtcgacctgcttctgcggacctacaacgttccggacgggacgatattcctcgacggacacgacatcaactccctgccgataaagacggtcaggaaatacgccgcgtatgtcccgcaggacaacttcctcttcagcgacacgatcgagaacaacatctccttcgcgaccgacggcggaaacttccaggcaattgaaacggcggcgaagaacgcggacgtccatgagaacataaccggcttcggactcggctacaaaaccgtgctcggcgagcgcggagtgaccgtctccggcggtcagaagcagcgcatctcaatcgcgagggcgctcatgaaggacgcggcgatactaatcctcgacgactcggtatccgccgtcgacgtcagcaccgagaaggtcatactcgacaatctgaagaagaaccgcgccggaaagacaactatactcatagcccacagaataaccaccgtcgagggcatggacaagataatcttcatagacgacggaaaaatcgccgcggtcggcacgcacgccgagctcgtcgacacctgccgcgactaccgtgagatggtcgagctccagcgcctgaacgacgccggcgacagcactgtcagcgctgacagtgccgcggacaaggaaggaggcgacctctgatgcatgaattctacccgctcatagcggtcggcggaataatcgggatcatctcgatcatattcctcatcgcgtacctctcgataaaggacaagaaggaatctatcgggttcgaccggaacatgaaggactccgagctcgcgaaacgactgctcgtctacgcgaaacctcacgccggcgctttcgcggcagtgctcctgctgatgctcttctctatcgcgtatgatatcgtctctcctctccttgtcggtaagatagaggacatgataaaggacgatttcgagatgtcacatctcgtctcgatggtcatcgtgtacgcgggaatactcgttgtatcgctcatatgctcgtatattcaggcgataatcctccagaagaccggtcagcggataatctcgaaactgcgtgaggatctcttcgcgcacatcgagagcctgtcccacgcgcagctcagcgcgaccccggtcggaaagctcgtaacccgcgtaacgaacgatacctacgccgtctcgatgatgttcacgaacattctcgtcaacctcgtcaagaactgcttcgtcatagtcggagtactcgcggcgatgctctgtctgaactatgagctgacgctcatggtcatgtgctttgtgccgttcatcgtgctcttcaccgtcatattcagaaaattcacccgccgcgcctacagaaaggtcaaggacgcgacgaccgacatcaacaccttcctctctgagaacctgtccggcatgaagataatccagatcttcaaccgtgaggagagaaagaaatccgagttcgacgagaagaatgacgctctcggtcttgccaagagaaagcagatccttgtgttcggcatcttccgtccgctcgtgtatatgctctatatctcctcggtactctgccttctctacctcggcggacgcgggtatataaaggataccgtgttcctcggtcagacgatcggcagcggaaccgtcgtcactttctatatgtatatctcgaagttcttcaacccgatacagagcctggcggagcagttcaactggctccagtccgctttcgcgtcggcggagaagatattcacgatattcgacatcaagccggacgtcgtcgattctccggacgctatcgagcttgagaccgtgcacggtgagattgagttccgcgacgtgtggttcgcctatgtccccggcgaatgggtgctgaagggcgtttcattcaaggtttccccgaaagagacggtcgcgttcgtcggctcgaccggctccggaaagacgaccattttgtcgctcatctgccgcaactatgatatccagaagggtcagatactcatcgacggaatcgatatcaggaagataaagatatcctcgctgaggcggcatttcgggcagatgctccaggacgtgttcctcttctcggacaccatccgcggaaatatactgctccggagtgagggcatatcagacgacgagatcatggaggtctgccgttacgtcaacgccgacggcttcataaaccgtctcgcgggcgggctcgatgagga

SEQ ID NO: 3160 - DNA, 2767 bp, Unknown
  16S sequences of unknown bacteria
cagtagtggttgaagcaggaagctccgacttctataagtcggagtagttcacaagacagcttcgctgtaaggtaaaaaccattgaaatacactcgacgcagctcgtgtattacaatgctgattgccattataattcggcgttgcctttttgccccaagctatgcttggctaggcaggcagtagactcttataacagcgcttgtagagtctttgcataagacctgccgcgatttgtttgtgcaaatcgggctagggctttaaatgtgatataaagggagaattttagaaagggattgttatggaaattaaaatacgaaaagaactcagaggcgagtttgatacaatagagataaacaagggtatggctattgaggagcttgtcttaaagtatgcaggtgaacttccgtataccgtggttgcggctaaaaaagacaatgaccttgtggaccttacggagactatcgacaatccgtgtataatagaatttcttgatatacgcacgcaggccgccaatctgatttatcagtacagtctgtcgcttatttatctcaaggctgtaaaggatattctcggtgatgtgaatgttgatatacaaaattcactcagtaaaggtctttatacgacaatagcgtgtgatactgttttgacagataagcaggttgctgatgtcgaaaacagaatgagagatatcgtagaggcaaatttgccttttgttaaggaggaggtttctgtaagcgaggcggagagaagatttatagagcttgaccagcctgagaaacttgcacttcttcataaaaaagcagacaaggtaagattttattcacttgagggctacagcaatttcttttacggtcttatggtgccgtcaacagggtatatcaaatactttgagctgaagaaatacaggagaggtgtcatagtcaggttccctcacccgactatgcctgatgtcattccggaatacaaagaagaagccaagctgtatgatgctttcggagaggctacagtaagaggcagaataatgggtgtttcgtttgtttcggacctaaacagaaaggttgaaaacggcgaatacaaagagcttattcagctttcggaagcactgcacgagaaaaaaatcgcagaaatagccgatatgattacaaggcgcaaaaaacgaatagtcctgattgcaggaccatcatcatcgggcaagacaacatttgcaaggaggctgtgcatacagctcaaagtaaacggattaaaccctctttacctcggaaccgatgactatttcgtagagagaaccaatacgccgcttgatgaatacggagagcacgattatgaaaatctgggagcggtagacatagagctgtttaacagcaatatgaatgatttacttgcgggcagagaggttgacctgccggagtttgactttatggagggtaaaaagacctttggcaaaagaattacaaaaataaagcagacacagccaattgtaattgagggtattcatgcgctgaacggtgacctgacgccgtatatagacgacggtgagaaattcagaatttatataagtccgtttactcagcttaacattgacagacacaacaggataccgacaacagatgcgagaatgctaagaagacttgtaagggattatcagtacagagggcacagcgcgcagtcaaccataagctcatggcctaaggtcagagcaggagaggacaaaaacatctttccgtataacgatcaggcagatgtgctgtttaattcagttcatatatatgagcttgccgtactcaaaaaatatgcagagcctctgctcaaagacataaaggaagatgagccagaatactctgaagcagtgagaatgcttaaatttttaaggtttttcagaaccattgaagatgactcgattatagttaataactctataatcagagagttcataggaggcagcatttttgtagactaaaacaaaagagttgctgcacagataatcaccagcgattaataacctgtgcaacaactctttttgtgtggaaacagttttattctgcttcttcttccttttcggcaagaaccttttcgtactctgcaaatattgcatccttgattctgttgcgtgtttcagaaagaagagggtgtgcgatatctctgaaatcgccttctcccattttcttgctaggcattgcaataaacaggccgttctgtccttcgataatttttatgtcgtgtactacgaattcatcatcaaaagtgatagaaacaaccgctttcatttttccttcgtcatttaccttgcgaactcttacatctgttatgttcattcctatttccatcctttcacgacaagagattagttgatgatatattataccactataaatactggaattacaagctttttctcgcaaaaatctgacaattcaaattagacagtattcttttaaataaaaaaacttaaaaatacagcattttttcactgcgtttatggtataatggttctgcgattataattcaaggtaaattgattaaaatacggagatacacatctggaggatgtttatatgataaatttgacagattgcaagagaatacactgtatcggaatcggaggaataggaatgtctgccattgctgaaatccttcttgagagaggctttcaggtaagcggttccgatatgaaagaaagcgaaatggtagacaaacttatagcaagcggcgcagaaattttcttaggccatagagcaaaaaacgttgaaggagcagaccttgtggttta

SEQ ID NO: 3161 - DNA, 10854 bp, Unknown
  16S sequences of unknown bacteria
cctcgcgcctccagccgcttcgcggccttcgactgcgcacttcgtgtgctcgccacttcagcccttcgggccttcacctttttgcaagcgtttgctctgctaaaaatgccagaaatgacgtacatgccgtcatttctgattagagcctcgttcttccgagactttgtcaatactctgagtcagcttcgctgacagctccccttgcacaggggagccttttggttagtggtgcaaccgtatgaagtagcactatcccatagcctcccttgtgcaaagggaggtggcgcggcgtaagccgcgacggaaggattgggactttacaaactcacaatcccacgcgatcgtcagctttcgcgcaaaagttttctcccgcgcgcggcaggatttcgccgcgcgcgggagaattgtattttatgggaaagaaagcgaaaagaaaccgcggatagagccactgacaaggcaaaaaattccaatcaattgggaggcgacgcaccatgcaaacgctgctcgcgcgctgggaaaccatcaaacaaagcatcggtggaaaccgggaaaagacgggatttgagttcacctttggccaacccaaggaagagtttttccatgtgactatgcctgccgcttatttgcggcggatcatcagcgaggcgctgttcgccattcagctttccggcgagcggcagggagaattcgacgcgttgatcgatgagagcctgcgcgttatggaaaacgcgctgcaaaccgagggcgccatttcccgccaggcggccatgcaggcagaagacgcgcttttgcccatctccagcgccgccaaggaatatgaaatcctctgcgccgcgcacgcacacatcgacatgaactggatgtggacctggcacgagaccgtgggcgcggcgctggccacgttccgcaccatgctggatctgatgcgggaatacccgcacttcaccttctcgcagtcgcaagccagcgtataccgcattgtggaagaatacgacccggaaatgatgaaggaaatccaggaacgcatccgggaaggccgctgggaagtgactgccaccgcctgggtggaaaccgataagaacatgccttccaccgaatcgcttttgcgccacattcgcgaaacgcgcgattacatgagggacgtgtggggcgtgccggccgaggcgctggaaatcgatttttcgccggatacctttggccacagcgccaacgtgccagagatcgattcctatggcgcggtgaaatacctttaccattgccgcgggctggatgaggaacacgtactgtaccgctggcggggcatttctggcaaggaagtgctggcctatcgcgaaccctattggtacaacagcggcatcacgccggacattggctgcggcctgctcgaccggttgaagaagtgcgctggtctcaaaaccggcctgatcgtgtatggcgtgggcgaccacggcggcgggccgacccggcgcgacgtggagcgcattctggaaatgcaggattggcccgtgtggcccaaggtgtcctttggcacgttccgcgaattcttccaccgcgcggaggccgtgcgcgaaaacctgccgctggtggcaggcgaaatgaattgcttcgcgcccggctgcttcaccacgcagagccgcatcaagctcttcaaccgccgcagcgaagccgcgctgctgcgcgccgagcgcctcagcgccctggcgggccgcgcgttgcccgcggggcatgcgcaggcctggcgcaaggtgctgttcacgcacttccacgacatcatcaccggctcctgcacgccggatagccgcgaatacgccatggcgcagtattctgaggcgctggccgccgcgcagacggagcagaacgccgccatgcgcgccatggccgggtgcatcgattccagcatgttcgcgcgcgaggcggacatttcccagagccagtccgagggcgcgggcgtgggctatggcctgagccggggcgtgcccaatccggagcgcggcgcgggcaaaacgcgcgtgtaccacctgtttaattcctgcgcctttaaacgcaaagaggccgtggaactcacgctgtgggattggacgggcaacctcgcgcgcctggtggccgtggacgaaaagggcgaacgcctgccgctgcaattgctggatcgggaatttcagacctattgggatcacaaatacgtgcgcctgctggtcaccgcttccgtgcccgcgctgggctacgccaccatcgcgctaaaagaaggcgagtgcgaggactacccggtgtattatttgagcgggccgcgcaccagcgagagctatccggacatcgtgctggaaaacgcctgcctgcgcgcggtgatccgctcgagcgacggcgcgctgacctccttggtggacaaaaagaccggcagcgagcgcatcgcgcggggcgaatgcgcgggccttgtgctttatcactgcgaaaaggccaccaacagcgcttgggtgatcggccgccgcatgaagaaagagcgcgtggacgatatgaccgaactgcgcgtcagccgcggcgaagtgcgccagcaggtggaaatgcgctttgccgtgatgggttcttccgtcaaggcctgcctcagcctggatcaggacgcctgtgccctgcgattggactatgaggtggactggaacgagcgcgcttccaagcaggatttcgtgcccgtgctgggctatgaactgccgcttggggaagcggtggaggccttcgagtgcgatgtgcccgcgggcagcgtcgtgcgcggcgtcacccaccacgatattcccgcgctcacgcacgccgccgccctgtgcgcggatggccacgcgctggcgctggtttccgagggcaagtatggttttaccaacgaaaacggcgccctgggcgtgacgctgatcaacacttcggaatcgcccgatcccgcgcccgagcgccatgtgcacgacattcgcctgtggctggccgtaagcgcgggggacgcgaaggcactgggcgatctggccgaggggctgaacaatccgttccccgtcaccagcgccatgccgcacgcgggcaagtgccccgcctgtgcgcagcagatgggctttgaggcaaaatcttgccgcctgagcgctattttgccggaggaagacggcatcgtcgcgcggttcttcgaaaccaatgggcaggcggacagcgtgaaaatcaccttccccttccgggtggcgcgcgcgcaggccatcgatttgatgggcaaccccttgccggacgcgctcgccatcgagggggacgcggtgcgcgtctccgcccagccctatagcatcggcgcggtgcgcgcctatgcgaaataataaaagagggaggggattcgcgtgcaggtgatcgattctcatatgcacatcaaggacgaaaactgcgaggcgattgccaaagtggcggatatggctggcgcggagaaattcaacgtgctgagcctggccatgatggagaacccgctcaacaacctttcctgcctgctggtgaaggcgaagaatcccggcagggcgtacgccttctgctcgctcacctatggcgaggggagcggggaatgcctcgcgcagttgcaaatgtggatgcgcgcggggttcgacggctggaaaatcctcgaaaccaagcccagcgtggcaaagctgctgggcgtgcgcatggacgacgagcgctttgaaccggccttcgcctgggcagaggaaaaccagattcccatcatctggcatgtgggtgaccccgccaccttctgggatcccgaccgcgtgccctcctgggccgtggaaagcggctgggcctacatcagcggcggtttccccgcgctggaagatctgtacgcgcagacggaaacggtgctaaagcgccatccgcgcctgaaggccaccttcgcgcacctgtatttcacctcggacgacgaggcccacgcccgccggatgctggatgcctatcccaacatccgcttcgacatcacgccgggttcggaaatgtactatgccttttgcgaagatcccgcgcgctggcggcgcttcttcctggaatatcaggagcggatcgtgtatggcaccgacctcgaatcggatgcggaggcctatgagcgcctgtacggcatgaagatggaggaaggcgcggcgcaaattgattggcccgcccgctggatccagcgctggctgacgggcacgggcgagatggacctgatgggcaccccggtgcgcggactgggcttgccgcaaagcgcggcggaaaagatcctgggcgggaatttcctgcgctttgtgggcggcgagcccaagccactcgtccgcacggctgcgctggaaggcgcaaagtgggtggagggtatcctgcaaaatccccgctatgcggccaaacgtgcgctggcaggagagatcctcaaaaagctggaaatgagcgtttaggaagaattggaatggtatggcgctgccgcgcgatttgcggcagcgccttttgcaatgcgcgccaaacagcgaggggggctatcaaccatccgcgcttctatccgccgcggtttcccgccattgcgaagggcttacgccgcgcacgcgccggaacgcgcgccggaaggaatccgcgttggtatagccggttttttgcgcgatttcgtcgatggtgccttcgtgcgagcgcagcatggtttcagcgtggccaatgcgcacttcttccagataggcggagaaattcacgcctttttgctttttgaacaggctggaaagatagttgccggtgatcccgaagcgcacggaaaggctgttgagggaaagatcgtattgcgcgtaatgcgcctcgatatacgcgtacacttcgtcgatgagccgctgggagcgctggttgttccggctttgcgcccgctcgcagcactgagaaaagcgcgcattcagataggtgaaaaacgcttccccatccatctgcatcagcccttcaggtgcatccgcccgttcggagaggtttgccccgcaggcggcgagaatgcccaccaagcggcaatacaggtattgccggttaaagccttgtaaatggctttccacaaaattgcgctggtacagggcggagagcatttgcgctaccgagtcctggtcgccggtcatcacgcaattttccagattctttccggtctcctgtggcaagatgctgttcaaatccgcgctggcgccgccatcgtcctccgccatgcgcagccactcggtgtgttgcgaagtgcgcatcagccattccgccgtggcaaaggactgcgcgattttttccagagcgtcgcaaggcgtgccgacataaatggccaaatcaaagccgcaggtactgcgcagcatttcataaaactgggaaaacaacgcccgcacgtctatgcgctcttcctcctgttgggaaaacaggcaggatatcacgttgcttttttcgaaggaaagaaaggtaaaatgggtgcggtgctgatccaggatttccagcagcatggcccgggaagcttccagcggctgcgcgcccaagcattcgatgagcacgccgcaaaagcggctgcccggaatggcgatgccgcaatcgcacagcatttcctccaggttatagggatcctgttcgccggcgtggatcaaccgctggacgcaggcgctgcgcatgtgtacgcgctgctcttccagccgcttttccagctgcagcttgtggctttccatctgcgtgaaggcctcagaaatcatccacatgcccttggcgctggtctttgcctgcgcggcctggctggcgattttccgcaggggcaaaacgttggagagcaccagcgccacaatggccaccacgccaatgagcagcatccacaaaaggatcgttaccatgcccgcgatggatgcgcccgcctggcgcacaatggcgctgtgcggcacgagcagcatcagccgcacgccaaattccggcacggcctgcgccgaatagcggaaagtatcgcccagaacggaaatttctcccgtgctgtccaccgcggctgccccgctctcttgcaacgaccgcaccagctcttcgctccccgggctggccgccagcacgtttccttccagatccatcaccagcgcgtgctgatccgcgccgtcggaaaagtgggtaagctgcttgagaaggctcgccgtggagattcgatacaccactttgcccggcttgccgcccgtgacggcgttgcccaggggcatcacaaattgcatttcccggccggtttgccagtcggcatggatggatttcccctcgcccagcagcacctgcgcgcgccagctttcatactcctgcccggcgctgatggcaaaatggtccgcgtagtattgctcgatgcgcacaaagccctggccgggcgcgacgatgacgtcgcccccgggaatgtacacaaaatagccgctgatgatgccgtttgcatcctcaatggcgggcagcgcgtggatggtatcgtaaatgttcatggtctttccctctatgggccagcttacgccgcccagcagctgttgcagctgcttcagcccatacaggttggcggtgaaggattccatggtgtcaaacgtgttttgcagggtgaaggcagagctttcaaaaatcagctggttgcgggaaacgaggttgcttacgctcattttcatggcctgggcataggaatagccgcatacgccggcgaagatcgcgattaaggctgtgtaacaggcgatcagccgggcaaacacgcggcctattccggcgcgcttttttgcgcgcaaattctttgctttcatttggatgccttccccccatcgacagtatatcatataggggcgcaaattgtaaactggcgattgcgggcatttatggcggaatgcggaaaactgtcggcaatcgtaagaattgtcgtgtatatttcccttgagaaaatggatttgcgccggaacatcctaaaaatatccgcttgtgtttcgcgcgggccagtcgtataatgcccgtaaagtttaacagcactggagcgaagaccatgaacgccaatcgagcgattcccgccgcgccccgcggcgcctggcgcaagcgcgtgtggaaaaaccgtatgatgtatctgatgctactcattcccctcgccatgctgattctgttcaaatatgtgcccatgtatggcgtgcagatcgcgttccgcaattttctgcccggccgcagcatatgggaaagcgaatgggtggggctaaagtacatcgtcaatttcttcaacagctacaatttctggacgatcctaaaaaatacgctcgtgctgggcttatatggtattgcggtatttccctgttcacttattttggcgatttgcgtgaattacctgcgcaacaaaaagttccagaaagtggtgcaaaccatttcctatctgccgcatttcatcacgatggtggtcatgtgcagcatcatcttgcagatgttcgacgcgcggacgggcttgttcaacgccgtgatggacctgttcggcgtgcagccgcgcaattacatgggcatccccggcgcgtttaagcacatctatatttggacgaatatttggcaggatgtcggttacgcctccatcatctacatcgcctccctttccggcgtatcgccggagttgcacgaggccgccaccatcgatggcgcgacgctgctcaagcgcgtttggcacgtggatctgcccgccctgctgcccaccatctgcgtgctgctcatcatgcgctgcggatccatgctcaacgtgggctatgaaaaggtatacctgctgcaaaaccccatgaacctcagcgcctcggaaatcatcaatacctatgtgtataagcagggcctcaccagcgggctgccgcagtattcctccgccacggccatcggcctgtttgtttccctggtcaacatggtgatcctcgtgatcgtcaaccggctttccggcgcgatttccggcaattcgctttggtaaggaggtagcggcatgcttgaaagaagccatcggaaaaacgtcatccgtccctgtttgcaggatcgggttctgctgcgggtgaacgaaatcctcatgtttgtgttcgcggtgatcattgcctatccgctgctgttcgtggtgttttcctcgtttgaagggcaagtgagcacgctcaccttgaacatcttccccaagaaatggtcgatcgaaggttataaggccgtgttcgaataccgctggatttgggtgggctaccgcaattcgcttttgtataccctgctcggcacgctgattggcctagccttttgcgtgctggccgcctatccgctttctcagcccaatctggatggacgcgggttctttatgggcctgttcgtgttcaccatgtattttggcggcggcctgattcccacctacctcaccatgcgggattaccgcctgctggacagcgtgtgggtgctgctgctgccgggcgcggtgaacgtatataacatgatcatcatgcgcacgtatttttccacgcagattccccgcgagctgaaggaggcctcgcagctggacggctgcggcgagctgcgttatctatggcagattgtgctgcccctgtccgtgcccatcctgatggtcatcggcctgtattacgcggtgggcatctggaacagctatttcgacgccatgatttatatgaccacccgctccaaaatgcccctttcggtgttcttgcgcgatatcctgatcctgaacgacagttcggatatgaccgccgccatggatccggacgcgctcgtttccctgcaggagcgccagaacgtgatgaaatacgcgctgatcatggtttcctccgtgcccatgttcttgctgtatccctttgtgcagcgctattttatcaagggcgtgatgatcggctctgtgaagggctagcttgctcgactggctttcccgactggcacatcgaccacagaaaaggagaagaatcgcaatgaaaaaggttctgtttctcaccgtcgcgctgatgctctcgctggccatgggcgcctccgcgctcaccgtgtccgggcccaatgaattccccatcgtagacgaaccctatgagctggatgtctggatgagtttggacgcaaccatagaagatatggaaaccaacgagacaactaagtattatgaggaaaaaaccggcgtacacatcaattggactcaggtttctggcgaccttgccaccaaattgaatttgtccatttccagcggcgaatatccggatatctacacctgctcgttttccaccgatcaggtcacccaatacagccaggcgggtattttcctgccgctgaacgatttgatcaaggagcacagctactatatcaagcaggtgctggaagagcgtccggatatcaaagaggctattaccgcgccggatgggcagatttacacgctctttaaaacagatccggctacttatacactggtgcgcaacaaattgtatgtgaaccacgattggctggaaaaatactgccaggaaaccggcaaggaagcgcccgtgaccacgcaggaattcgaggatatgctcatctactggcgcgataacgacatgaacggcaatggcgacccctcggatgaaatccccatggcaggcactctggcaacagatggcggcgatttcacggtttatctcctcaatgcgttccaggccacgccacaatacgattctatggttgcgaacgaagagggagaagtggaactcatcgctattacggatgaataccgcgagggcctcaagtggatccatcatctctatgaagagggtctcatcgctgaggaaacctttattcaggataatagccagctgcagagtttggtaaacaacaatgatccaactgcgcgcatcgtgggcgcgttcggcggattttgggcgggtgtaacggttagtccgtcttccatggaaaacgcctatgacgtttatgatgtgctggcgccgctggaaggccccaccggcctgcggcaggcgaccacttccggtcatttgccgctggaacttaaaggcgcgattaccgtcgcttgcgagcgcccggacatcgccatcaagtggctggattggtggttcagcaatgaaggtatggtcttgatcgattacggctttgaaggcgtgaactgggaatggagcgatacgcccgccatcaacggcacggtgccttcccgcatgttcctcaaggaccggaacatccttcagaataccgtgtggtatgtggataccgtgccctattaccgcaccgaggaatcgctctttggccgcacgcccacggaccacgtgccctatctctatgagggcgccgacgcgtacgacgatttctatacgctcacgaatttcccgcagttcgcctggtgcaatgacaccaatttgctcgcggaatacaacgagatgaaaaccctgttcaacgattatatcctgcaggcgcgggtgcagttcattaccggcgcgatggatgttgaggacgacgcggcctggcagggctatctcgatcagttgaacgcgatgggcctggaacgctatctagaggttgtggaagaagtcaatttcggctccgcggaataaagcggattggcttttgcggcccggcccatgcggccgggccgcttatgtggacgggggagtaaactatccacaattcgcaatggtcaccctgctgcgcctggcggcttgcagtgttcccgcctctcagttcagcatggtcactccgcgtcttcgcaccgccctgcgctgacgcttgcgcggtgttccgtggctgcgcactgcgctttgctccgtgtgctcgccactccagcccttcgggcctccgatgttcgcaagctcactcgcggcgctccctgcttcattggggtcttcgtaccggcctgcgcttcgctggcccggtattccggggctgcggagcgct

SEQ ID NO: 3162 - DNA, 9771 bp, Unknown
  16S sequences of unknown bacteria
tgcgccgcagcagatgatgtcgttgacgcacatggcgacgcagtctattcccaccgtgtcatgcttgtccatgagaaaggccagcttgagctttgtgccgacaccgtcggttccgctgaccagcaccggctttgttataccggtcatgtcaagctcgaaaagtccgccgaagcctcccacgtcggaacaaactccgggggttttggtcgcggccacatgagccttcataagctcaaccgctttgtatcccgccgtaatgtcgacgccggcggctgcgtatgcgtcggatcttgagttttccattttcagcccttctttccttttgcttcggatattttgcgttcaaatctgtttttctcggtgttctgcgggatttcggtgggatattcgccgtcgaagcaggcggtgcagtatccctttccggcacatccgtaggcaattttcttaacgttgtcgacgctcagataaccgagactgtcggcgccgatgatttttgccgtttcctccaccgaatggtgacaggcgataagattttctctcgagtcgatgtcggttccgtagtagcaggggttcttgaagggcggcgccgagactctcatgtgtatttcctttgcgccggcctctctgagaagcttgactattcgggcgcttgtggttcctctgacaatggagtcgtctataagcacgacacgctttcccgccaccacgtcggtaatggggttaagcttgattttgaccttgttttccctgcttttctgaccgggggaaatgaaggttctcgctatgtatttatttttgataaagccgatttcataaggaatacccgactgcttggaatatcccacggcggcgtcaaggcccgaatcgggcacaccgataacaacgtcggcctgaacaggatgctcaagggcaagatacgctcccgctcttgcacgggcggtgtgaaccgaacagccgtcgataaccgagtcggggcgggcaaaatatacatattcgaaaacacaaagtctgtgttcctttttgtcacaatgatcccttatgcttctgacgccgtttttgtcgaaaacgagaatttctcccggttcgatgtcccttacaaaagaggcccctatggcgtcaagggcgcagctttccgacgccacgacgtattttccgtcctcggtcataccgtagcaaagcgggcggaagccgttttcgtcgcgcagagcgataagctttgagggggacatgatgacgagagaataggctccctttatcttgttcatggcctcatttacggcgtcctcaatagtgggacagcgaagtctttcctttgttatgatataggaaatgacctcggtgtcggaggttgtgtgaaaaatggagccttcaagctcgagggccgagcgcagctcaaaggaatttgtcagattgccgttgtgggcaagcgccattcttcccttgacatgattgaccacaatgggctgggcgttgtttcggccgtttccgccggtggtgccgtatctgacgtggccgacggcaatgtttccctgaccgagacggtcgagaatttcgggtgtgaaaacgtcgttcacaagaccagtgtccttatattcgttgaaaagtccgtcgtcgttgaccactattccgcaggactcctgccctctgtgctgaagagcgaaaagtccgtaatatgtgtcggcggcaagattgtcggacgtttttgaataaattccgaaaacgccgcattcttctcttaaactgctcatgattattctcccaaaatgcgtttcatcatttccttgtaggcatcctcaacattgcccatatctctgcggaaacggtccttatccagcttttcgtgggtctcgctgtcccagaaacggcaggtgtcgggagaaatttcgtcggcaagaacaatttcgccgtcggcggttttgccgaattcaagcttgaaatcaacaagatcgaccttgagatttttgaagaaagccttcatgacatcgttgaccttaaaggccatggattttatggtttcgatttcctccttggtggcaagaccgagggcaagagcatgataatcgttgatgagcggatcgccgagatcgtcgtttttataggaaaattcaatggtaggctcggcaaatacaataccctcctcaacgccgtagcgcttggcaaaggagccggccgaaatgtttcttataatgacctcgagaggaacaatggtcacctttttgacaagggtctcgcggtcggacagctctttgacaaggtgggtctttaccccttccttttcaagcagctccatcatgtaattggtgacgcggttgttaatggcgccctttcccgaaatggttccctttttaagaccgttaaaagcggtggcgtcgtccttataggacacaagcacaacattcgggtcgtcggtggcaaaaaccttttttgcctttccttcataaagcagctctttcttttccattttgtgttcctcccaaaaattatttattgaattcgagttcgatttttttattcttttcaagcacctttgcggcgtcggaagcccgtttttgctcgagcttttcacaaagctcatcatcgccgacggcaagcatttccacacaaagcaaagcggcattgaccccaccgtttatcgcaaccgtcgccaccggaattccggagggcatctgaacggtggaatacagtgcgtcaacgccgtctaaaacgcttgatttacagggaattcccacaacgggaagggtggtattggccgcaacggctcccgcaaggtgagccgccattcccgcagcggcgattatggctccgaagccttcttttcttgcgtttttcgcaaaatctgaagcctccttgggggttcggtgagccgaaaagacatgaacctcaaagggcacgccgaattcgtcaagggtgtccatggcctttttaacgacgggcagatcgctgtcgcttcccattacaataccgatttttttcattgtttttcctccgtttttaaagaagtgaaaagggcacacttgaccctttaaaatcaagtgcgcccagacggtcggctgaaggggaaaatccccgtattctctctgctcccttgcggtcatccgcttatccgtcagtcgcaaagagtctctttctgtgttttgattataccaaatttccgcccgtcggtcaagggaaagggacgggtcaaaaaaatttcgtattctttcacaaatagcctgcaaaatccccctccctttttaacaaaaagtcgggtggttttaggcttttcggaaatatatcaaagctttgattcgcaataggcgcagcggtatattttcttgtccccgtcggtgaggttgaatatctggtcaagctcctgttcggtggagcttatgcaccttggatttttacacttgagcacgtttttaagcaccttcggggtgtccaccgagaattttttcacccgctcgccgtttttgattacgttaacggtggcgtcggggtcgacatagccgataacgtcgaaatttatgtcaatgtcggcgtcgattttgattatgtcctttttacccagctttgagctttgaacgtttttgattatggcgaccgacacgtcaaggttcgcaaggccgagcagctcataaagccgcattccttttcctgccgaaatgtggtcgataactattccgtttttaatgctgtctatattcatacttccgcccccaaaagtttcattataagcgccattctgacaaagcggccgttgtgagcctgtttgaaatagcaggcgcgggggtcgccgtcgacggcggtggaaatttcgttcaccctcggcagcggatgaagaatacacatgtcgtctcttgcgtttttcagcttgtcctcggtgagaatatagctgtctctgaggcgcagatagtcctcctcgttgaagaaacgctccttttgaacacgggtcatgtaaagaatgtcgagctcgcctataacctcgtcgagagaggtgcactgaacatattcgatgcccttgtcctttatgtattcctgtttgacaaagctcggcagcttcagctcgtcgggagagatgagcacaaacttgatgtttttgtatctcgacatggcgccgataagagaatggacggtgcggccgaacttaaggtcgccgcaaaaaccgacagtcaggttgtcgaaacttcctttttcctcatgaattgtcataaggtcggtgagggtctgggtggggtgatagtggccgccgtcgcccgcgtttataacaggcacaagagaatgctttgcggcgacaatgggagcgccctctttggggtggcgcatggcgattatgtcggcatagccgctgaccaccgagacggtatcggcaacgctttcgcccttggaggccgagcttgaagaggaatcggcaaaaccgagtgtgtttcctccgagagagagcatggccgattcaaagctcagccttgttctggtggacggctcgaaaaacagggtggcgaggattttgtttttacagacctcgctgtatttggatctgtctttttttatgtcctttgcccgctcgatgaggctgtctatttcctcggtggaaaggtcgagaatatttatcagatctctcatttttctgcccagctttcatcggaaggattgtcgcggaattttataagacgggcaacatcctcgggcgcgatatatccctcgtccgccgcaacctgagcaattgcgtcaaaattcgacagactgtaattcgtcacattttcggcggcaaggcgctcaagcccctttttcatgccgtaggtgaatatgctgacaacgccgagcacatcggcaccggcctctctgagaaccttaacgacctctataacgcttcctccggtggaaataaggtcctccacaacaacaaccttctgccccttttcaaggcggccttcgatttgatttttacgaccgtggtctttgtttcccgagcgaacatatcccatgggcaaccccatgagatgcgcggttatggcggcatgggcaatgcctgcggtggaggttcccatgagaacctcggcctcggggaaatgctgctccacaaggtctttaagcccctgctccacatcatttctcacgtcgggagcggtgagggtcaggcgattgtcgcagtataccgggcttttaattccgcttgcccatgtaaagggctcgtccgggcgaaaaaacaccgcctttatggaaagcagatcctttgcaataagcttttctgtttggttcatttatgtatcctcctaatcgacaaattcgtttacgcatctttcgtaggccgcaaccggattctcggcggcggttatgggacgtccgaccacaatatagtcggagccgatttttcttgcctcctcgggagtcatgacccgcttttggtcacccctgtcaccgtcggaaaagcgcacgccgggagtgacggtcaaaaagccgtccccgcaggtttcgtgaacctttttggcctcgagaggcgaacaaaccaccccgtcaagacccgcgttcgcggcggtttttgcataatgcatgaccaccctgtcgataggctcctttatgagcagatcacgttccatggtctgctgatcggtggaggtgagctgggtgacggcgataagtatgggacggctgccgtcgtcccgcgtcagcccctcgagagccgcctccatcatgggagcggcgcccgcggcgtgaagattgcacatatcaacatcaagacgggaaagcacccgcatggcctttttgaccgtggtcggtatgtcgtgcagctttaaatcgagaaatattttgtggcctttcgcctttatctgcctgacaatttcgggcccttcggcataaaaaagctccattccgattttcacaaaaggctttttgccctcaaatttgtcaagaaacgcaaaggtttcttctgccgacggaaaatcgcaggcaataattacgtccttacccaatgttaacccctcccgttatatcgctgagtttatttatattatatttttccattaccctcggcaggtcgtttatgatgtccctgcaggcgtaaggattgacaagattttgcgctccgacgcccaccgcagtcgcaccggcaagcatcatttcgataacgtcctcggcgtttgacactccgccgataccgatgacgggaattttcactgcctttgccgtctgccacaccatgcgaagggcaagagggaaaacggcgggtcccgacattcctccggtgacgttttttattatgggctttctggttttaatgtctattctcatgcccatgggggtgtttatcaggctgacaccgtcggcaccgcccgcctcacaggcctttgcaatttcggcaatgtcggtaacattgggcgaaagcttcataattatcggctttttgaccgcttttttcaccgccgcagtcacctgctcggccgaagaggcgcaggtgccgaaagacattccgccgccgtggatgttggggcagcttatatttatctcaagaaaatccacctgctcgcattcgtcaagacggcttgccacataaacatattcgtcgagggaaaagccgctgatgttggccataacgcccttgtgaaataccttttttagctttggaagctcctcggaaatgaccttgtcgacgcccgggttctgaagtcccacggcattaagcacgcaggagggacactcggccgtgcgcggggtgggatttccgaaacggggttctctcgtagttcccttaaaggagaacgtcccgagacagtttatatcgtaaagctcggcaaactcatatccgtagccgaaagagccgcttgccggaattatgggattgtcgagggtttttccgcaaagatttacttttaaatctaccatattatctcctctctgaaaagcacggggccttcacggcaaattcttttgttaccggtgagggtcttgcaggtacagcccatgcaggcgccgaatccgcagcccatgcgctgttcaaagctgaactgaccggaggttttgaccgttttttcaagggctctgaacatgggctcgggaccgcaggtgaagaaatagtcgtagtcgacgtcgcaaagagcgtcggtcacaaagccctttacgccgtaggttccgtcggccgtgcagacaagcaccctgtcggcaatctctttaaattccttttcaaagaaaatttcctcttttgaattgaatccgagtatgacgctgacctttttgccctgttttttaagctcctttgcaagcttataaaggggcggaacgcccactccgccgccgatgagcaccggtttgtcggttttgaccgtcaggtcgtatccgtttccgagccccgtcagcaaatcgagcttttggccggcctcaagtccgctcatgcggtcggtgcctttgccaaccaccttgtaaatgataagcagctcgttttcattaaagtcgcaaaccgaaatgggacggcggagaaagaagccgtcaattttgatgttgacaaactgccccgctccggttatgcccgacgtgtcccccgcaaggcgcattttaaaaacgtctttggcgatttttgtgttttcggttatttcaaaaattccctgtttcataatgtccccttttcataaaccgttttgccgtcgcaaaccgtcagcaaattttgaccgaacacccttgccccctcaaaaggcgtcgcctttcccatagaaaggaattcactcgggtctaccgtgtattcggcattcgcgtcaaaaaccgcataatcctcaagaaagggaatgtcaaatctctttctcggatttatgcacaaaagctcgacggccctgtcaagcgtaataatattatgcttcacgaagtgtgtaaatataagcggaaaagcaatttcaatccccgttatgcccataagacttttttcaagccccttggatttttcctccgacgtgtggggagcgtggtcggtggcaatcatgtcaattgtaccgtcgattattccctcgataagggcggctctgtcctctttgcttcgcagcggcgggttcattttgaattttccgtcctctttaaggtcgtcctcgcaaaggatcagatagtggggcgccgtctcgcaggtcacgtcgactcccctttttttggcctttcttataatatcgacgctttccttggtcgaaatgtggcagacgtgatatttacacccgattttttcgcaaagctcaatgtcccgcgcgatcatggcatattcgctctgtgagcttatgcccttgtgcccgtgagcctttgcataatttccgtcgtgaatatatccgccgaaaagcagactttcatcctcgcagtgagccgaaataaccttgccgagcgctttggcctttttcatggcggcttccatcatttccgcccgctgaacaccctttccgtcgtcggaaaacccgcaaacataaggtgcgatttgctccatgtccgaaaggcttgctcccttttcgccatttgtcacggtgccgaagggatagaccttcacggcggcatctctttttataatgtccagctgaacatcgagattttccctgcaatcgggagcgggatttaaattcggcatggtgcacacggcggtatatccgcctcttgcggcggcggccgaaccgcttttaatcgtttctttataagaaaatcccggctctctgaaatgaacatgaacatcacagagcccgggaattatcaaacagtcggaaaatcggccgcaaagccccttttcgtcgaatttttgcgaaaagagcgccttaaactccttataactgtcaaagctgaaatttttcataaaatcaatcctcgtaatctttccggcatctcgtaccgacttaaaaaccactacggatattatagcaaatgcccccgctcttgtcaacggctttggccgtcaatattatttttgtcgcccgactcggatttattgcgacgtttgtgagcctttctgtcgaaaaactcctgtaagaattcgaaaaagtccctgacagcacggttgtcgagcttgttttccctgcatttaaagatgatttctctttcgcaaagaggctgttcgatttcaagcagcacggcgcttcccttttgaagatttccccatgaaaattccggccaaaagcaaatacccatgttggagcaaaccatgttttttacggcggcgggattgtcgctttcgaaaataatgcgcggctcaaacccggcctggcggcaaaatttatcgcatatccagcgcagctgtttggagcccatgagacttataaagccgtccttttccacctcggtcagatttattttttccctttttgcaagacggtgctcggcgggaacggcaaggaatattttttctataagctcaaagcggttttcggaattgaaaatttcctcgcttttgaccctctcggtggtgaccgaaatgtcgtaaattttgctttggtcgttctgcatgagctgaaaatttattttggggtgctttcggcgatattcgattatggcgtcggttataagggtggaggcggcgagcaccttaagatgaatggtggcgttctccctgtcggccatgcttttaagctcctggggcagatcgtctatttcggaaattattcccgacattttttcctgaagatattttccgtattcggtgagcacaatgttccgtccctttgaggcaaaaagcggcactccgagctcctgctcaagattgtgaatcgccttggaaagagccggctgggcaatgtgaagcctttcggcacttcgggtgacatgctgggtcgacgcaacctcgag

SEQ ID NO: 3163 - DNA, 23853 bp, Unknown
  16S sequences of unknown bacteria
gaagtatacagcaaaaaagcgtgttgccgtccatgggcatgcagcgcttaaaattgcgctggcggccagcgtactgattatcgcggcgacgttttttggatataatgcagcccgcaacagccaaaacgaacagtgggaggcacaacaagcccagcaacagcagcagatacagacgccgggagaacagcccgttgctgccgagccggagcggcttggggtggaaggcaaggtatatctgcaagttaattacaccaaatgtggacacatggtggagacggatgtaacggacaaaaaatacgtagggatgacgcgggaggaattggaaaaccaatttgcaaacgccgagttgacggagttttctaaagacaaagcggtatttttggtggaaacgcccagcgtatgtacgctgcactacattgtaaaatatgaaaacggtatgctgaatatctatcagcctcaggaaaatcaggcggaaccgacgctgtacaaaagcattgagatggacgccgttaacgacgctgctctggaggagggggttatctttgattccttggagcaggtagaaagctatttagagaatatagaaagctgaatcaaagaacaaaaagcagcctcggctgctttttttgattccgttgctttttgtaggaaaatggaaggtgatgttttataaagaaagaaaacaaataaaaaaccagggggaaagaaatgggtaaaattgtaggatacgtgtgggtatcatccaaggaccaaaacgctgacagacaaatggacgagatggaaaagagaggcgtactaagaaaacatatctatttggatcagaaaagcggctgcaattttgaacggccatcctatcgaaaaatgatacgggaaattcgaaaaggagatctcattcttatcaaaagcatcgataggctgggcagaaattacagggaagtgatagaacaatggcagctactgacaagagataaaggggtggacgtcagagtgctggatatgccacttttggataccaccattgccaaggacctattggggacatttatcagcgatttggtattgcagctgctttcgtttgtagcggaaaacgagcgtgccatgatccgagccagacaggcagaagggatagaagctgccaggcgaagggacgtaaaattcggacgaccacgaagagaaaagccgccttggtttgatgcagtattccgccaatggcagcgaggagagattacacagaaaaaggcagcggaacgctttgacctgcccgtatccacctttgcgatgatggccaaacgagaaatggaacaaaatgcagactaaacctatcgatatagaactgttattgcgcaaacaggcaaaaaaggatacaatttaccataaaggaaaggggctggacaacgatgatcactgtactggagcaggcaaggcaggcgcgggaagcggccgctgggatgggcttgctggatactgcaaagaaaaatgagatgctcaaagcaatggcaaaggccttgatagaggggcaggaggagatcctgcaagccaatgccgaggatctggcgcatgcgaaagaaaatggggtaagacaggtgatgatggatcgcctggcattgacgagccagcgtattgcggatatggctgtgggcgtggaacaggtggcggcgctgccggaccctgtagggctgacgctggagatgatagagcgccccaacggactgaagatagaaaagagatccgtaccgatgggcgttgtagggatcatttttgaggccaggcccaatgtgacggcggatgccattgcgctctgcgtaaaaagcgggaatgcttgtgtgctgcgcggcggaaaagaagcttttttgagcaactgtaagatcgcagagattatggccggcgcggcgcagagatgcggtatgccggtaggcgctgtacagctgattcaggatacgaccaggcagtccgcaatggagatgatgcgctgcaatgggtatatcgatgtacttatcccaaggggcggggctgggctgattcgctctgtggtggaaaatgccagcgtaccagtgattgagacaggggtaggaaactgtcatgtatatgtagacaaagcggcagacttggagatggcgtcaaaaatcgtgatcaacggaaaatgccagcgtccatcggtttgcaatgccattgaaacgctattggttcataaggacatcgcagatgtatttttgccggatatggcaaagatgctgatagaaaagggcgtggcgttgcgtgggtgtgatcgctgccttgcgctggtgccggagatgaaggcggcaacggaagaggattatgctacggaattcaacgacctgattttagcggtgaaggtagttgacacggtagacgatgccattgctcatattgcaaaatatggtacgggacacagcgagtgcattgtgacacaggatcaggctgcggtagaaaaattccaaaaagaagtggatgcggccgccgtgtatgccaatgcttcaacacgctttaccgacggatttgagttcggatttggagcagagatcggcatcagcacgcaaaagcttcatgctagggggcccatgggcctgccggcgcttacgagttataaatacgttgtgactggccatggacaagttcgcggataaacggaggaagcggcttgatcattttaggattggatccgggccttgccattttgggatatggggtcattgaggtattgccgggtaaaaagatgcgcgccgtggattatggctgcgtttttaccgaggcgcacacgccattgccagacaggttgatgaaaatttccgacgggatcgctatgctgtttgaaacgtatcggccggatgctgtttccatggaggaattgttttttgcgaaaaatgtgaaaacgggaatcatggtggcgcaggcaagaggcgtggcgttggaagggtgcgcgaggcgtaccaaggaattgtatgaatatacaccgcttcaggtaaagcaggcggtagtgggatacgggcgtgcagaaaagcagcaggtgcagtttatggtaaagacactgttgcagctgcgtgaaatcccaaagccggacgatgcggcggatgcgctggccattgcgatttgccatgccaattcctgccggatgccgcagaattttaagatagaataaatacaggagctaaaagaaccgatgtatgcttttatacagggaacggtagagaatatagcgcaggatagggtcagcgtaaactgtggcggagtaggatatgagattttgaccaaccagcgtaccatcggccaatgtgctgtggggaaagaggcacgattttatacttatctatcagtacgagaggatgcgatggtgctgtatggttttttgcataaggacgaaaaagaaatgttcttgcggcttatcagcgtttcgggcatcggaccaaaggtagggctatccatcctttccacgctgacagctcaacaggcagctattgccattgtttctggagacgataaggtgctgagcaaagtgccgggcattggtaaaaagacggcgcagcgcctggtgttggaactcaaaggaaccattgaaaaccaagcgctgattgggaagataccggaggcaggccctgctggtgacgaaaagcaggtcacagatgccattgcgattttaacagccatgggctttgcaccgtctgatgcggcggcggccgtggcgctaattcaggcggagggcggcactgctgaggagatggctgtggcagcgttgagaaaactggatcgcatgaagtaaggagcggcatatggacgaagataggattttaacatcgaccatgcgaagcgaggatatcgagatcgatcaatcgctgagaccaaagagcatggacgaatacattggacaggaaaaggtaaaagaacagctgaaaatctttatccaggctgccaaaaataggggcgaggcattggaccatgtattgttttatggcccgccgggcctgggaaaaacaacgctggcttccatcatcgccaatgaaatgggcgttaatatgcggcaaacaacaggaccggcgtttgagcatcagggagacctagccagcgtgctttccaacctccaagaaggagatgtgttgtttatcgatgaaattcatcggctaaacaatgtagtggaggaaaagctttatactgccatggaggattttacgctggatatcatcattggcaaaggcccgagcgcgcagacaatgcgtttgccgcttaacccgtttaccctggtaggcgctacgacacgagcgggcatgctatctagcccgctgagggatcggtttggtgtaatcaaccggttggagctttacaacgatgaggaattgcagcgcattgtggaacggagtgccagaataatgaaggtgagtatcgaaccacagggcgctagggagattgcccgcaggagcaggggaacgccgcgcattgcaaaccgtctgctacgccgtgtgcgtgactatgcagagatcaaggcaggcggcgttatcacacgagaggtggcagatcaggcgctgcatttgctggaagttgatgagttaggattggaccagacggaccgcaatattttggaggcgattgtctataaattcaatggaggcccggtggggttggaaactttggccgcgacgacgggagaggaatccgtaaccattgaagatgtgtatgagccgtttttgcttcagctcggttttctgcaaaagacaccgcgcggccgcgtggctacggctttggcctataagcatttgggggccgaggtaccggattccttacagcagggacctaaacagacttcgctattggaaaatgaataacagaagggaaaacagaccaaacggtctgttttttcaagacgaggagataggaatggatcgtggactgaaaacatcggattattggtatgatctgccggaggagctcatcgcacagacgccgttagcgcagagggatcattctaggctgatggtcgtccccaaacaggggcagtttgaacataagatttttacggatatagaagattaccttttgccaggagatgtgttggtcgtcaatgaaacggcggttttgccggcaagactgctcggccttagggaaagtacaggtgcacatattgaggtgctcctgttaaagcaagtgggcgaagaccgatgggaaacactggtgcgccccggtcgcagggtcaaggaaggtgaatggctgagttttggcgaaggcaagctgcgtgcgtttgtggaaaaacgcacggaggctggcggcagggtactgaaatttgtatatgacggcatttttatggaggtattggatgcgctgggtcaaatgccattgcctccctatatccatgaaaaattggaggatggcgcccggtaccagaccgtatacgcaaacactgtaggcagcgccgctgcgccgactgcgggcctgcattttacgccagaactattggaacgccttcaggcaaagggcgtaaagctggaaaaggtgctgctgcatgtaggtcttggcactttccgcccggtaagtgtggagaatgtacaagagcatgtgatgcattcggagtattttgagatcacacagcctgtggtagatagcatatgccaagcaaaaaaagagggtcatcgcgtttttgctgtaggaacgaccagcgtgcgtgtactggaaacagcagccagcagtggtacattgaaagctcagagcggctggacagatatttttatctaccctgggtttgagtttcgcgttgtagacgcgctgattaccaatttccacttaccggaatctacattgatgatgctggtcagcgccttttcagggagggaacgtattttgcaggcctatcaggaggcagtggaccaaagataccgtttctttagctttggggatgctatgctactgttataagggacagaataagatggtaagcaaacttgtttgtattgagtataaatggtagctaaaaactcgatactgagtatcgccattatatacaaaaatgtaaaagaatgaatgataactaggttgctattttgcacaaagatggacaattataagtttacattgcttattatggattatgctgcatagcaaatttttgatagatggtgaagaaaattgtatacaaaggataggatattttaaatatctattaaacgtagggatttagttttatgtcgctatacaatacactctaaactcgcgatatctgtgaaagggattgtagcgtttcagtatgcggtatgttatataaatcatttcccggctattaaaaagcgaataggttgaaatctttaatatgtggacaaagaaaaaaggggcagataatttctgccccttttaaattgagtttatttacagggtaagggaaggcgccgcatatgtacgagcaccgagttcctgatctagcatatacaaccctttggcatctgtaccgaatagctccatctttttaatgagatccgtcgcattggtttcttcttcaccctgctccttgacaaaccaatccaaaaactgtaccgttctaaaatcctttgcctcagcagcggcatcatagattgtatgtatcaactcggttacatactgctcgtgcttcaaagcggctttcaatgggtctatattctctttcaagccagatagatccggcttatcaattgcttcaaaagttatcggcagatcattgttctgcatgtactggacaaataacatggcgtgatcgcgttcttcctgggcctgtacttggtaccagtttgcaaagccatccaaccctttatcgtcataaaaattggaaaagctcaaatacaagtaagcagaatagaactccttattgatttgcgtattcagcagcttggcaactttttcattcaacatatccaacaactcctctttactgaaaaccgagtttttaattcgcccttggttttagttagtttgattatacgcattataaaatattctggcataaaatacaaagcaagactcgtgcgctgcaatttaaagggttcccaatatatttgctattacgtatataatggaaatataattattttacattctttaagattgaaatatgactgacaatttactgaattatcaaatggaataagtttacaattatataaaatttagaaaaaaatagaaacaaaatagaaattcatatttacattttggatcaatacaaaccattcaattcctacgatgagaacgagcaagggatttgaacagaacagataaacatgatactatatgaattcaaccgtggttgaaagattataaaccttacaatcaaatgaaggagatcaacatggcaatttcctatacattggtgcatcaggataagcatacaggcgcgcgtgctggcattgtgcatacgccgcacggggatattccaacaccggtctatatgccggttggcacgcaagcgacggtaaaagcgataacaccgcaggagctttgggatatgggggcacgcattattttaagcaacacctatcatttggcgatgaggcctggaagcaacttgatccaagaggcgggtggattgcatgaatttatgcggtggcccggtgctgtgctgacggatagcggcggtttccaagtattttcgttatccggaacaagaaaagttacagaagaaggggttgagttccgatcgcatattgatgggagcaagcacttttttacaccggaaagcgtgatgcaaacggaagaagaattaggtgcggacatcatcatggcgtttgacgaatgtgcgcatcatgatgtagataaaaaatatgcgatggctgcgatgcgccgaacgcataattgggcagagcgatgcaaaaaggcgcataccaatacggaaaagcaatccttatttggcattgtgcagggcggtatgtttgaagatctaagggccactagtgcaaaaaccatcgatgcgatggattttccgggcaacgcaatcggaggattgagcgtaggagaggaaaaaccggtgatgtatcggttattagaggtaacgacaccgcttttggcccctgaaaaacctcgctacctaatgggtgtgggaagcccggattgcctgattcagggcgttttgcgcggggtggacatgtttgactgtgtgatgcagacaagaatgggaagaacgggcgctgcatttaccaggaaaaagcgaatcaatttgcgcaatgccaaatatgctcgtgatttttcaccgatagaggaatcttgccaatgtcccgcgtgcaaggcagggtttacaaaagcgtatatccgtcatctcatctatgcacaagaaattttggcagcgcgattgataagcatgcataatgtgtattttaccatcgatttaatgcgccggatgagagaggcgattttggaagaccgtatgatggaatttgcgcaggaaaacatgccggatgcttgacgccgttctttgtttcatgtaggatatgaatagcttgtttatggaggaaaaaacatggatcagaacatagggacaatgatcacacaaatcctgcctttgctgctgttgattactgtgattatctttattaccatcatgccgcagagaaagcgtgaaaagcaggtaaagcagatgctagaggagatgaaaaagggcgattgggtccgtaccatcggcggcgttgtgggcaaggtatatgctgtaaaaggagaaaatgtgatcttggaaaccggccctgataaggtgaaagtgacctttacaaagggcgcgattgctacggtcggtgatgctgaggttgaggcggacggcctggccgagtccgatattaaaatggcgacgaaggacggcaaaaaagaaaaataatcttgacgtgtaaccataggattatcccggagaactctccgggataactgctatacaatgcacacttgcacttaggggctgaaagacctgaaagtgccagaataaatctaaaagaaagaaggagcaagaggacatgaataactttacgtattctattccgaccactgtgttcttcggaaaaggacaggtggagaacctgccgggcgccatcaagcagtacggcaaaaaggtactgatggtatacggcggcggcagcatcaaaaaaatgggcctgtatgacaagattgtttctttgttcaaagaaaacgggatcgagtgggtagagctcaacggagtagagcccaatccgcgtgttacctcggtcaacaaaggagttcaactttgccgtgaaaatggtgttgaggccgtcttggcagtgggcggcggtagcacgatcgactgttccaaggtcattgcggcgagcgtggcctatcctggcgatgcttgggatatcgtaattggcaaggcggaaatcacgaaggttctgccggtattcagcgttttgaccctctctgctaccggctctgaaatggatccgacggcggttatctccaatatggaaacaaacgacaaagaagcagtggccaatcctggcatgcttcccaaagcctccgtattggacccgagctatactttctccgtttccaagtaccagacggcggcgggcacggcggatatcatgagccatatctttgaagtatatttcagccgtgtgaaagatgcatacatgcaagaccgcatggcggaagctttgctaaaaacatgtatcaaatacgggatcattgctgttaacgaaccggacaactacgaagcgcgcgccaacctgatgtggacttcctcttgggctatcaacggtttgctgaccatgggcaaagaggttgcttggacggttcatggcattgagcatgagctgagcgcatactatgatattacccatggtgtagggcttgcaattctgacaccggcatggatggaatatgtgctgagcgatgagacggttgataagtttgcagaatacggcgtcaatgtatgggatatcgataagagcctggataaatatgagattgcccacaaggcaatcgataagaccagggagtacttcaagctgatgggtatcccctcctccttgagcgagctgggcattggcgaagaaaacttcgagatcatggcagagaaatctgctcgtggcttggatgctgcttatgtacctctgaaaaaagaggacatcatcaagatctacaaagcttgcctataaaagtgaaaaaagaggcccagatgggcctctttttttatcgaattttccaatagacgcttttttatcatatatatccttgccgtcacataccatttagcagagagtgcgaggtgagataaatggcaaaaagggtcaaaaaacaaaagagaaccggtggggaaaaaagcgcctcattggctggcaatgcagcgcagattctaaagggatgcatcggggggatcatctttacaattgcagcggttttaatatttgcttacctattgaaatccatgtccttatccgacggcgtaattgcgcctgtaaatgagggaatcaaaatgattgctgctctgcttacagcttatttggcaacaaaaaaagctggggggcctgcctggctgatcggcgcattgagcggcgtagtgtatatggcacttggtttctttgtcttttcactgctggatggtggtatgggcatgtggcagattttgctttcggatctcctcactggtttattggtagggctcattgggggcataatttttcaaacgctgctgagcaagccgaaacacactagctacaagagggcgtaaatacaaaaaggatgggaaggcagcccatcctttttgttatattgacggaagattcgcgaacccatataataaaccaataagtattatttctttggacgagcccaggaggttgtgggaatgagaaagcaaggcatcgtcaggttgactatttttttggtcattctggccgtgatgctctatgtttcgctgtttggcgtttcgtttggggtaaaggagattttaccgatggaaacccaattgaaacaaaccaagctggggctggatctgaccggtggtttttccgctgtatatgaggccagcgatgaaggcatagaggattttgacagcaaaatggacggaacgatcaccattttgcaaaaacggttgagcgataaagggatgactgaagccaccgttacccgacagggggatagaggcatccgtgttgagatcccatctgcagaggaagatccatccaccatcagcgaatatttgagctccccagccaagctggagtggaaagacgccgatggcaatgtcgtcgtggaaggagagcatgttacccaagctaaggcgggcaacatggacgggaaatgggtggtttcctttagcctggacagtgaaggcaccgcagcatttgcggaggcgacagcaaacaacataggcaaacagcttagcatctatgtggatgacaagctcatttctagccccacggtgaattctgcgatcaccgggggtagcggcgtcatagaaggtagctttacggccgaaagcgcgcaggagctagcaacgcagatagaatccggtgccctgcctttgacgcttcaagaacaggaagtgcgtatgatcagcgcgacgttgggctatgatgcgctaagcaaaggcgtaattgccggcatcattggtattgtggtgatcatgctattcatgatctttatttacaggctgcctgggttgatgagttgcattgcgcttttgttctatattgttatcatgttcttctgtattcttacaatgcctaaggtacagctaacgttgcccggtattgccggggtgctattgtccatcggtatggccgtagacgcaaacgtcattatctttgagcgtatgaaggaagagcttcgggcggataaatcaatccatacagctgtggagaatggatttaagagagctttttccgctatactggattccaacgtcaccacgctgatcgcaactgttgtcctaatgatttttggtgtaggcagcattcaaggttttgcctttacgctggccattggcattggctgttccatgatttccgctatcttcataacgcgttttctgcttcgccaggttgtaaaaattggcgtaaaaaatagaaaatggtttataaaacagtgaggtgatggcgatgaagttttcctttgtaaagcatagcaagaaattcataattctttcggctgccattatcctcattgggatactatgcgccgtttttatgggcggatttaaccttggcatcgattttacgggcggctcgattttgacggtagacctcaagcaaacctatgatatcgaagatttgcaaaattgcgtatccaacgccggggaaaagggatttaccgttttcagactggataagtcgggagaaggcacacaggcccaaatgaggatacggccgcaagctgatgaagcggcggacattgcgcggagagacactatcatggcaaagatccatgaagtatatccggaagctgagctgatcaatgtagagcgtattggggcggtggcaagcgcatcactgattaaaaatgcggttctctcagtagcgattgccggcgcattgattctgctgtatatctcaattcgctttgaatttcattttggcgtatcctctatcatctgtctgttgcatgatgtattgatcatgatggcgtttgtgtgcattttccgcgtggagatcaatagttcttttattgcggctgtgctgacgattgtaggttatagcatcaacaacaccatcgtggtgtttgataggatgcgggaaataagaaaggcagaccctgccatagagctggatgaattggtagatagttcgttacggaaaacgctgacgagaagcctttatacgtccgccacaacattggttaccattgtgatcctgttcattttgggcccgtcctcgatcaaggaatttgcgttcccaattatcgtcggcttggtggcgggcacatattctagtctgttcttagcggccccaatatgggatatgatggttcggcggagcaaaaaggggatagaggttgcagctgtgccgatggataaacaagccaaaaaagcggagtatgaaaaaaacaaaaacaaaaaagcgcaaaaagccaagcggaagtaaacgaaacgattgctggtttgcgccggaaagcctttcggatgagcgagaggcttttcctatatcccaagaagggaggatgaaagatgctgacctttcgcgtgccgaagcatacagaagaggaattggcgtgtattacaaggattgcaaagcatacgggattgacgcgccaggctgcaggccttttatacaacagagggatccatgagacggaacaggcagacgcctttttgcaggggaatgtgtttcatgatccatttttcttagagcatatggagcaagcagtagattgcattgagcaggcgctggccgagaaaaagcatatcacggtgtatggggattatgattgcgacggcgtatgcagctgtgctgttttggcgcctatgctggcgcaggcaggggcagaggttaacatcgtcatcccggatagaaaacaggatggctatgggctgaatgcggaggctgtcaagcgcattgcacagacaagcgatctgctcataacggtggattgtggcatcacaaacctcaacgaagctgccctagcaaagcagttgggattgcagctgattataacggatcaccatgagccgctggaggagttgccggatgccatagttataaacccccacatttcgccggattatccatttcatatgctttgcggggcaggcgttgcatttaagctttgccatgcgctttttggatttgaacgagccatggaggccattgatttggtggcgatggcaacggtagcagatattgtgcctctgttggatgaaaaccgatccatcgtgaaaaagggcctagaacgtatgaatcaacggccgagatatgccattgaggcactgagtaaagtatgcggattgcatggaaaacagataggatctggcaatattgggtttggctttggcccgagaatcaacgctgcaggacggctgggggatgcaaagcgggcgctgcgcctgcttctggccgaggatcggaagaacgcgatggaattggctgtcgagctggatgaagagaatcaacgcaggcagcagacggagcaggaaatgctcaagcaggcctgtcagctgctggatgaatatgtagacagccaacgcgttgccgtggtggcaaaggagggctggcacagcggggtagcgggcattgtggcctcaagactggtggaactgtatcaacggccgagcgctgtaatctgtttggaaaatggggtagcgacgggttctgccaggggcattccaggcgtgcatatctttgaagcgctggatgcatgccgagacctgatgattaaatatggcggacatgctcaggcgggtgggttttccttaaagcaagaaaacttgccggctttcatggagcgatataatgagtttttttgtacgcactatccactttctacctgggttccaacggtggattgcgatgtattgctgacgccggaggatgtaacggtgcctctggcagagagcttttctgccatggcgccgtttggcatgggaaatcccacgccgaccgccctatttgaaaatgtacgggtgatttcttctgctcctttagggaaaacgggagatcatgccaaatatgtattggagaaagaccagcatacagcggaaatgattgcttttcgcattgccggcaaggatatgccgataccaaatcaaagaatcgatgtttccgctgtgctggaactggatgagtttcggcaggtaaaacgggccaaatgcctatataagcaacatagtattcatgtagagggcctcgaggatctggcaaacacgctggactgccaattgatatttgatctggccaaagcactgccgtccttttctccgcggttccaggattacagcgcattttacaaggcggctcatgagcatccgtttggaacatatgtttgctgcttaacgccgattgcggcaaaccgccttttcaagcagattcgagaggatggtttatcagcgattatcgatctgtccgtattgcattatcccaaaaataagcatcgaatgaatgcgctgcttgtggggggtggcgcatggagaaaagaactcccggtgctggatgatacacaggaaataaaatcgacggtttccaaaatgaggctgtgccgggaggacttgattcgtgtatacttacagtgtaagaagatgggctccggcgcgatgcagtttcgtgagcgatgtcatcggctttcactgtccgccggggtggagccttaccaggcggctgcagccctggcaatctttgaagatctggcttttttaaactttgaacagagtaccatgtgggtagatccgcatcctcaaaagagcgatttgggagaaagcagcatttatacggcactgcaaaaagggtggtgatacgatgcaaggacaagagatgaccaaagagttgcttgagcagcaaaaacagacctttgcgccctggatggcgcagctaaagcaaaccttgccggaagatcaatatgatttggtagatcgtgtgcttgaatttgctgcgtgcgcgcaccatgggcaatttagaaaatctggagagccatacatcacccatccctgcgctgttgccaagatattgattgattatggcatggattatgagaccatagccgcagcgttgctgcacgacgttgtggaagataccgagatgagccgggaggatattacacagcgttttggcgctgtggtggcgcatttggtagatggcgtaacaaagctggataagatcaatatggtaagccgtcaggaacgccaggctgagagcttgcgcaaaatgctgatggccatggtaaaggatgtccgggtcatcatcatcaaattggcggataggctgcacaacatgcgcacgctctatgcgctcaatgaagagaaacgcagacggatcgcgcaagagacactggatatttatgcaccgattgctcaccggcttgggatatacgccatacgtagtgagctggaggatctggccctaaaatatctggagccggaaaaatacgagtacattgtttccgaggttgccaagttgcgtcccagacaggcagattttttgcaaaagcagatggactttttcaaaacgcagcttacggagatgggcattgaatgtgagatcgagggacgggaaaagcacgtatattctatttataaaaaaatggtgaatcaaggcagagagccgaatgagatttatgacctgatggcgatgcgtatcattgtgaatactgtaagggattgctatgcggcattgggtatggtgcatacgttgtataagcctattcctggacggtttaaggattttattgcgatgccaaaatccaatatgtaccaatccctgcatacgaccgttatcaattctgccggtattttgtttgaggtgcagattcgtacctttgaaatgcatcgcactgcggaatatggcgtagcggcgcattggaaatacaaggaaggcaaagaggataaggattttgacgagaagatcgcttggttccgcgatttaaaaaatattaaggatgatgagccggacccagaagaaaccatcgatgttacgcgtttggatatgtttactgacgaagtctttgtttttacgccaaagggagaggtcattacgctaaagcgaggctctacacccatcgactttgcgtacagaattcactctcgtgtaggcgacacctgtgttggcgcgaaggtaaacggacgcattgtaccgctggatacagaattgaatacaggcgacgtggtgcagatacaaacgcgcaaggatggccatcccagccgcgactggctgctgattgcaaaaaccaacaacgcgaagaatcggataagaggctggttcaagcgcgaaatgaaggatgagaacatcgcaaaagggaaggagatgctggaaaaagaggcaaaacggcaggggtttgacctctacaaggatctctttatctctgaatggttggaacctatcttcaagcgttatacctttcatgagatggatgacctatatgccgcggtaggatgcggcggtgtatcgaccaatcagatattgcagcgcttgatcgaggaatgccagaaaaagcataagcaggaacgcaaggcggagcttttggaaaaggccaaacaagcagcgcacagagccaaccagaatgccaggactccttcgcatggcgtaattgtaaagggccaagaaaatatgttggttcgtatggcacactgctgtaggcctgtgccgggagatcctattgtgggctttatcaccagagggcgcggcgtaagcatacatcgtgcagattgctccaatcttttaagtttgatagaccagggagacgatcggatcatcgaagtggcttgggcagaggaatctccggaagggtatcgcgcctgtttaagcgttattgcgctggacaaaacgggtgttatggcggagatgacgcagatcctctccagcatgggtgtgcccattaccagcgttcagggacatagagggaagaacaaggtattccatacggaatttgaaatcatgatccaagacattgatcagctggaacgcatcatcaagcaatttcaaaagatgccgtatgtcattgaagcctatcgggggacgatgtaacgatgagagcagtattgcaaagggtaaccgaagcggaggtttgcgtagcagggaaaacggtgggacgcatcggccccggcttggttgttctgctgggcgtagagcagggcgacacggaatcagatgctgtgtacgtggcgcaaaagattgcgaatttgcggatattttccgatgaagaagataaaatgaatctttctgtgcagcaaactggaggcagcgttttgatggtttctcagtttacgctgatgggagatgccagaaaggggcgcagaccgggttttacacaggctgaaacgccggaacgtgcggatgagctatataaaaagacctgcgatttgctaagacagatgggtctatgcgtagaaacgggtcagtttcagacgcatatgcaagttcatcttgtcaacgacggccctgtaacccttttgctggatagtaaaaaactgttttgatggtgggaagcattttgtttgcaatagagacaaaagatgaatacatgagaaatgaattggctgaagaaattcgtatgtttgtagcggaagaagacgccaatattgttgtaaagcattgcgcagatcccttacagggctatatgcggcatactgtggaagtaaccatgggagataagcagaccggtgcgcaaatagagggagcgccactcgacgaacagccaatgatcaaaaagcgcctaaataagcgggcggcaaagctggcagtctaccaatgtatggtgcagcttacagggaggacgcagccttggggcagcttaacaggcgtaaggccggtcaatcttttgcggcagctggaggcagaaggggcgcgggatcagtttgtagatctgctgggagtgcacccggaaaaagcacagctggcagagagcattatcaaaaggcaggatgcgatgatgcgggaaacagatcagagcagcctttgtatctatgtaggcattcccttttgcatcacgcgctgctcgtactgctcttttcctgccgtggttgccaaaaaagggcagagagaatcgtatgtagctgcgctccttcaagaaatcgaggctgcgggagagatgattcgccgacagcataagagcatctgcgccgtgtacttgggcggcggcacgcctacggcattgacggatcaacagatgcagcgtgtgatggaagcgatgcaaagggcctttggcacaggatatgaatatacgctggaggccggccggccggacacgattactaaagaaaagctgggcattgcaaagatgtatggggtaaacagactttgcatcaatccgcagacaatgcaaaacaagactttggagcgcattggacgcaggcatacggcagaggacattgaagcatgctatgcattggcaaagcaagaaggctttacacatatcaatgcagacctaattgcaggccttccgggagaaacggaggaggattttgccgatacgctgaaaagagtagagcacctggctccctcatcgctaacctgccatacattggcattgaagagaggaagcaagctcatagaggatcattatgcgcatgggaatgcggacacggtatcgcgcatggtggatatggcccgtgaaaaagcagcggagatgggcatggggccgtattatttgtatcgtcaaaagcatatggccggcaatctggagaatgtggggtatgcgaaaacgggtgacgcctgtttgtataatgtggccatgatggatgaaatgctggacgtagttgggctcggtgtaggtgccgttggcaagcgcatcataggaaacaagattcagcgccagccaaatccgcgggatatcggcgtgtatttagagcgtatacatacgatctgtgaacaaaaaaccgcgtttttccatggttgacagcaggggaaagcgctgagtataataaatcatcgcgtagatgggaaaaagtaacaagccaaggccttttacagggagagcagccgcgactgaaagctgcttatcggcctgtttgccaaagacactcccggagctgctcagaaatgagacgtatcacctgcgttaaaggtgaaaagtggaactgtattttgttcaacaagggtggcaccgcgggcttagcttcgtcccttaccgtgaccatctttttttattttggaggaggcgtttgcatgaaatatactgcgctgaaaggcacaaaagacgtgttgcccggcgaaagccatctctggcagtcgctggaatacaatatccgttttttaacgtcgctgtatggatttcgggagattcgtacgcctgtaattgagcatactgagctatttttgcgcggcgtcggcgatacgacggacattgtacagaaggaaacctatacctttgacgacaggggaggccgcagcatcaccttaaagccggaaggcacaggcggagcggtccgtgcttttgtagaggccggcctattcaacgaaccgcagccgaccaagatgtattatttaaactgccctgtgtttcggtatgaaaagccgcaggccggccggctgcgcgagcatcaccagttcggcgtggaggtatttggctctgcatcgccgtatacagatgcagaggtgatttccttggccctagcgctgtttcagacgctgggcttggagggcttggtcgttcatatcaacagcattggatgcccgaattgccgtccggaatatcagaagaagctgaaggaatattttgcgcctcatatcaaggagatgtgcaaggattgtcaggatcgctttgaacgcaatccgcttaggcttttggactgcaaggaagaaaaatgcaagtccatcgcgcaggaagccccccggatgatcgactgcctttgtgaggaatgccagacacactttgatcaattacagggggcgttgaagacgctgcacatcccgtatgagattgatcctggaatcgtacgcggattggattattatacgaagaccgtctttgaagtaatttccaacaaaattggcgcccagggtaccatttgtggaggcggacggtacgatggcctggtagaaaccttgggcggccccaaaacaccaggtatcggtttcggcatcggaatggagcgcttgctgctcgtaatgcaggcccagaaattagagccgccgacgccttccaggtgcgatgtgtttgtcaacacctttggggataccgagcgcgctttggagatctgtacgctgttgcgagcacgcggcgtgaaggcagattttgatcccaatgggcgtagtatgaagagcagtatgcgctatgcggaaaagctagggcccgcgtgtatcttgtttgaaggagaggatgaaagggccaagggagaagtgcagattcgtgcgatgatagacggagagcagaaagcatatccgtttgaggaagctctggacagactgcaaaaaatattggctcaatttacctgggcataaatggaggagacagcatgaaaacagatatgatgggaaactggagccgcgactgcttatgcgcgcagctgacagaacagaatgtagggcaggaggttaccgtgatgggctgggtggatacccggcgtgacctgggcggcctcatcttcatcgatgtccgcgatacaagcggcgtaatacagtgcgtattcgactcggcagagtataaggactttgcaaaggtggaaagcctccgcaatgaatatgtcgtagcgatccgcggcaaagtactgctgcgggatgaagagacgatcaaccccaatattgcaacgggtaccattgaggttagggcaacggatctaaagattctatccgctgccaaaacgccgccgttttatatcgaggatggcgtaaacgtacgcgaagagttgcgcttaaaatatcggtatctggatcttaggcgtcctgaaatgcaggcaaagatgaaaatgcgtcatcaagtgatgcagctggtacgtaattatttttccgaaaacggctttttggaaattgaaactccaatgcttgccaaaagtacgccggagggagcacgtgaatatttggtgccaagccgtattcagccacacaaattttatgcattgccgcagtctccgcagatgttcaagcagttgctgatggtatccggcctggatcggtatttccagattgtccgttgttttagagatgaggatttgcgtgcagatcgtcaacctgaatttacgcagattgacttagaaatgtcctttgtatcgccggacgatgtgatgagcgtaaatgaaaagctggtgcaaaagatattccaagaaacctgggggatggatctgcctgtgcctttccgccggctgacctatcgggaagctatggatcgctttggttcggataagccagatacccgctttggcttggagctttgcgaaatcagcgacctggttgcaaacaccaatttcaaggtatttgcgagcattgtaaaaaatggcggtaccgtacgcggcatcaatgtaaagggcggcgttgataaatttgcccgccgtgagctggatgcgctggtagaatatgtaaagcaatatggtgctaagggcatggcatggatttccgtaaaggaaaacgagctgcaaagccccattgtaaagttctttacggaagaagagaccaatgcgatcctggatcgtatgggcgccgaggtcggcgatgttttaatgtttgtttccgacgtaaatgaggacgttgtattcgatgcgctggggcatctgcgcctgcacctaggcgaaaagcttggtttgattgatcacgacaagctggatgtgctatgggtcacggagttcccgttgctagagtacagcgcagaggaaaaacgttttgttgcaaagcatcatcctttcaccatgccgatggatgaggacatacagtatctggattctgatcctggccgagtgagagccaaggcttacgatcttgtgatcaacggtatggaggcaggtggcggcagctgccgtatctacaatccgaaccttcaagccaagatgtttgatgtgttgggattaagtcatgaagaagcgcaggataaatttggtttcttgatcgagggattccagtacggtacgccaccgcatggcggtatggcctatggcctagaccgtctggtgatgattttgacaaagagcaagtccatccgtgatgtcatcgctttcccgaaggtgcagtccggtacgtgtccgctgaccggtgctccgtattatgtggagcaaaagcagctggatgaactgcatattgaaacgacgcaggaagaagaggcttaaattggactgcatgcaggatagaactgcgctgctgctcggggatagtgcggtggcgcagctgtccaaagcacatgtgatggtgattggtttgggtggtgttggcggtacggcagcggaagcgctgtgccgcagcggcgttggcaggctcacattggtagatggggatcaagtagcagtttccaacttaaatcgtcagatcgtagctgttcggagtaccgtgggctggcccaaagcgacggctatgaaaaaaaggttggaagagatccaacccgaggcactgctgactgcggaggactgtaattttaccgaacagacctccgaaaggctgttagccttgcagccggactttatcatagatgcaatcgatagcatggcggacaagctgtgcctgattgtaaaatgccatcagaagggcctttccattatttccgcaacgggagctgggaaccggatggatctccagcaattaaaactagcggatgtgtttgatacgcagggagatcccgtttgccgcatattgcggagagaactgagaaaacagggtgttgaacgccatatggtggtatactcgcaagaaacgccgatgcggaagggcaggcctacgggaagtatgatgtttgtcccgtccgcgatggggcttctgctggctcagcatgttgtgagttgtttaaaatcgagggatgacgtgtgaaagagataggaactgtcgtacggatcgaccaaaacaaagcgcttgtattgtttgagcggtcgtctgcatgccagagctgcggtaggtgccagcgtgcagagggtgcacatatgcaggtttggcttcccaatacaaaacaggcggaggtaggggataaagtctgtgtagaattgggcgccaggggcatgctacgcgctacttggctggcgtacatttttccgcttgtgatgttgtttgcaggcgtggcggccggttattttcttgcgccagaaaacagccgagacatcatcgctgcctttgccgggcttgc

SEQ ID NO: 3164 - DNA, 19600 bp, Unknown
  16S sequences of unknown bacteria
tgacctttcggagctttcgctggatcagcgtccgctggcagtacaggccatcggcggcctgctggactacctcaccgaaacccagatgaacggcgtggatcgtctggtgtcgctggatctgtacagcgaaagccagttcatggcgctggatctcactgcccggcgcaatctggagctcaccgagaccatgcgcaccggcgaaaagaagggcacccttctgtgggtgctggaccgtacccgcactgccatgggcaagcgcctgatccgccagtatgtggagcagccgctgctcagcccggcagtgatcggacggcgtctggatgctgtggacgagctctatcaggatactatgctccgggatacagtccgggagcggctgggcggcatctatgatatggaacgcctgatgaccaagatcgtgttcggcaactgtactccccgggatgtgcgcactttcggagcggcaatcgctgcccttccggcgctgcgctcctgcctggaggggacaaagagccgcttcctccgggagatctatcaggagatggatgagctcaccgacatagccgaccgcatcggacgggccattgtggatgatccgcccatcaccctgaaggacggttttgtgatccgggatgggtacagtgccgagctggacgaggtccgcagcctggtgaccggttcccgggagtacctggcgggcatcgagagccgggagcgggaacgcaccggcatcaagaacctgcgcatcggctataacaaagtctttggctattacatagaggtgaccaaatccaatctggaactggttccggcggactatatccgcaagcagaccctctccaccggcgaacggtatatcaccgaggagctcaaggatctggaggggcggattctcactgccagtgaaaagatgctcaccatggaaagcgagctgttccgggagctgcgggagttcatctccgggcacctgttccgtatccagcgcaccgcaggtgctgtggcgcggctggatgtgtttgcgtcctttgcggagtctgccatgcagaacggctatgtccgtcccatggtggacctctccggtgtgatccgcatcgaagacggacgacatccggtggtggaacagctgctggacggcggtcagtttgtggcgaattccctctacctcgaccggggagagaacaccgtcgccattatcaccggcccgaatatggcgggtaagtccacctatatgcgccagtgtgcccttattgtgctgatggcgcagatcggctgttttgtgccggcaagaagcgcgtctatcggcattgtggacggcatctatacccgggtgggcgcctcggacgacctggcaaccggtcagtccaccttcatggtggagatgaacgaggtggcggacattctcaagaatgccacccgggacagcctgctgattctcgatgagatcgggcggggcacttccacctatgacggcatgagcattgcccgggcggtgatcgaatacatcgccgacaagaagaagctcggcgccaagactctttttgccacccattaccatgagctcactgtgctggaggacagcatcgtgggcatccgcaacttcaatatcgcctgccggaagcggggagaggagatcatattcctgcgcaagatcgttcccggcggcgcggacgagagctatggcatcgaggtatccaagctggcgggaatcccggatgagatcatccgccgggcgtttgagatcctcggggcgctggaatcgggcaatccggtgaacgagcgccggagccgtcagccccggaaaccggcagcggaggaccagctcaccctggcggcctatgaaaaaagcccggtggaacgggagctggaaaagatcgacgtggacagcctgtcgccccgggaggcgctgacccgtctgtatgaactcaaggcatttctgcgcaagtaacgcgcgttaaggaggggaaactcccatgaccaaacgaatccatgtgctggagccgcaggtagcggagcttattgccgccggtgaggtggtggagcgtccggcttccatcgtcaaggagctgctggaaaacgcagtggacgccggggcacagaagatcaccatcgagatcaaaaacggcggtatttcctatatccgtgtcaccgatgacggcggcggcatcgagaaggacgaccttcccgcggcctttgtgcgccatgccaccagtaaggtgcgcactgcggcggatctcgagcagatcgggtcgtttggcttccggggagaggcgcttgcgtccatcgccgcagtgtgtaaagtagaagtcctttccaggactccggagagcatttccggcggacggtacgtgatccatggttcccaggaggtggatttctccgatgcaggctgtccggtggggactaccatcgtggtgcgggacgtgttcttcaataccccggcccggatgaagttcctcaaaaaggacagcaccgaggcgggcaccattgccaatatcgtggataagatcgctctggcaaatccccagatctccttccggtttatccgggatgggcaggtcaagctgaacactcccggcaacggggatctgctgtcggtgatctatgcggtgtacggcaaggagttcgccgctgatatgatcccggtgaactacacccatgagtttgtgacagtgagcggctttatctgccgacccactgccagtcgttccacccggagcatgcagaatttcttcatcaactcccggtatgtgcgttcccgcacctgtatggcagcgctggaggaggcctacaagtcctccattatgaccggcaagttccccgcctgtgtgctgaacgtgcagattcccttcaatacggtggatgtgaatgtccaccctgccaagatcgaggtgcgcttctccaacgagcgtccggtctttgacgcagtctaccggggctgcaaggaggcgctgggcaccgccggcgaagcggattttctccccaaggaggagccgcccaaggctgcacccagtccctttgcgctcaaggactttgaccacaccggcatgcagcagcgcatgacagcggcagagtaccgcagcatgacctccggctcccgggaaaaccgcccggcggcaaagcctgccccggaggctcagcggaatggcagccttaccctgcgatcgcccggactgggggaggcgatggaggtcctgcgggagcaccgtgccgcatcgcctgcgggcagcagcttcactccccgggagagtcgtccggcctacacgccccaggtcaaaaccttcctggagccggaaaagccggcgcagcccgcccggagttccgagccggagcctgtccgcatgccttcaaagccggataagccggctgaaccggtgcgcccggcgatggctcaggagaaggcagagccaccggcaccggctgcggctccgaccgttctcctgaccgacgacaccgaggaacaggtgactgactaccgcatcctgggggagctgttcggcacctatattatggtggagtacaaggacacctttgtgctgattgacaagcatgcggcgcatgagcgcattctctataaccgcctgtgccgggaaaccagcctgggccagcggcagatcctgctggcaccggtgccggtgactctttcccgccaggagtacgacgcggcgctccgggggcttccggcctttgagcagatcggcttcctgctggaggacttcggcaacggcacagtgctggtgcgggagattcccaccatgctgccgctggacgatgtcaccggggcagtccaggaggccgcagccaagctggcagacggacggcagcagatgctccccgaaacggtggacgagctgctccattcggtggcctgcaaggcggcaatcaaggcccatgacaccacctctctgccggagatggcacagctggtggaagtgatccgtcaggatcgggatgtgcggttctgtccgcacggacgcccggtgtcggtgactatgacccggtcggaactggaacgaaaattcggaaggttggtttgatgcagttgcagacagtacccaatgaacaggaaaaaatcccgcttctggtgattgccggacccacagcgtcaggcaagacgaagctctccattgatctggcaaagcggtttgacggggagattgtttcggcggattccatgcagatctacaagaagatgaccatcggaactgccaaacccactccggaggagatggacgggattccccatcatctcatcgactttgtggagccgggggagagcttctcggtggcggagtatgtggaactggcccggaaggtgatcgctgagatccatgcccggggcaagcttcccattgtggtgggcggaaccggcctctatatctcctcgctcatcgacaatgtggagtttgcggagactggctccagcctggagatccgggagaaatacaagaaaatggcggaagaagagggcaaggctgctgttctggaaaagctgcgtgaggtggacccggaaacagccgcatccctccatgagaacaacatcggacgggtgatccgggcactggagctctatgagctgaccggaatgcccatgtcccggcacaaggagctctccaagcgccatccgtcgccctatcagctctgctgtctggcgctggattaccgcagccgccagaccctctacgaccgcatcaacctgcgggtgaccaggatggtggaggaagggcttctggaggaggccagggagctgatggcgtccgggtattcggcaacagcagcccaggccatcggctacaaggagctgatcccctggctggatggcgaagcccctctggaggactgtctggagcgcatccggatgcagtcccggcgctatgccaagcggcagctcacctggttccggcgggacgagcgcatccattggttcttcccggacgattacagtgattatgataatctctacaaaaatgttgtggattatatagaaaaaactgctctgttatgctatactaaaagttaattgcacagcctgttgatccggattttccgcttctgacaggagtccggcccattcggcaaaaatcgaccggaccagcgctgtgcggtatcttttcagtcacggagagtttcgatgaaaagtgatcgctttatcattcagaccatctcagttgtcatctgcctgttcctgattgtctatgtatcattccattcggtcaatctggattcccagccctatcagaccgaggtggcactgacctataccatctcagacagcgtggaagcctcgggcgtgatcatccgggaggaacagctcatcagcggacaagcctccggcggcgtcgtgagctatcagcagagcgatggcactgtggtccgggagggttcggtcattgcagaggtttacagttcctccagtgatatttcgatccgccgtcagatccgggcgctggaagaacagatcaccgctctgcagaaggtatcggatgcccgcagcgcggaatacagcagtaccgaaacggtcaaccggcagatcaactcggagatcgacgactatatcgccctggtacaccagggacagatcagcagcatttccgagaacaagaacgaactgctctacctgctcagccagaaggatgtcatcatgggggagaccgagagctatgaatcccggatcacccagcttcagtccgaggtggactcgctcacttcccagctgtcgggcagcctggtgcagtacaccagcccggagatcggctattttgcccgcatgaccgatggttacgaaagcgtcctcacatcggacagcatcgaaaccatgacggtggaacagatccggaacttctcccaggagaaggtggtgtttgataattccactctcggcaagatcgtcaccgatcaccactggtattacgcggcggttcttcccaaatccgattctgaaaaattcatcgttggggataccgtgtacctcaacttcaatatgtacaatatcacccagatcccgttcacggtggaggaagtccgcaccgatgacagcgatccggataactgtatggttctgatgagcaccagccacatggtgccggaactgctgatggtgcgaaacccttcggttcagattgacttcacctcctataccggcctgcgcattccggccaaggccaagcggtacgaaggacagcaggtgggcgtttatgtgctggacggcgatgtggtacgcttcaagaccatcaatatcatctatgaaaacagtgagttcattctctgcggagccaactccgatctggagcggcccctggagatttatgatcaagtgatagtagaagggactgacttaagcgatggaaaacctgttggatagtaaaaaggagatctttgcgcatcttgatacgatctacgcaaacatcgaaaaggcagcggcggtgtccggtcggaagaaggaggacattcagctgatggctgtcacaaagactgtggagccggaacgggtgaacatggcgattgaatacggtgtccggctgctgggtgagaaccgtgcccaggaactggtatccaagtatgacagctacaacaaggacggtgtggatatccacttcatcggtaccctgcagaccaataaggtccgtcagatcattgacaaggtatcgctgatccagtcggtaaacagtctgcatcttgccaaggagatcgaccgtctggctggcagccgtctgggtcaccccatggatattctcattgagatcaatatcggtgatgaggaatccaagtcgggtatttcctataaggaagcggagccgctcattctggaagcagctgccatgcccaatctgcatgtacgcggactgatgtgcatcccgccgatctgtgaggacccggcagaactggagcgctattttgaaaaaatgcaccggttatttgttgacatgaaagaaaaaaacatagataatgtcaatatggactttttgtctatgggcatgtcgggcgattacgaagcggcgatccgtcagggagccaacattgtgcggatcggttcggcactgttcggcaagcgaatctataaggagaaataaagagtatgggtgtaatggataagttcaagagtttcatcggcgttccggacgatgaattctacgatgaggaagatgatttcgatttcatcggcaatcgttccaacgaccgtgatgatgactatgatgacccgaaatcgagaggtgctggtatgccggatctgggcgatattcctaccaagaagaacaaagtagtcaatattgcagctacaacacagctgcaggtggtactggtaaagccggagcgttttgaagatgccagctatattgccgaccatctcaacgacaagcgtaccgtggtactgaatctggagagtgcctccaaggaagtatcccgtcgtctgatcgacttcctcagcggtgtagcttatgccaacgagggtcagatcaagcgtgtggctgcctccacttatatcattactccccgcaatgtggactttatgggagatctgctggacgagctggaaaacaatggcgtatacttctgatctgccgctttctgctctgtctggggaagaaaaactgtttctggaacgcatccgggatctggtgacgctctgcgatcagcggggcatccccagattttcggcgtttcttgatgaacgccagcagcggatcgcactttccgccggctcccttcccggggtgacctgtggattctggggcggcttccctgacgcagaacggaagatgttttatgcgcttccggactactgttcaccggaagatgaatcactctatcccatccggatcatcacagcggagttcccgcggcagtatgccctgacgcaccgggattttctcggcgcgctgatgaatctggggctgcgccgggaggccatcggggatatcctggtgggtgaggggagagccgtgctgttcctctgggaaacagtggcggatctggtcctttctgagctttccaaagccggtcgggtgggcctcaggctcactgaaggccgtccggaggaactgccggcagcccattccttccaggagatcgccggaaccgtgagctccatgcggctggactgcgtggcggcactgctgatccgggagagccgggaaaccaccgcccgtctgatccgcagcggcctggtaaccgtcaattccgctgtggaggagtcggtgtcgttccagatccatgccggggataagattgcggtgcgggggcatggcaagttccggatcagtgagatcggtgctcccaccaaaaaggacagattgcacattacctgtcagaaatatatataacaggaggcaagcaggacaatgacttcgaaggacattgcatcgaaaaaatttgaaaaggccaagggatttggcggctataagatcgatgatgtggaagatttcatggatcggatcgctgaatatgtcgagcagctggaaaatgaaaagcgggatatggaaaagaagctcgccgtgcttgccgataagctggaagaataccgtgcagatgaggacagcctccgcactgcacttctgggggctcagaagctgggtgacagcgtaatcaaggagtccaagaccaaggcagagatcattctccgggatgccaatatcaaggcggagaagatcatcggggacgctcatctcaaggcagatgaggaacagcgccggctggagagcatcaagcgctcggtttccgagttcaagaaggacatcattgccctgtaccgcggacatctggagaccatcatcagcaccattccggaaatggatgtaaagccggaagctccggaagcagaggctgctgatgagcccgaggagcccactgtacagctggaccgtgcggaagccgcaccggctccggcagaagctgctgctccttcggataccctggaattcactgtaacctcggatgaggacgaagaggaaccggaaactgtgccggtatccagagaacccagcctccagactgccggaaccatccgggttctgagtaccgaggaggaagaagtacgggaatccaagttcggcccgctgcgtttcggcgataaattcagcctgacacgcaccgatgaacacccggccaaacgcagacggtaacgcctgtttttatcatattatttcaataaatcaaagggagagttacacaaccatggcgcaggattacaacaagaccttgaatctgccgcagaccgactttgcaatgcgtgcttcgctgccgcagcgtgagccgggtatgctggctgaatggaacgaggagaatctataccagaagatggtagaccgcaatgagggcaagcccacttatattctgcatgacggccctccgtacgccaacggtgatatccatctgggtaccgctctgaacaaggtgctcaaggatatgatcgtccgctccaagaatatgaccggctatcagtccccctatatccctggctgggatacccacggactgcccattgagctcaaggctctgaagaaggtcggcgttacagcggatatttctcctctggaactgcgtcagcactgcaaggattttgctctttactatatggacaaccagcgcacccagttcaagcgtctgggtgttctgggcgattttgacaacccgtatctgactctccgtccggagtttgaagcccgtcaggtggagatcttcggtgagatggcaaagaagggttacatctacaagggcctgaagccggtacattggtgctcgcactgcggcactgccctggctgaggctgaaattgagtatgccgatgatccctgctattcggtttatgtcaagtttgaagtaaccgacgacaagggtaagctgttctccatgggcgctgtgcctggcaagacctatgtggtgatctggactacaaccacctggaccctgccggcaaacgttgccatctgcctgggacccaactttgactatgcactgctcaaggcaaaccgggaaggcgagactgagtactatgtagttgccaaggagctggctgccaatgtaatgcaggaagccggcatcgaggaatatgagatcatcggtactgtcaagggcagcgagctggagtatgtggagtgtgcccatccgttcctggaccgcaagtccatcctgatcctcggcgatcatgttacactggacagcggtaccggctgcgttcacaccgctcccggacatggtatggacgactttatggtcgtaacccagcactatcccgagatccccttcactgttccggtggattccgaaggccgtatgaccgaggaagccggattctctgccggcttgaccactgacgaggccagtaaggtgattgccaagcacatccatgagagcggacatctgctggctaccaagaagctgcgtcaccagtatccgcactgctggcgctgcaaggagccgatcctgttccgtgccacagaacagtggttctgctcggtggatcacttcaaggatgaggctgtacaggctgtcaagaatgtcaagtggattcccggctggggcgaagagcgcatgacccagatggtacaggagcgtgccgactggtgcatttcccgtcagcgcaactggggtgttccgatcccggtattctactgcaagaagtgcggcaagtaccacattgacgatgccagcatcaaggccgtagcggatctgttccgcagagagggttcggatgcctggtacaagtattccgctgaggagattctgcccaagggtacaacctgtaagtactgcggcggcactgagttcaccaaggaaaccgacatcatggatgtatggtttgactcgggtgtaacccatgcgtcggtactgatggaccgtctgggcaagtggccctgcgacctctacctggagggtgctgaccagttccgtggctggttccagtcttcgctgctgaccgctgtggcatggaagggtcaggctccttataaggcagtctgctcctgcggctgggttgtagatggtcagggccgcaagatgagtaagtccctgggcaatggtattctggctcaggaagttgtggatgagtacggtgcagatattctgcgtctgtgggttgcatcctcggattaccatgcagatatccgtatctccaaggagatcctcaagcagctctcggaagtataccgcaagatccgcaacactgcccggtatatcctcggcaacctcttcgacttcaatcccgataccgacagcgtagcttatgaggacctgatggaagtagaccgctgggctctggctaagatgaatgatctggtcaaggtagcccgggaagcctatgacagcttcgagttccatgacatctatcatggcgtatacaacttctgtatcgtagatatgtccaacttctatctggacatcattaaggatcgtctgtatactgaggctgcacattctctgtcccgtcgggcagcacagaccaccatttaccgcattctgcgggatctgaccctggttctggctcctgtcctggcctacactgcggatgagatctggaagtcgatgccgaagagcggcacactcaactgcgagcatccggttctcaacgatattcctgagtatgatcccagcctgtctggtcaggaattcatggcaaagtgggatcgcatccacgccgtgcgtgacgatgtcaacaaggctctggagctggctcgaaatgaaaagatgatcggtaagagcctggaagccaaggttgtactgcactgctcggatgaggttctggctctgctggagcctgtggcagaggatctgccgatggtattcatcacctcgcaggtagagctgcagaagggcggcgaagctgccttcaccggcgaagttgccggcctgggcgttactgtaatgcctgctgaaggcgaaaagtgcgagcgctgctgggcttaccgcagtgatattggcgctgatccggcccatccgaccctgtgtgcccgctgcgccaaggcaatcagcgaataatcaagcaatactgatatttcaaaacgacaaatacggcaagtgataacagcttgccgtatcttgttattggaggacttatggcaggacttaaatttgttgtctttattctggtactgatggaccagcttttcaaactctgggcttataatgtcaccgcaatgaccgatttcaacattatccctggcgtgttccggatcagctatgtggagaactacggtgcggcattcaatctgtttaccggttcccgctggctgctcatcggtgtgaccggtgtgctgctgctgatcatcggttatctggtctttggcaagaagatcaccgacgagactcttctctccggcctgagcatgattctggctggcggcctcagcaacctgatcgaccgtattctgcggggttatgtggttgactgcctggacttcacccagctgatcaatttcccggtgttcaactttgcggatgtctgtgttgtaatgggtgcagccatgctgatctattatgtactcattgaggagccgaagaagaaaaagaaggctgccgccgcagttgaggagcagggaaactaagtggaacagctgagttttcccattggggcggagctggatcagagccgtgtggatgcagccgcagctgaactgaccgggcgtacccgatcccaggttcaggcgctgatcgctgatggtctggtgaccgtagacggcaaggcggtgcagaaaaacacccggctgaaagcagggcaggagctggcaatttccattcctgacccggtggagctggcagcagttccgcaggatattccggtggacatcgtctatgaggacgaaagcgtcattgtggtaaacaagccaaagggtatggtggtgcatccggcgccgggcaatcccgatggcaccttggtgaatgccctgctgtggcattgccggggaaagctctcctccatcaatggtgtgatccgccctggaatcgtgcaccgcattgaccgggataccagcggtttgctgctggtggcaaagaccgatcaggcgcatctctctctgtcggagcagatcaaggcccacagctgtgaccgggtgtatcaggcggtggtctatggccgcatgaaggagccggagggccgggtggatgctcccatcgggcgcaatcccctggagcgcaaggagatgtgtgtcacagccaagaattccaaggaagcggtcaccaattatcgggtgctgcaggagtatgagggattttcccatctggaactccggctggaaacgggccgtacccatcagattcgggttcacatggcttatctggggcatccggtagccggagatccggtctatggcccgaaaaaggtgatcaagagcctggaagggcagtgcctccatgccaagagcattgcctttgatcatccggtcacaggggagcggatgcgcttcgacagtgaacttcccgcttattttaccgattttctgcggaccctgcgtccgctgtaagacagcatcaaccagaaccggaaaggggtcgttatgggttacaaactctcggatatttatctgttcagcgattttgatggaacgctccacagtgcgacagaggggattcctcagcgcaatctggacgcattgcagcgctttgtgcagaagggcggacattttggtctggcaactggtcgggcacctttctccgcaaaggagttcctgcatctgctgccgatcaattcgccttgtctgtgcgtcaatggcggcgctgtgtatgatatgcagaaggatgagtacatctataccgacttcctgccggaacaggcaaaagattacatcgaaaagatcctgagcagctatcccgagctggacaccgctgttctgaccgatcaggcctattattatgtggctgatccggaactggcagctggtcggatgaagctgcagaactatacagtgaacccctatatgcgtcagccgatggagggaaactggttcaaggcaactttcaactgccggggcgatgacgcacgccgctataccgacctgctcaatagccggggctgggagggagtgcgtttcacctgttcggacagctattttattgagatgcttccggtggatacctccaagggcaacgccatccggaagatgtgcgaacgcctgggcatcaatatcgatcagactgtagcagtcggggactattacaacgacatcgagatgtttgaagccgctggcttctctgcctgtgtggctggagcgccggaggagatcaaacagctggtggataaagttctggtgagctgtgaggaaggcgctgtggcccagctgatcgaactgctggaagccaaatacgagggctgataaatccccatgaaaaaaagaagccggcaacggcttcttttttgttttgcagcagatacaaagtgttgccgaaccagggcaatgagatcctgagtccaatggacacaaggcagcctcctcggagagggctcatcgtatgctgcaggattatggacgcaagatcagctcccaacggtctgcgattccgaaatagacaatccgatcttctggattgatctgcccggggcgtgtccgacagaaggcatagtgacctgtccgctttgcatagaatgcagggaggaggggacaggatgcgtcggtactggcaatacaaacagaggtggcggcagatctccggcttccggcggtggctcctgccagggattctgatcggagggctgctcttccgtggtgtggcaatggcagaggagagccggaaaccggacttcagctctctgtctgtcccggattatgcgaccatggcgccgatcaccatcaactatccgcttacccctccgctcagcgggaaaatcacatcggggttcgggtaccggctccatccggtgaccggtgaacgggatttccatacgggaattgacattgccgctgccgagggtacaccggttgtggcggcattgcctggcacagtcacagaagtcggctatgatggcatctatgggaattatgtgcggatgagtcacggcaccaatattgaaacccggtactgccattgcagcgaaattctggtggaggaggggagccagctccgggaaggggagcgtattgcgctgtccggaagtaccggcatgacaacaggagcacacctgcacttcgaggtgctggcggatgggctgttggctgacccggcatccgtcctggaggtgcatcacgatgcttgaactgcacatcggacggctgcgcttctgctttgggttctcctttttcctcctgctggcagtggtatgccgttggcaggctggtaccatgctgctgctctcctttttggcaatcctgctgcatgagataggccatttattggctatgctgctggcaaaaacatctgtaaagtctataaactttacagcctttggtgtccatattgtccgctctgccgtgcagtttgtgcccccgttgcggctggtagtggtctatctggctgggccggcggtcaatctgctgcttgcgctgctgtttctcggcagttcccgggagggtatggcagggtatttcggtgcggtgaacctgctgctgggtttgctgcacctgctgcccgccggcagtctggacggtgcctgtgccttgcgggaggcactgagttttcttctgcccgggcgctgggtcaagccggtggctgggctcatttctctggctgtgctgctgggcctggttccggtgatgggcgggctggctgggaagatcagccccacagccatgctgctatgggtctatctgcttgtcgccaccttccgggaatactgaatctgcattttggcaaagaaaaaacgcggcggagatattccgtcgcgttttttgggttattccacagtgaccgatttggcaagatttcggggtttatccacatcacagccgctctgaactgccttatagtaggcaatcagctgcatagcaatggcagcggtgaagggcatgaactcgtcggctgcttccggcagatcgatccggaagtcataggcatccgcatccacggtttcactctcccgacagatcagcagggtcttggcaccacgggccttgacctccttcatgttgctgacagttttgggcagcactgcctgctgggtagctagagcaattaccggcatgccatcggtaatcagcgaaatcgggccgtgcttgagttcaccggctgcataggcttcgctgtgcaggtagctcagctccttgagcttgaggctgccttccagagccagtgcgtgatccagtccccgtccgatatagaacaggctggggcagtcgatggccttctctacaatatccggaacagtcttggtcagctccagggcctgctccatgctgttccggcagtccagcagctgatcggtcagcgaccggcattcatccggctggatcatgccgtttttcagacccagttccagggccagcaggaacatgactgccatctgcacggtaaatgccttggtgctggctacggcaatttccggtcctgcatgggtgtagatcacatggtctgcctcccgggcaatggacgagccgatcacattgatgacgcctagagtgtcggcacccttctgcttggcgaggcgcagggcagccagggtatcagcggtttcgcccgactgggaaatgacgatcaccaggtcgccgggacctacgatggggttattgtagcgatattccgatgccacatccacgctcaccggaatccgtgcaaaccgttcgatgaggtttttgcccacggtgccggcgtacatggctgtaccacaggcaacaatctggatatggcggcggttctcaaagaagtcctcagggatttcgtcccgctcgaagttgggcagaccgtccttcacatggggaacaacggttttgctgaaggcctcgggctgttcatagatctccttgagcatgaagtggtcaaagccgcccttctgtgcctgttccacattccagtgggcatggctcagctcccgggaaacaggggagaggctgctgtcatagatatggatcgcctccggggagatctccacaatgtcgccgtcctccaggacatagtagtccttggtgtacttaagggtggcagaaatatccgagagaatgaagttctcaccctggcccacagcggcaatcagcgggcagtccttccgggcgccatagacacggtccggatggtcgtcaaagagaatggcaaaggcataggagccctcgattcgggccagcgccttggagattgcctggagcggatcaccctcatacagcgaggagatcagatgggcagttacttcggtatcggtctgggatgcaaagtgatagcccttggcaatgagctcttccttgagttccagatagttttcgatgatgccgttatgcagcagcgatacatgatcggaacggtggggatgggcattgatgtcgctggggacgccatgggtagcccaacgggtatgggcaatgccgcaggtaccggtcagcggggagaaggcaagcttttcctccagcttctggatgcggccctgggattttacggtgcggatgacgccatcctcaaaaaccgagatgcccgcagaatcatagccgcggtattccaggttgcgcagtccttccagcagtatttcggtggcctgtctgaagccactgtatccaactataccacacataatcgtattactccttattcagttttgaaagttcacatatataaagcgatttcaaattcatttttatgccgggaaaccggctgatatgtgttccgtggacagggttctgtcggtttggtttcccaaaggttttgtccgctgtcctgcgctccggaaccgagcggggaggcacccgccgaatcgttcgatactcctcccgcctcgtcaaccatacaggttctggcgctttgatatttgttagtctgtctgttgatggtcacctccattgatgaaactgtcctttgctgtccgcagtcacctcctttgatggattttattcattatcgcacacttcggtggaaaatgcaaatcaaatctcctcttccgtccagtggtgttgagagtatcattaaatgcagaagaaaccgttacggtttttcctgcattatttttttatccgaaggcaggcggaaggaggttaaaacattgaacggatacagttatttgacgctggaacagcgccgcgagatcgaaagaatgtatgcagagggtgaacgcgttgttgacattgccgcccgtctgaaaaggagcgccgccgctatctacgaagagttgaagcgcggctatacgggagagtttgacggctacgcccgcccgaagtacagcgccgatcttgcacaagcgacggtgcaagagaatttccgacgcagaggaaaccgacgcggcgcgaattgctgaaatacgaaaggagctattcaatatgaaaatgaagaggatcgcaaacaacgtggcgcttcaaacgatcggctacgtaattagcggatttacgaacgtgtatatctacgttcgggaaagcggctatcagaagcgggacatttacaggggcttgtataagcacttcgcgcacgacgaaatgaacaaatacgcatattgcaagatcacggagcttcgcgccgatgaaaacgtgctttacatcggcattgaagagtaacgcgggaaaggagctattcggaatgagtacaacacgatacaaaatccgtttatgggaatacgacggcgaagcgtccgtcgcaaacgccgttaccttcgacagcttcgcagaagcggaagcgcggttcaatgatcttcgagtttcggaggaaatgccgtgcgttgagttcatcaaagagcggatcgcgaacgggtgcattatcggcgacgaagttttgaacgttcggcagttcacttcggtatttgacgctatcacgaaggacaagcccacgctggcgggcttccttcgttcccttccttgcattgaagcgccgtgggacgcggcttttcagaagcgttattgctcttcctgcacggcggagaattgcgacgcttgcgcgaatgagcagttccggaacaatccggaatggtggctttcccttccggcggcggaggtggaacaatgacggcggatcgggcgcgcggagcgcttgccgtcctgcaagacgcggacgggaagtttatttgcgaagtgccttgcggttacatagtcgagcagacagccagcgcacacaagccccggcggatacaggcacaacggcggcggcgggcaatgcttcgccgtcgcgtcgcccttacggttgcgttgctgaccgtcgccgcccttcttgcggcgcttatgccgtggagcgggagcggtgcggcggacaagccgaaggaaacgaccgccggagcggttgaagaggtacaccagccgaccgccgttcttcttccttcgagcgggacggtggcgggctatgttccgaacgcggcggaggttgaagcccttgcaaagctgatctacggcgaagcggggatcgttccttctacgacggaacaagcggcggttgtatggtgcgttctgaaccgcgttgacgatccccgttttccggacacggtgctggaggttatcgaagcgccgtatcagttcagcggctacgatcccgaatatcccgtgaaagaggaatacgcccttcttgcggc

SEQ ID NO: 3165 - DNA, 16332 bp, Unknown
  16S sequences of unknown bacteria
tttacaatatatttatcatattacgcctgaacaagatttttagcaatcccagcagattatgtcgtagaattcaaaaagatattggttacctattatgagaccaaaggtattgacaatatcagtatattttcaaaaagtactaaaaaatctcctaaacaagaagtgccgcaaaattccttatctcagtgattttgcggcatctactttatacattgaatatgatattatttttcagctttctgacgttcttctgtcaatccaagcactttgaatgtttcaggatcaaccaaaacaccatagtcagccttggcctgttccacagtgatatattcattcttaacatccatagctactttttcagcaggacgcttaaacggattaccatatccaccaccagttgctgtaaccatacgcacaacatcattggtattcataacacggcgtgctgcaattcccattggttcgcttacggttccatctgcatcaataaactggaaataatttacagaaccgtcttttccaccagctgcaccccataccggccatttatttcgaccaaaagatgctgtaaaggtctgattctcattcatagaacggtatacacgaaccgcaccacttccgccacggtattctcctgcacctgccccatcagtatgcagactgtgctcatctacacgaattccataacgagtctcagccatctctaccggcacattataagtttctccatcgccaacacagaaaagtcctacctgaccatcatggcctttgcaagctccccatccgccaacagttggctcaataatcagataatcatttccaaagtcctgatgttttccggccatcaatacggtacatacagaaagtaaatgtcctgcaccaagagattccgggaaaaccggtgcaagtgctttccataccaagtcaataacgtaaatcatgctttcataataacaggaggttgctgccggacgattcgctttcaatacactgccaggttcacagattgtccgcagcggtgcaaatacaccatcatttacggccaactctggtcctaccacagacataaagactacttttacacctgcatatgctgccgttgctccggaattcacgcatcctactacctgcggatcgctacccgtgaaatcagcaataaattcatcatcggtaatggtaacttttacctgtaaatgaactggattgccatgtccatcgttgtccatgtattcatccatttcccatgtgccttttggcatctcagctagacggcggcgggctactttttcgccctgggataccagacgttccatagatccttttacaacgtctgccccatatttatcgcataattcacaaatacgtttttcacctgtacgaagagaggatatctgaccccacatatctccctgtgagatctgcggataacgcatattgctgcgcatcagatcccatacaggttccaccagttctccgcgatccaccagttttgtaccagagaaacacataccttcctgataaaggtttgttgcatcagtcgtaaaggatcctggtgccatgcctccgatatcactccaatgagctttgttaccagcaaaagcaatcagctcgtcatgatagaatataggcattaccattccaacatcggacatatgggttcctccgcccataaacggatcattgataatatatacatcacccggatgaagattttcctttccatgtttctccacaactgcacaaatcatgggtgaaatcataccgataaatccggtaacaccatttccctgggtaagcagtcgaccttcagcatctgcaataccgctggcataatccagtgtttcataaataatcgggctcatggaagtctgtgcaaatgcatagaaaatttcgttacttactgcaatcaaagagtcttttacaatatccagtgtgaccggattaatcttttctttctcagccattattccacctccatttctacgattaggttaccgtattcatctacacttaagctttgtcccgggcaaactacagttgcggtagtaggctcttctacaaccaatggaccctgtgcttttgcaccgaatccaagcttgctccgatcatagattggtgtatccagccagccatcaccgttaaagaatacaggacgtgtttccttcaatgcgctggaaatatcatctttttgaggtgcaatcttctgtaatgcaggtttgttcaactgaccatatgccacaagatgaagatttacaatctctgccggtgtatctggcaatgagaaggtatagaaatgctcatgtgttttgtggaaacgattcatgatttcagcacgatcttcctctttccatggataagccggagcctgtacctgtaccgtatgttcctgtcccgcataacgcatatctgcaataaaagtaaatacagcctgatcttccttaagtccctcagatgccagtatcttatgtgcctcatcaatctgtgatttccacatcgcattcagttcatccatagaagcattctggaatgaaagaatctttgtctgaataaagtcatgacgaatatcactcatcagcataccccatgctgaaaatacagaagctgctaccggaacaatgaccttacgaatattcagttctttggcgagtgtcggtccatgcatcgggcctcctcctccaaatgcaaccatcgcaaaatcacgagggtcatatccacgccgtacagaaatcagctttaacgcattattcatattagaatctgccacacgaataatgctctctgctgattcttccgcagaaatattaaaatgttttccgactttttccaccaaagcattcttcacattgtcaagagagacttccatgtcgaaattcttcgcagaaagacgtcctgcaatcagattggcatctgtggtggtgggttctgttccgttctttccataagcaacaggtcccggaagtgcacctgcactctttggtccaactttcagagaccctccttcatcgatccatgcgatggatcctccaccatttccaatctctacaatatcgacaacaggtgccatgatcggatagcctgcatgtctttcgtctttttcgatatagtaagaagtagttacttttactgctccctgatcgatcagagaacatttcgctgttgttccacccacatcaaatgcgataatattcggttcgccaatgatttttccaagaatagaagcaccaaacacaccggctacaggacctgattctacaatattaacaggagtcagttttgcctgttcaaatgttgtagttccgccattactctgcatgatgtaacggttttccggcattccggcatctgtaagtctctgtcccagacgattcagataagaggatgccaccggcataacgtatgcattcagaacagctgttgaggttctttcatattcacgccattctctcgtgatatcaacagacgggcatacatatacttccggccataattctttgattttttcaactgttttacgttcatgttcttcatttgcataagaattgatgtagcagacagcaatagcctccacctgttcctttttcagatattccactgccgtgcgaatatcttcttcacttaatggtgtcagaatttcacctttatagctgatacgttctgtcacttcacggcgtaaataacgcggaacaaacggtgttggtttttcaaataccatgttaaacaaatccggacgattacctctcgccagttccagaatatcccggaaaccctttgttgtgatcaaggctgtttttgcaccttttctttctgtcagtgcattaatgatcgttgtggttccatggaaaaaagcctcaatgcttttcatatctacaccactttttttcagaacgtccataacaccctgatcaaaattcggcggtgtggtatgtgccttttccagaatcagcgatccattttcatcaatcgctaccagatcagtaaaggtgccgccaatgtcagttgcaactttcatattaggttcctcctcgtatgttattgtcaaatgtacaaaatccactactgcaattctttccattcttgcgtatcagtgtatcatatatactttaccaaagcaatctgttatggtaataaagtgcagaatatctattgagtctatatagatttggaaaaagaaatgtgttactatgaagcaaaacagacaataaatgatatcttctatttacagaaaggtaaaaaaatgaaacaaaatcgcgttgaagctgtattgaaaaatatggaatccctgaatctgtcacagattctgattacagacccactagctattttttatctgacaggacgcatgataaaaccatttgaacgattttatgcactctacttaaatcaaaatggaaaccataaaatttttatcaatcagctagaaacggtacctgaagatcttggtgtggaaaaagtacgttttactgactctgattcctatatggatcttgtaataaaaacaactgattatacggaaccgcttggaattgataaaaatatgcctgcaagatttcttcttccgcttatcgaccaaaaagctgcctccggttttgtaaatgcctctctggcacttgatcaggcacgtgcagtcaaagatattcaggaacaggaacttatgcgcaaagcatcccaccttaacgatatggctatggcagaaatcacacactttttcaaagaaggagttaccgaaacagatcttgcagaacaattgaaaaaaatctaccgtgatcttggtgctgacggcttaagctttgaacctctgtttgcatttggaagcaatgctgcaagcggacatcactggccggatgacacccgattaaaacccggagattgtattctggtcgatattggctgtacatgggaaggatattgttctgatatgaccagaaccttcttttacaaaaacgtaacacaacatcaacaagaagtttatcatacggtattaaaagcaaacgaagaagctgaaaaagctgtgactcctggaattcctctttcttctctggatcagattgcacgtggaatcatcacagacaagggatatggttctgcttttacccatcgcctcggacatttcatcggacttgaagatcacgaatttggagatgtttcttctgcttctgccgacagagctgtccctggaaatattttttcgattgagccgggtgtatatcttgaaaatgatatgggagttcgagtggaggatctggttcttgttatagaccatggacatgagatattgaatcatttttcaaaagaactgacagtgattgactaagaaagaagagctttatgaaaaaaaatccagttgccacaataactttttcaaacggcagtgttattcagattgagctttaccctgatattgcccccaatgcagttaccagttttatatatcttgcaaaacaaggtgtctatgatcattacccaattgagagaatcgtcccaggctgggttcttgatatgagttaccatgcttttcataatcccaaagcctgctatttcattcccaatgatgtaaaatccggaaaatatctggaagctgttccaggtacaattgggcttggcggttatggcgcaccagagattgcaggcggagaatttttctttccacttgcggattgcccggcaatcactggcgtttatcctattttcggaaaaattgtaaatggcatggaagagattcgacgtcttgaacaattggaaacttatcctgttccatatccaggtgaaccgaatgttaagatcaacacccctgtttatcctgtcttcatcgaacagattcagattgaaacctttggcgtatcttatggagaaccaactcgcctgactggcattgcaaaaccacttttctggccttgtgtctctccttaaaaatttaaaaactgcgttattaatataataagtaatttaacagaattagattacaatgaatgtgtgaaaacagaaagtgttacactcaatcatattataagatgtatggaatgaagcagcttaaggtttatccggtgatggaaagtgccagcaccagggcaatcgtcagtgctgtgaccagacggattggtgtggcagtgctgccatatcttctggtggaggaggatatccttgcaaatggaagctactgtgaagtataatcgaactgcactgtttagtgacaagaatgaacgagataggagatatacgatgtatgtgatcgcaggtctgggaaatccgggcagtaaatatgaaaaaacaagacacaatgtgggatttcaggttattgaccgtctggcttccaaatatcatatagatatgaatacaaaaaaacacaaggccatctgcggaaccggtgtgatcgagggtgtgaaggtgctgctggtgaaacctcagaccttcatgaacttaagtggagagagtatcagggaagcagttgatttttataaagttgatccggagacagaatttctggtgatttatgatgatatttcgctggcaccgggacacttaagaattcgcaagaagggaagtgccggcggacataatggaatcaagaatattatcctccatctgggaacccaggtatttccgagggtccgtgtaggcgtgggagagaagcccgaaggatatgatctggcagattatgtgctgggacattttcagggggatgaaaagaaactgatggaagaggcttacgaccgggcagcggccgcagtagccgagatcttgacggacgggccggataaggcaatgaatgattttaattaggagaagttatggacaccttttatgaaccgttgctggagctggaagcatttggtcagatacgggagcagttgaaaaaagaagaaggacttcagctgatcacgggctgtgtggattctcagaagactcatctgatgtacagtctgggaagagactggcctgtgaaattgatccttacttataatgaactgaaggcgaaggaaatctatgaagaatatgaggcactcggggaggatgtgtattactatcctgccagggatttcctgttctttcaggcagatattcagggaaatgaactgctgcgccagcgggtatctgcagtaagcagccttttgtctggagaaaagtcggtgatcattaccactttggatggctgtatggacccgctgctgccgttgaaaaaatggcgggaattgatggtgactatcggggttggaagtattctggagatggatgcctgtggaaaaagacttgttcagatgggctatgagcggaccgggcaggtggagctgccgggacagtttgcaatccgtggaggcatccttgatatttatccgctgacagaggagtatccggtccggatcgaactgtgggatgatgaggtggattccatccgaagctttgatgcccagagtcagcgttccatggaaaatctggaggagatcacgctatacccagcggctgagctttcgccagatcagcagggatacaaaggggaaagtctgctggattatatcaaagaattccgatccctggtatttctggatgaaagtaaccgtctgctggagcgcggggagacggtagaaaaagaatacagacaaagttttgaaaaccggatggaaaagggacagatcgcaaaagatcagccggaggagattattgcctgtgaagtgatctggcacaagttaaatcagatgcggggagcggcgcttagcacgctggaggctacggaccgccgactggagattcataaccggtatcggttagataccagatccattcagtcttacaacaatcattttgaacttctggtcaaagacctgaagagatggaaaaaagaaaaatacagagtggttctcatgtgcgcgtccagaacccgtgggcgccgtctggcggaagatctgctggcagaagagctaagtgcattttacagtgaggataagactagggtagtacggccgggtgagattatggttacccacggaaatgtgtaccgtggctacgaatatcccatgattcgttttgcagtgatctcggaaacggatgtatttggaaaagaaaagaagaaaaagcaccggaaacagcgctcttatgaaggtaccaggattggaagcttcagtgatctgaacgtgggagactatgtggtgcatgaaaatcatggacttggtatctaccgtggtattgagaaaattacggtggataagacggtcaaagattatatgaagatcgagtacagcaagggatcctgcctctatattctggcgacccagctggacgcgatccagaaatacagcagtgccgacggggagaaggtaccgaagctgaattctctgggcggacaggactggaagaagaccaagaccagagtgcggagcgctgtacagctggtggcaaaggatctggtggaattatatgcggcccgtcagtcggagaaaggctatgtatacggaccagatacagtctggcagaaggaatttgaggaactgttcccttatgaagagacagaagatcagcagaaagcaatcatggataccaaacatgatatggagagcggtaagatcatggatcgtctgatctgcggagacgttggatatggcaagacagaggtggcactccgtgcagcatttaaggcagtacaggagagccggcaggtagtatatctggtgccgactacgatccttgcccagcagcattacaatacctttgttcagcgaatgaaggaatttccggtgcggatcgatctgttgtgccggttccgcacgcctgcccagcagaagaagacagtggaagatcttcggaaagggctggtggacattgtgatcggaactcacagagtgctgtccaaggatgtggaatacaaggatctggggcttctgatcattgatgaggagcagcgctttggtgtggcggacaaggagaagatcaagaagctgaagaccaacattgatgtgttatccttaagtgcgacgcctattccaagaacgcttcatatgagtctgacagggatccgcgacatgagcgtgctggaagaaccgcctattgaccgtatgccgatccagacctatgtgtgtgaatatgatgaagagatgattcgcgctgccatcagcagggaactggcaagagagggacaggtctactatgtctataacagggtagagactatcgcagaggtggcacatcggatccaggaactggtaccggaggcaaatgtggcatttgcccatggacagatgaaggaacatgagctggaaaagatcatgtatgcctttattgaaggggagattgatgtgctggtctccactacgatcatcgagacgggtatggatatttccaatgtaaatacgatcattattcatgatgcggaccggatgggactgtcccagctctatcagctgcgcggtcgtgtaggcaggtcgaaccggacagcttatgcatttcttctatataaaaaagacaagatgctcaaagaggtggcagagaagcgccttcatgcgatccgggaatactcggatctgggaagcggatttaagattgctatgagggatatggagatccgtggggtaggaacgctgctgggacagcggcagcatggacatatgcaggcggtaggctataacctgtattgcaagatgttgagtgaagcagttgcccgcatgaagggcgggcagaaaccggatctggatgattttgagacggttgcagatattcagatcgatgcgtttattccagacagctatattaaaaatgaggcactgaagctggatatttaccggaggatcgcagcggtggagaatgaggaagagcgaagtgatatgctggaagagctgatcgaccggtttggggagccgccgaaatcagttatgaacctgctggagatcaccaaggtgaagagtatggcccgcagactgtatatcaaggaagtgaagggaagaccggatcagattacatttacgatgtacgagaaagcgcagatcaatgcagcgaagatcccggatctgctggcgcggatggatggagcactcactttccggaagacggagcctgtacagtttgcttacacttccaggagcagtcgtcaggatttctcaggaaagcttctggagaccacagagcggattctggaagagatggaagtattattggaggatgcaccatgagatacgaaaagatgagaaaaatgatacggcggatggcagcaggagtattgacggcctttctactgaccggtctggccggttgcggagctgccggaccggtcggcgaggaagagacggatgaacaggagacaggatctactgtggatgtgggagaacagggggtctcagaagcggactgggacaagattgctttcgagattaacggtgagcctgtttccctgcgggaatggaatttttatctgcggatgaatcagatgcaatgggaaaagcaatatctggaggactacggggatgatatgtggtctgtggaaacagatgacagcggggctaccatggcagatggattaaaaaaggaagtcatggaagtgatctgtaagactcacatcctgaatcagcatgcacaagaatacaacgcagaactgacagcggaagaaaaagcagcagtgtctgaacgggcagagagcttcatgagtgcctatcatgcagcacttctggattttgcaggagcggatgaagagtttgtcacagaacaattgtctgccacggagctgtccacaaaagtagaagaactggcaggcaaagaatatgagccggatattgctgaagaagactatcagagagagggaatctgttatgtgctgatctctactaccggacttcgggatgcggatgggaatctcacaccgtttactgatgaagaagttcaggagcgcacacagatggtgaaggaactcagtcagaaagcaaagaaaacaggggatctgaagagcgtggcagaagaggccggcctaagaccgattgaatccagtatgggacgcagcaatgagggagacggacaggaaccactgatgctggatgcagccagggcactggcagttggggaagtgtccgatcctattgagacagaggaaggctggtttctggtacagcataccaatgattatgatgagagcggaaccgtatactggaaggaatatctgacagagcaggcgcagcagagttatgcacaggaaatctatgaacagtggagagcagatgcacagatcgtgcagaatgaagaaatcatggattctgtaattgtgaaagatgtattaaaagagttgctttgaatataaaaagagcatataatcaaaagaaatatacggatttgcaggaggattttgttattatgatgaagaaaaaagcgaccactttgctggccgttctgttaatgggagcaattgctctgactggatgcagcgccccacatacggtaaatggaagtgcagaagctgtcagtgtgaatggaacttctgttccactgggagaactgaatttttatctgcgttatcagcaggccaatatgcagaatgcatatggaggaatgtttggtgagacctttatgaatacagatattaccggaagcggatctgtatatggtgttactatgagagattcttctcttgagaccctggaagaatattatctggttgaggcaaatgcagaggaactgggcatatccttgaccgatgaggatgagagcaagatcgcagatactgtacaggcattcctggcagccaatgacagcaagacactggatgccatgacagctgatgaggcaactgttacgcatgtgctggaacttatcactcttcagcagagagtacatgagtattttgggacaaccattgataccgaagtagatccggaagaggcaaatcagaagaagatctcctatgtactgaacagtacagaagataccacggatgatgcaggtaataccgttgttctgtccgaagcagagaaggagcagaagaaagcagatatggaagctcttctggcagaagcaaaagagagcggggatctaagcgcagcagcagaaaactacagtctgagtgtagttcctgctacctatggaaaagatgacgagacactgaatgcagatgtctatgctgcagcagagcagttgtctgacggtgagtattcagatgtaatcgagtctgataatggctattatgttgtatatatggagagtacttccgatgcagatgctacgcagaccaagatcgacagtattttaagtgatcgtaccaatgaagcttattccgcatggctggatccgctgaaagaaggagcagagatcacagtaaatgataaaaatgtagaaaaactgacatttgagcggatctatacggtgaaagcagccgatgaggcaactgcagccgagacagttacagatgaggcaactgcagacgagacggttacagatgaggcaactacagacgagacagcggttgaagacggcactgctgacgatgcaacgacagaagaggaagcagcagaagatactgcggcagaggaataagggtgaaaaagaagacactttgtctttgtttgatcggtcttctggcagcggccggtctgttgactggctgcacgagaaccagtgaagaactgattttatcaaaagagaattccgcgacagaggaggagattaaaacttctctgccggagaacaaagatctggatgaagtgcccttggatgaagaagaaacagaacgggaagcggcacctgtaccagaggatggaaaggctgtttcccgttctgcatattcagtcaccttgacggatactgtgaaatatgtagaatcttccagaaaagagatcaccagaacagagaaacgtctgtctgtagtcgatgagaatgatccatccacttaccagatcgtccgtaaggaagaagcggtggaagtacagaatgagattccatgtgagtatcaggacgaaaagggttttccgagatatgtgtggaatgacggtcactggtatgagtatgaatacagcagcagtgacattacattggatgaggataatgaagaactggcattgatgcttctggagatgatgggtgacagtgagggtgaggtatattccgtgaactgtgaagtgctgacaggagccaatgccggatatgcatttcatgttgtatacagaaatgagctgaccctggagggagaaccatcagatactacgggtctgatagtcagcagaaaacgtacagagactaccacacagaagcagatggtggagacgaaagtcccggtggaagttgagaaaacagtgccaaccggagcatatacctattatggctggcaggagcaggaaggttctgtatactattatgatgagcatggcgagaaagtgtcaggagcacaggtgattcagggtatccgctatgtatttgatgaagatgggaagctgatcagtcaggccggagtagatgtctcttcaaagagcggaacgatcgactggaagaaagtaaaagagtctgggatatcttttgcgttgatccgctgtggttacagaggtgcatctacgggcgagctgtttgaagatgcggcctgtacagccaatgtagcaggtgccagggctgctggcttatcagtaggtctgtatttctattcccaggcagtaacagaggaagaagccacagaagaagcagaattcatagtacaggctgccaggacctgtcatgtgacagctccgcttgtcattgcaggtggatatactgtggatctggccgggcgcgcagaaggagtgagcccggaagaacggacgacatttacaaaagcattttgccggaaagtacatgaagacggaatgatgccgatgatcggcggagaagcaggatggctttccagcagtcttgatatgactgcattgacccaggaacagatctgggttgcacaggagaacagcagtgttacctggtctggaacctatcagatatggcaatatactgcgcagggatcaatcgatgggattcccggcatcgcaggattaaatattataacaggagacgggaggattttccaatgagtgttacagcacaaaatctgacattacttacagatttgtatgaactgacaatgatgcagggatatttcaaaaatccggtgcaggagaccgtgatctttgatgcattttatcgtgtgaatccctgcggaaatggatttgcgatcgcagcaggactggatcaggtgatcgactatatcaaaaatctgcatttctctgatgaagatgtaacgtatcttgacagtctgggaatctttgaaaaggatttcctggaatacttgagagggttccattttaccggtgatatttatgcaatcccggaaggaacggtggtatttccgagagaaccgctggtgaaagttatcgcaccgatcatggaggcacagctggtagagaccgcaattcttaccatgatcaaccatcagagtctgatcgccaccaaggcggcaagagtagtcaatgcggccagaggagatggcatcatggagtttggactgcgtcgtgctcagggaccggatgcgggtacctacggagcacgagcagctatgatcggtggctgtatcggtacgtccaatgtgctgaccggacagctgtttgatgtgccagtgcttggaacccatgcacatagctggatcatgagtttcccggacgaatatactgcattcaagacatatgcaaaaatgtacccggatgcatgcacgctgctggtagacacttatgatacattaaaatccggtgtgccaaatgcaatccgtgtgtttaaagaaatgcgtaaggacaaggtcctgaacggacgttacggaatccgtctggacagtggagacctggcatatctttccaaagaggcaagaaagatgctggatgcagcaggattttacgatgcagtgatctcggcttccagcgatctggatgagtatctgatcgacagtctgaagacccagggtgcaaagatcacttcctggggtgttggaacaaacctgatcacttccaaggactgcccggcattcggtggtgtatacaagctggcagcagtaaaacagggggatggagaatttgtaccgaagatcaaactgtctgagaatacggagaagatcacaaacccgggcaacaagacagtttaccgtatttatgaaaaatcaaatggaaaactgaaagcagatctgattgcactggtggatgataaatttgatgaatccaaggacctggtgatctttgatccacaggagacctggaaaaagacccatctgaagggtggcacttacaccatgaaggaattgatggtgcaagtattcgacaaaggaaagtgtgtctacacatctccgtcagttatggatatccgtgagcattgtatcaatgagcaggctaccctgtgggacgagaccagacgtctggtgaatccgcatgaggtctatgtggatctttcagaccgcctgtataagatgaagacggatcttttgaataaaatgcatccggaagaataagacatgagagaacagtgatgtatatttttcctgcatttccacatactagccatatgttgcagaaatgagatatatgaaacggaacatgcaggaggaaatatgttatgaaggcgacaggaattgtacgacggatcgatgatctgggaagggtcgtgatccctaaggaaatccgccgcacgcttcgtatccgggtgggagatccgctggagatctttacagatcgggaaggtgagatcatcttgaaaaagtattctcccattggagagctgggagcttatgcggcggattatgcagaaagtcttgcgcagacaacgggctatattgtttgtgtggcggataaagacactatgatcgcagctgcgggaaccgggaagaaggaatgcatcggaaaagcgatcagccaggaactggagcagatgatccaggacagggagtgtctccaggcaacggcaggggaaaagcgatttgttcctgttttgcaggatggaccggaagggatcgcttctgaaacaatctgtcccatcatcagtgaaggagatgcggtgggatctgtgatcttcctttcccgggatgaaaagcagaaaatgggagagacagagcttaagctggcatccagtgcagcaggattccttggaaaacagatggaacagtaaaggtgatggatccttgaaaaccttgagattacaaggtttttcagggatctgaaaactttttgaaaaaaatttgaaaaaatttgaaaaaagtgcttgcattttctggaatcatgccgtataataacattcgttggttgacaaaacacaacaacacagacacatagggctatcgccaaacggtaaggcaacggactctgactccgtcatttcaag

SEQ ID NO: 3166 - DNA, 1642 bp, Unknown
  16S sequences of unknown bacteria
cccgtatgaagtactgggcgtatcgaaaaacgcgagcgatgaggaggtaaagcgcgcataccgcgacctggcgcgcaaatatcacccggataactaccaaaataaccccctggccgacctcgcccaggagaaaatgaaggacatcaacgaggcctacgacgccttgacgaagaagcgctcctccaccggccccggcgcgggcggctacggctacagcggccaggcgtccggcggcacgtatcagacgacccccgaatttgcaaaaattcgccagatcattaacgccggcgacctcgacgcggcggaccggatgctcgaaggcattacggaccgcggcgccgagtggtacttcctccggggcaatatcgcccagcgccgcggctggatggacgaagcccaccgcaattaccagacagcctgccagatggcccccggcaacctcgaataccgtcaggccctgtccatgatccagtacggcggcaaccggcagtaccagtccggcaactaccgctccggtgactgctccgacgacgcctgctctatctgccagatgatgatgtgcatgaactgcctgtgcggcaactgccactgagggggcgcggcgcatgaagcaaaagcgggtaaatcgcctggccctggccgcgatgctggcggcgctgagcgtcgtgttcctgtatctgacctccgtcctgccgacgggggggcttgctctgagcgccctggccgggatcctggccagtgtgacctgtttagagtgcggctttttctgggcggcggcgcattacgccgtctgctgcgccctggccctgctgctggtgccggagaagacgtatgtgctctggtatgtcttcgccttggggctgtacggcattttgaagctgcccatcgagggcatcaagcaaaaggcgcttcaatggatcttgaagcttgcagtcctggctgcgtgcctggcgctgctccagcttgtctaccgggcggcctttgcagcggcgctgcccaaatggagcagcccggcgctgtatttggttttggccgccgtgttcgtcgtctatgatatcggcgtgaccggcgttttgcggcagtatcgacgcagagtccggcggcagatttcttaaaatcgccgctttgccccgattttttgggcttttgagagagaaaaggagagaatcacatgatccgaagcatgacaggctacggccgcgccgtcgagacggtggcaggccgcgtctataccgtggagatccgctcggtgaacaaccgctacctggactgcggcgtcaagctgccccggtcctacagcttcgccgaggacccggtgaaaaagcgcctcaaggccgccgttacccggggcaaggtcgatgccttcgtgaccgtcacggcgctgacggcagagccgatgcagatctccctgaaccggcccgtcctggagggctatctggccgcactgcggcagatcgccggcgactatgacgtgaaggatgacatcagcgtcagcaccctggcgcggttttccgatattttcctggtcgaaaaggcagatagcgacgaagcggcgctgacggctgcactcttgggcgttgtcgacacggccctgcaggcgtataacgccatgcgggagacagagggcgccgccctggcggag

SEQ ID NO: 3167 - DNA, 16507 bp, Unknown
  16S sequences of unknown bacteria
cgaattgataaaaagggcgttaggagaaagatatatcacaattgcagaaatgaaactacacgatgcagaatcagaagactgattctaacatcgtgtttttcccgcgccctttcatttccctgctgtgaatagtaacaaaattagtgaattgtatgcgcatcttatgtaaacctcaatgcaattaaccgaaactcaaagctgtgttagcgtttacaaaaaaacttgccaaggatataataggattgattctggtccggctgcagattttagaatggactttatgcgaaacagccggaattgctgttcctgaaagagaggtgaaaggcggctgcagacagccagtgggcagacagaagaagcataaaactggaggagaaatgaaaaaaagagaaaatcgagtggttaaatcactgatcgccggcgttctctgtctctctcagctgcagatcccggtcaatgtgctggctgcagagggagagccagaaaaccttgcgctgaataagaccacgagcgcttccgcattggaagtatcagacggacgattcacggatgaaatggccgtggacggtaaccgcgagggagattcccgctggtccagtggcgcactgaccgcaagcagcccgcagtggctcgaagtcgatctgggcagcccgcagaccttcaacagcgtttccctgtattgggaagcttctgcaggacaggcttatcgtctgggaggacgcaacagcgcagatgaggaatggacgacattctatgaaacagagaatggagacggcgagcttgatgtcatcgacctgagcgatccggtgacttatcagtatgtgcgcctgtacatcactgaaggaaacggacgttattcttctgtttctctgtatgagatcgaactgtattattatactgaccagatgctggcggaaaatgcgctggacgcgctggaagtgccggcatcgaccaaggaaaacttcacgctttccctcggagatgaagagacagcgatcagctgggagagcaacagcgagctgatcagcgtgaacaatgagacgggagaagcaaccgtcacgctgccggaaacgacgacgagagtgacgctgaccgcgactgcgacgcatggcgatgccgtggcgatgaaggaattcaccgtagccgtattgtcagaggacacgatgacggaagcgtatcagatctatccgacgccgcagagcctgacgatgacctatgagaccgccccgctgacggagacggtcaatgtggtctatggcagcaccatcgatgaggtgaccaaggcacgtgtggaagaagtgctcagcgaacatggcatgaccatcagcgaagatggcgccggtgaagggctgacacaggtgctggtcggcgtgaacggctctggggatgaagctgatgcttatgcggatgcgcacaatatttccaaggacgtcttctcgacgacggaaaaccgttatgacgcgcatgtcgtatccatcgatgcagatggtacgatcctgatcctgggtgaagacagcgacgctgcttattatggcatggcgacgctggatcagatcctggatgaagaagtcaacaactccatcacgaccgtggtcgtggaggactattcagatacacagtaccgcggtatcgtggaaggcttctatggcttcccatacagcgtggaagaccgtctttccctgatggaatacatgaaggacaacaagctgaacatgttcgtttatggtccgaagggcgatccgtatcacctgggcaactggaaagacgattatccgacttcggtaacggatgaacagcgcaaagaaggtcagatcacacaggatgagatgaagcagctgactgccaaggcggcagagtgcaatgtagacttcgtctggtccgcgcatccggccatgcaggaaggcatcgactttacatcagaagcgggcatcactcagggcgtgaccgatctgatgacgaagttcgagcacatgtatgaactgggcgttcgtcagttcggtatcttcgtcgatgacatctccatgtccgacgcttaccgcgaccgcgaaggtcacgccgagctgatcgaccgtgtgcagaaggcgctggaagcagaatacaacggtgagggaacggcagaagccgatcaggtcaagccgctgtacttcgttccgagctactatgccttcgactttggctccagcgacagagaccagtacttcgcggcgctgaagaatgtggattctgatatcctgatcggattcaccggaagcagcgtattctcgaatgtcaacagctcgctgatgaaccgcatgacagaatatgtcggccgtcagccggtcatgtggtggaactacccggtcaacgacaaccgtgacgcacagctgttcatgcagccgatgggcacgaattacagtgtagaaaacaatatccagaacatgggcggtctgctgagcaacccgatgaaccaggcagaagccagcaaggtagccatcttcggtgtggcagactactcttggaataccggagacttcgacgcccagaagaactgggaggcagtcttcgcgacctacagcgatgatcctgaagttcaggatgccatccgcacatttgcgacatacagtgcgacgagcggagacaagtccggcgtcaactcactgttcaacgcttaccgcaatgcggtcaacgaaggcacagacccgaccaacgcagaggcgatcaagaccgagatgaacaagatcatcgacgcttgcaacactgtgctggcactggaagatggagatgatgccgctttggccaacttcgctgatgaagtcggaccgtgggcgagaaagctgagaacgctggcaaccgtcgtcaacgattgcatcgatgtgctggcagctgagaacccgctggatgagtgggatgcttatgcgacggccaacacgctgtacacagacattccgagcaacccggattacaaggtagcttctcaggaaggtcagggaacgaccatcacgccgagcgaatttgaggctctgccggcggattcgaccgtaagaccgtttgcggattggatcatctcccaggcacgttcgctttacacgctgccgcagcgcggcaattccggcgtatacacgaatacggatgcatccggactgactgccgctgtaggcgatgagaatgccgtcatcaacggtgcagacagcatcacgctggatgcggaagaatacgtcggcatcaatttccgcagcattgagccgatcacgagcgtagacgctgaactgccggaaggcctggtcgtacagggatctgtcaacggcaaagagtggttcgccgtgaacaacgatgatgaagcggaaagctatgcttacatcagagtgaagaacaatggcactgaggctgcagaattcgatctctccagcttccaggtcaacttcatcaagaagaccgccattaccagcgcaagatcttcgacttccatgtacgagacgggcacttacccgatcagcaacatgtatgacggtgattacacgacttacgcatggaccgcagccaaccaggccgtgggagatacgatgacctacacgctgaatcagacgatcggcatcgatgatgtgaccttcgtattcagcggctctgactgcctgagcgacggcgcagtcatcgagatcagcgcagacggcagccagtgggagacgatcggtgaagttgaccgttcttatctggaaagccataactaccgctatacttgcaacggtgaaggacaggaagcacagtatgtgcgtctgcgcatcacgtccatcaatgccaacgcatggctgcggatctacgaagtagaagtcaataagacgaccaatgagcagctggcacagccagtcgcttacctcgctgacaatacttatatcggtgaggtcgcagaccgttctgtatccacttcttatcagatggccactgacgatgtgctgacctatcagctgatcgataacctgaaggccgatgagatcaacgtgctgtacacgagtgacaatgctggtgaagacgcaacgatcgaagtgcttggcgatgatggctggatgagcttaggcacgctggatggcgagacattcacctttgatgtttccacagtacgtaacgcacaggctgtacgcatcagtgccaatggcaatgcgctcaatgtctttgagatctatgagaccggcgacacttatgttgaagctaagcgcgctgatctgcagagcgccatcaacaccgttccggaaaaggatgagtctgcttataccgaagacagctgggccgcttatgaagaagcactagcacatgccgaagagctgatggcaggcgtagagctgtcacaggctgaggctgacgcagctgcacaggcgatccgcgatgccatcaacaacctggtagagaacggagaacagcctgcaacagacaaggatgccctgaatgaggccatcgctgctgcagaggcgctggatggtgaagattacacgacgaacagctggaacgccctcacttccgcactggaaatggcgaagacggtcgcagcggatgataacgcggcccagacagaaatcgacgacgcagccaacgcgctgaatggcgcaaaggcagctctgcaggtcaaggcgagcgaagcggccatcgacgcattgcagaatgtggtcaacaaggcgaatgcgctgcaggaggattccctggcagagctgatcgctgccgcacaggcactgctcgatgatccggccaacgcatccgtgacggcagttgtcagcgcgatgctcgatctgagcgaagcgatggcagacctgaacacggatgaaagcagcgacaagctgaaagaagacctgctggcgacgatcgattacatcgaggagaatatcctgccaaatctggacaacgtgcgtccgggcaaggtacaggagctggagaccacgatcgttcaggcatatcaggtatacaacaacgccaatgcaactgacgatgagatcagagcagcgatcagaacattgagcgaaaaggcacaggagctgtgggagatcgtctccaaggcagaactgaatgcactgatcgaagcggcagaagcgatcgaggcagatggccatacagcagatagctatgaagcgctgcaggcagcgatcgccgcagccaagggaacggcagcggacgacaacgcgacgacgagcgacgtgaccagagcgatcacgaacctgtcgactgcgatcgccaacctggaagagatcacgctggatacgagcgcgctcgagcatgagatcgaactggcagaacagatcctggccaacatcgatgactatgtggcatcgacggtggaaggactgcaggagaaggtagacgcagcgaaggcggcactgaccaatgcgacgagccaggcagagatcgatgaagcgacgaagacattgcgtgaagcgagactgagcgcgagaacgaaagcggacaagagcgcgctgcgtgagctgatcgcgtatgcgaacagccttgatctgagcgcatattccgacatcaacggactgagaagagcactgatcgatgccggaaatgtgatgaacgaggaagaagcgacgcaggatgaagtcaacgccgcagtagaagcactgcaggcagagctgaacgcgctgacgccgaaagcagaaagcagcacgaacgccgatacgacgaataccgccgcagcggcacagaccggactgtttgccggtgtgctggccgcagctgcaggcgcactgctcgcagtaagacgcagaaagaaccaggagtgatccattcagatcatctcccgtgagcggactgcatgggacatggcccggaaggcattgccttccgggtctttgtcatgctgtgaaccctcggcttgacacagtataaccaatgcggacttctgtctgtcagcttacagccttacaatgagggcaggaggattgagagacatgaatgttttgctggtgaatggcagtccccatgaacagggatgcacagatacggcgctgcaggaggcaggccgcatgcttgaacaggcagggatccgctggctggctgcagcgggtgcggatattgcgccagggcaggaaagtgttgtcacgacgaccgggtgaatgtgtttctcgatgcggcaaaggatgcggatggattcatcttcggcgcaccggttcatttcgcttccgcgtccgcatccatgatcgctttcctggaccgttccttttacgctgatcactgtgccggtctgaaccgctttgtcttcaagccgggcgcagccatcgtctccgcacggcgggcagggacgagcgccgcgctggatgaactgaacaaatacttgttatatgcacagatgccgatcgtttcttcgcgatattgggacatggtgcacgggcatacgcctgcgcaggtgcgccaggatgaagagggcatgcagatcatgcgggtgctcggccgcaacatggcctggatgctgaacagcctgaagatcgccgcggatgcaggactgccgctgcctgaacaagagaagcgcatcagcaccaactatatccgctgaaggggggtatctggatgcaaaacgtatggatgatcaccggcgcttccggcggactgggcaaaggcatcgcggaagcggccttgcgccgcggggatgccgtcgcgctgacctcacgatcaccagaaaagctgaatgcgatggttgcggaatttcctaagcaggccatggccgtaaagctggaactggatcggatcggaagcatggaaaaagcactgcaccaagtctatgcgcgttttggccgcatcgatatgctcgtcaataatgcaggccatggttatcgcgcggccatcgaggaaagtgagccgacacaagtgcgggaattgtttgagaccgatttctttgcgccgttgcgtctgatccagctggcgctgccgggcatgcgggcgcgccacagcggcatgatcatcaatgtatcttcgatcggggcggtacgcggtgccttaggcaatggctattattccgcagccaaaggcgcgctggaactggccagtgaggcattggccaaagaaacagcacatttaggcatacgcgtcatgctcgtggagcctggcgctttccgcacggcattttatgacagcgaactgaaagagagcgagatgcggattcttgattatgatgcgctggcgcagcattatcgaaagcagacagtgcggcatgatcagcttggtgatccggccaaaggcggagcgatcatcgtcgatacagcactgcaccaagatgcgccgctgcggctgatattgggcagcgacgcgctgcaggcggcgcagatgacgctgcaagggcgcctggatgaattgcagacatggcaggaaataagcaagaggagtgaccatgaagatcatatcctctgagatatggtcttttttttgccggaaaaccgtctgatcttgccacttgtccagaatttcttcacatctgtggcacacatctgtcaaaatgagagaagaggatgaaaaaggtgaacagggataggaaaagaatgatatttttctgattcggaggtgggaaaatgctgagaaaaatatcaaagatcattttatctgcgctcatggcgctttctgttatttcatggagcggcatcagcgcatccgcgcaggaagagaaccttgcgctgaatcgcccggtcacggtcagcggtgtcgaaggcggcgttcaggacgatgggacgctgacgtatccgcagtttgacccggccaacctgacagatggcaatgcgtccacgcgctggagcagcgatgaggcgctgacctctatcgacctggaggataatccggatcagaatgtctgggccatggtggatctgggcgaggaaaaagaaatcggcacgatcgtcatgaaatggcagaacgccaattcccgagactacgatgtgcaagtgagcagcgatgctcaggaatggaccgtgctgcatcattatgtcgatccggacaacgatggcagagactacaccgagacgctgagcctggatgctccggtcagcgcgcgttatgtgcggatctatgcgcggctgggcaccatcatcgcctcgatcgacaatatgcagtgtccgaccatatcgctgtatgagctggaagtctatccgtattcggacgaagtgacgctggaggatgtgctcgcccaggcgctggaacagccggtgcaggcagaaggggacgatctggtgctgccgcaagtgccgcaaggctatacgatccgtttgtatgccacgagcaatcctgcagtagtgagcgaagcaggcaagatcatcacaccgctggaagacatgaatgtcaacttgttttatgaaatcagcgacgctgagggcaatgtattgcaaggggatgatcccaagaaagtgacgatcgccggacaatatgccccgcaggaaagcataaacgagaaaccagatgtgatccctgaactgcgggagtggaaaggcgatacgggcagctttgtcttcaacggtcggatcgtgatcgaagacgcgcagctgcagcagacagccgaacagatcgcgatgtatctgaaggaaatgtctgatctggattgtgtgatcacccaggatgacccgcagacaggcgatatcgttctgcgtctggatgaaagcagcgtgctgggagaagaaggctatgccatggatatcggcgatatcctcacggtcagcgccctgagcgaaaagggcatcctgtatggcggaacgagcatctcgcagatcctctcacaggatgaaggacatgatgagatcccgaagggacaagtgcgggattatccgcagtatgcggtgcgtgcggtcatgctcgatgtagccagacaatatatcccgctcgattatctgagcgagctgacacgctatgccggctatttcaagctgagcgaattccgcaatcacatcaatgataatggcggcgaacagacagtggcgttccgggtggaaagcaaagtgtatccgcagctgaatgaagggctgccaaaagatcaggtctactctcaggaagcctataaagcgtatcagaaagacgcgaaaaaatatggcgtggatgtcgtgaccgagatcgatacgccggcgcacgcgggcgcttttgccaatatcgatgaatcgctgctcatggatggctatcattttgatttgcgcaccgaggaagcgtatcagaatgccgtgggcgtcatgaagaatgtctttgatgaattcctcgatggcgaagatccggtattccagaacggcaagttccatattggcacagatgagtatgacaagtcatattcagaagtcgtgcgccgctatatgaacgagctgatcgaatatgtcaatggcaaaggctatgagacacgcttctgggcttctttgggcaccaatggctttgccggggagacaccggtcagcaccgatgtcatcgcgcatatgtggagccacagctgggccagctttgatgagatgaaggacgcaggctatcgtttcatcaataatgcggacggcatcctgtacatcgtgccatgggccggttattataacaattatctcaatatcgcgagcctgtatgacacttgggaatattccaacctcaatggcggacattacttgcagaccggtcatccgcagctgctgggcggagaagcagcgctgtggtatgacatgaaagtaggcgccagcgaatttgatatctttgaccgtcagcgcgatcaggtcatgctcatggctgaaaaaggctggtatggcgaagacgatgatgagacgagcgatgagttcatggaacgcgtggaagcattaggcacgcatgcgccgaatgccaatccaggccgttatgtggaaagtgagtcctcgctggtggcttcttatgattttgatgatatcgcggatggtatcgcggaagatgccagcggcaacggctatgacgcagaagtgcatgatctgtatgcgaaagacgatgcgctgcggctgaaaggagaaggatatctctcactgccatttgatacgcttggctatccgtatactttgcaatgtgatatcaccatcgattccgcgaccggagaaaacgcactgttattctcaggcaaagacggtaagttctattacaattatgatggcacaggtcatttcggctatgaacgcaaaggctatgcttacctcatcgatgcggatattccgctcggcgtgacctttgccatgacgatcgtctgcgatgagaccaacacttcgctgtacatcaatggcatgtttgtcggcagcggtgagtattatcaggtcagcggcgcatccagccaaggttcctctacctttgtgatgccgaccgagaagatcggtgagggcatctatggcaccatggatgatctgaagctctacaactatgccatgagcgccgcgcaggtagcgggtgcttcagaaagcgaagacagcggcaacatcgccctgcataaaaacgtggaagtcagcggcgtcgaaggcggatataacgaagacggcacattggtctatccgcagtttgatccggccaacgcgaccgatggcagtgagtccaccaggatctcgctgaacaccgatgatgacgcatgggtcagcgtagatctggaaaagccttatctgctggaccgtgtgatcatccgcttcaatgagcttcccaacgcatatgccattcaggtcagcgaagacgggcagtcctggacccaggttgcggaatatcgtgatctcaatggcggcaccaaacagaccgtgaccgtgcattttgatcacctggtcaaggcgcgttatgtgaaatatcagcagctggagcgctttacttatgggccgaccggcggcaggtactctggcaactttactgaacttgaggtgtatggctatgacaccgagcgcttcgtgcagttcatcgcggaagcgcaagagcggctgagcagctgtgatgatggcagcgcctttgcacagtctgtctatacagatctgcagacattggaggcgatgctggagaccggaccggtcagcactatgaatcagctggccaatatgatctctgacaagctgacgatgctggaaaatgacaatgcgccgcaagccgttccggataagtccgcgttgcaggcattgctgggagaaacgctcaatgaaaatgagtattctgaacaaagctggaacaaatatgcacaggccttggactatggcagcacgatctattatcatgccggcgcggatcaggcgcttgtcgactatgcatgcgcacgcatcgaagaagctaaggccggattgagcatgcgcaactatatcaccatttccagcaacaagagcgtctatcaggattatgcgttatccaggctgatcgatggcgacacatcttcactgacctggctgcagaacaaccaggcacaaggagactacattcagttcagtttccgggaaccgttagctctttcgcagattgacatttattctgtcaatgccggctcagatatcttgcatcatggcagagtggagatctccgcagatggcaatagctggcagagcatcgcggaaatcggtgaaaatgaacatgaggtcgttacactggaagaaacgccggtcatggccgtgcggatcaccgtcacccaggcggccgaatactggtggaagatcacagaagtcatgttcaacgaagcgcagatccaggataaggcagtattggaagaagagctgaacaaacaagtggatctcagcctttacagcgaagcgagcgtacaggcatatgaagcggctcgggcacaggccgaagcgggattcgctgatgaacaggcgacgcagccgcagatcgacacagctgccgcccagctagtcgccgcgcgcgaagcgctggaaaagaagctcgacaagagcgcgctgggcagcttgttagagacgaagattgaggccgacgcctacacgccatccagctatgcggaatatgaagaagcatatctcaatgcgcaggatgtctatgatgatgcgaatgcgacccagaatgaagtcgatcaggccgcatggaagctgcaggaagccgtaagcagactggtcatcgccgatttcaaggatgagctgaatgatctgatcgcacaggcgtcagcatggaatgaggatgaatacacggcaaacagctggacgccatttatggaagcgctggatcaggcaaaagagaccgctgccgatgagcaggcgacaaaggccgacacggatgaggccgcagcggcattgcgtgccgcgatggatgctttgcagagaaaggcaagcgaggccgccatggccgcattgcaagatatcgtcgatcaggcagaagcgttgcagaacgatgagctgaacgatctgatcgccaatgccaacgcattgcttactgatccagataatgcttccgcgaccgcactcatcagcgcattgctcgacctgagtgaagcgatgcaggcactgaatgccggtgaaagcacagatgcgctgaaagcagacctggaagaaacgatccagttcatcaatgccaatatcctgccgaatgtggacaatgtccgcccaggcaaagtacaggcattgaaagatgccatcaccgctgcgcaagatgtgcttgatgatgaagaagcaactgccgatcagctgaaacaagcaaaccgaacactcactaaagcagcacaggaactgtggcagatcgtttcgaagaatgagctgaacgagatgatcacggccgcaaacggatacgcggaaggcagttataccgcagaaagcatcgcggcattgcaggatgcgatcaccgtagcacaaagcgtggcagacaatgacgacgccacgacggcagaagtcacagaagccatcacgagcctggctgatgcgatcgccagcctggaaaagatcgtgctggataccagcgcattggcacacgagatcgaactggcagaagcgattctggccaacatcgatgattatgtgccaggcacggtagaaggcttacaggaaaaagttgatgcggcaaagaccgcgcttgacgcgatgacgcaagaagagatcgatgcagcgacccagaccttgagagaagcgcgtctgcgtgcaaggaccaaggccgataagagcgcgctcgatgagctgatcgagaccgccaatgcgatgactcttggcggctacggcagagcgcaagtgctggcattccgacaggcacttgtccaggcccagcagatctccataaaggaagacgcgacccaggaagaagtgaatgaagtgacagaaacactgagcaccgcgatgcgcgagatgctggaaagcgcgatatctgcaggaacaggcagtgaagcagccaagaccatggctgaactgcagaccgacgcattcgttctgcttctgatgacctccgcacttatggcatggatgttaaagcgaagaaatgtccgttcatgagatgaccgaaaagagctctgcgcactcagccagagctcttttcttcgggcaaatatgtcagaaacgacaaaaaagtgtacgcaaaggtacacctttgcatacacgccattcaaagacatcaatacagccgaaacagcgctttcagatcaaaaatcaatctattttcactgtttctaaacactattatcctatcacaaccacctctttttgtccatgcgcaaaggtgtaccttcccgcacagccttcataagacgaagaggaggcaaaatgaagaaaaagtatccaggagtgagcgcggagcatatcagatgcacgcccgaggatatcgtccatcttcctgatatgaatgaagatgagattaaacagcttctgcgccagagcgtgccagctctccaataagaccggccaatacatgagcgatcatgcagatacgataatacagaaacagtacagaaaggggtttttgagtatgagagagtatgtaagaccaatgatgatgagtgaagcatttgcgcccaatgagtatattgcggcatgttatacattggtatgtgcgattccgggaagttcggcaacacagataggagatggtacttctacaagatggtttactaataataggaatcatcgacctaatactggtaatcgaggtttgttgtgggataataattgggtgcgggccgatggccttgctcacggaaactgcggcaatgagtctacttcatatgatgtcgatcatagtattggctatgaacataacaatgatggcacggtgaagaatgcagtaatatcaaatgtacatattggaacacaaagcggtaatagcaatatgtattatgcacattggcgatctgataatggtacgctttacacccattatgggtttgccatcatggatgcaaatcctaaccattcctgatcaaacaacgatgctgttgcttgctcgaagatcgagcaggtgacagtttttttgttttggttgtatttgagaaatcatatatgtgtatacgatgttttgatatgtctgtttttcttaaaaaatcgtatcggatgctcgattgtgaaggttagatgaaaatggatggaagcgcttgaatagctgtgggattagcactatcataaagttgattgatgattgtgtcatcaatgagaaagtgaggagattgaagtgaagcagaagtattttgcccatatgggcaggaagctgtgtgcggcatttgtggcttgtgccatggtgctgagcggtttctctgtttcagcgcaggccgaggagacgagcacgacatccatgcctacggtgaagagctatgagaagacttcaggaagctttgtgactgcggaacagtcacggatctactatgtgagcgatgcggcgccggaaggcgacattgcggataccttgaagctggcagcaagcgagagcgctgcgcaaggcatccattccggaaatgtcatagatatcgtctatggcccgcaggaaaatgtgagagacggcgatatcgtgatccgtctcggcgatgtggccaatgatggcgcggatgcgcagcaggcctatgagatggatatcacggaagacaacatcgtcatcacggcggaaggcgctgccggaatcaagtatgcgatgaatgtctatgcgcagaacatgggaaccatggaatgcggtacgattcaggattatccggatgtcaaggagcgcagcatctatctggattgcggacggcggttctataatgtggacacattggaagcgatgatcaaggacatgtcctggaacaagatgaatacgctttatcttgatttttccaacaacaaaggcttccgttttgcgctggatgacatgacgctgacttgggcggatggaacgatgagcgatgatctgagcgacgtcgtttctgagcggacattgacgcagagcgatatggatgagatcattgccctggctgacctttatggggtaacgatcgttccgacattgaactctccaggacacatggatacgatcttggcacagtatccgcaatatcaggtatctgccagcacgatcaatctggatgatgcggaggcaagatcatttgcggtcagcctggtgcagaagtatgcggattactttgccagcagaggatgcacgatctttaacatctctgccgatgaggcgactggctatgacaccaactcacagacgtatgtggattatgtcaatgatctgaatgcgatgctcaaggacatgggctatcaggtgcgcatgttcaatgacggcatcaagacaggggatgccgcgctgatcgattcggatatccaggtgctgtattgggatccgagcacggcgaacgccaatgtgtatgagctgctgagcagcggacacgacttgatcaacattgcggcggattatatgtactatgcgtataataacggttcgttcatctgctccgcaaacaacatctatgatggtacttatgtgcgtgagacgcataatcagagcgatgagatcgcgcagcacaatcagggatggaatccgggcaagttctccaagatgggcgtcaagcaacagatgtcgttcatcaatggcgagtttgtctatccgcagatgggcgagatggatggcaagatcatcggcgcctcttatgcgatctggtcagataacgcgacagacagcgtaactgatcaggagatcatcgaagacgtctattatcaggtacgtgtcacggcagagcgttcatggcgcgtcaatacggattctatccaggatccgctgtatgatgacggcgtaggttatgatgtcgagcaaggctcagatatcagctatgaagaattcatgaacacacagctttcattgagcatggcgccgggcggactgaacagcgatggcaccgtggattcagcgcatgcccagctgcctgaggctggcgagatcacggctgctgagccagaaggtcagagtcaggcaagcgaagcagcgatcgccgcactgcagaacatggtcgataaggccaatgcgctgggatctgatgatgcggcgctgcagacagcgatcacggctgcacaggccgtgctggataaagacgcgccgacttctacggaggtcgtgaccgctctgctcaacctgagcgaagcgatgcaggcgctgaataccgatgaaagcacagacgccctgagag

SEQ ID NO: 3168 - DNA, 16664 bp, Unknown
  16S sequences of unknown bacteria
gatgggaaagcgcatttccaaactgaaagcggaagagtgtgaccgatcggttgaatgttcatacttttccttcggtatttcctttccggtaagcagaccgtaggcttcggcctctgcctcgttctgcggcggggtgggaaccgaaccggtacactcccccgccgaaaccacgtttgaaatgtcgggataatatttcttcttgagctttttcttcaaagataccactccttttgaaatattatttcccccgcagcaggaggttattcgaccgaaataaccttatagccctctttttcgacggcggacttaagagcctcgttcgaaacctctttcgtaagcttcacatctgcaacgcccgtctcgtggctgacctgcgccgattcaacgccgccgacggcctcgagagcagcttttaccctgccagaacagtgcccgcacatcatgccttcgattttcattttcttttccataattgattgctcctttttaatttcggtgttttctttaatttcgtcggctgttactgccgattttttcattttgaaaaaattaagtctcaacgcgtttgtgaccacgcaaaagcttgaaagactcatggcggcggctccgaacatggggttaagctcccatccgagcagacttataaacactcccgccgcaagaggaattccgataatattgtatataaaggcccaaaaaagattttcctttatatttctcagggtgtgtctcgaaaggctgacggcgcccgccgcctgcatgaggctgctgcctgtaatgaccacgtcggccgagtcgattgcaatgtcggttccggcacccaccgccatgcccacgtccgcggccgcaagggcgggagcgtcatttatgccgtcgcccaccataatgaccattccgtccttcttgtgcttttcaacggcgtcctttttgccgtcgggaagcactccggcaataacctcgtcgactcccacctgctttgcgatggcgtcggcggttttttgattgtcgcctgtgagcataacggttttaagtcccattttcttaaactcggcaattgcctcgacgctgtcgtccctaatgacgtcggcaacggctattactccgatcaccttgccgtcttgcgagaagatcatgggcgttttgcccgtttctgcaagctcgcttgctttttgagatatttcttcgggaatttcggcggtttcggcgatatatgcggcgtttcctccccttaaagccctgccgtcaagctttgcgcaaagcccttttcccgattcggcaacaaaatcgtccgcattttgcaagccgatattttgcgagtcggcatatgacacaacggcacgcccgaggggatgctcgcttttttgttcaagggaggctgcggcagacacaagctctttttcgtcggtttcaaagggaataacatcggtaaccgcagggcggcctctcgttatggttccggttttgtcaagcataacggtcttggcgcggccggtctgctcaagggaaacggcggttttgaaaagcactccgtttttggctcccacgccgtttccgaccataattgcaacaggcgttgcaagcccgagggcgcagggacagctgataacaagaaccgaaatggctcttcccaccgcaaaaccgaaatcacggccgataataagccaaacggcaagggtcaaaagagcaatacctataaccgtcggaacaaatattcccgacaccttgtcggccagacgtgccacaggtgccttggtcgccgacgcgtcgctgaccattttgactatttgagaaatggttgtgtcctctcccaccttttcggctttgcatttcaaaaagcccgagcggctgaccgtcgcggcagacaccttgtccccttccttcttttcgactggaaggctctccccggtgagggccgattcgtccatggctgcgtttccttcaaccacaattccgtcaaccggcacgttacttcccgggcgaacgatgaatatatccccaacctttacgtcggccaccgcaaccgtcataacgctgccgtcgcgctcgacctcggcggttttcggggtcaaatccataagtccctttatggcgttcgtggtcttgcccttggaatgggattcgagcatttttccgagggttatgagtgccaaaatcatggccgccgactcaaaataaagtccgtgatatatttccatttgagctgcgggatcggtcacaacagtcattttaaagagaagatatgtgctgtataaaaaagccgaagccgagcccatggaaacaagcgtatccatattgggagagcgattgatgacgcctttaacgccgtttataaaaaatttctgatttataacgcacacaactgccgaaagaatgagttgcaaaagtccgagagctatatggttgtgctcaaaaaatttcgggacgggaaatccccacatggcatgacccatggagaaatacataagaacaataagcacggtaagagagcttacaagccttgtgacaagcttttttgtggcgttgtccttgatttcctcttttttttgctgtttttgaccggccaccgacgctccgtatcccgctttttccaccgccgcgataatcgcggaggagtcggccgtgccctccacattcatggaattggtgagcagattgacggcacaggaggaaactcccggcaccttcgaaaccgccttttccacccttgagctgcaggcggcgcagctcattcccgttacatcgtatttttccaacaaaaacacctcatttcataagacggcggagggtgtcgataagctcgtccaccgtttcttccctgccgctttttatatcgtcggtaacacaggtttttatgtgttcggaaagcatttgccgattaaatgcgtcgagagccgacgaggcggcctccacctgcatcatgatgtcgacgcaataggcgtcgttttccaccattccttttataccccgaatctgcccttctattcggctgagcctgttgagaagctttttgtgctcgtcctcggttcgccgtttgcttttgtggcaatgacagcacttttcctgcacttttatcacctctgttcggattatatacccctgaggggtatttgtcaatatctcaaaactaatattttcttgctttttttacccgctcgcattaaaataaagtcagaagcttttaaaggatttgattgaatattgaaatataatgaaaccttatgtcgaatcgaatatgcgctgtcggtattgttttttgtgacgctggcgggcttttttccgcttttctacggcgcgggttacagcgttattctgcccgcaaaatacacggcttttcaaatcatcgccgtgtttttcggatgtgccttttttgctctgtcggtattaaaaaaagacaaaaagcgcttgttttacggttgcttttcggctcgatgcgcaccgacggcatttctgtttttattttatgccgttctcataatctctgcgctgctgtcgccttatcttttacaaacaaattccggaggactttcggcggtgattttcggctcgggaagatacgacggcctttatgtctacgggctttatgccgtaatttttataatttcctataaatttctgcgttttgaaagacggcacattctctttttgtcggcggttttgctgcttatgtcgctgttcggaattgtccagcttttcggcgtcaaccttttgaacatatacccctccgacacatacacgggatattacgacgaatttatttccaccatgggaaacatagactttttctcttccctcctttgtatgcttatacctttttgctttgcctcatttatgtcggtcggattcaaaaggcgcgagtcgggatttgtgcttttttcggtcttttccgcaagcttttgtctcatcaaaaccggtgtgcagtcgggaattataacgctgacggccatgtttcttatcataatcccgctatcgctcaaaaaaagggaaaatgtcacgaaggctcttgtttcggccgcatctgcggctttgctcatttggctgtgcggctctctcgagtttacaaagctcgataattcgacgggaatatccttttcggtaaagcctgttcctttgtttgccgccgggcttgtgatcgcggtatgtatatcggcgatattgcttgtaaaaaaatattaccgccgtcccattgatcttaccgccgttcgcagaatgatctttgctttttacggactgcttgcggccgcaatgctcatatatgtgggacttttctttaaaccgactcggtatgaaggcgcgattttcgaactttactgtcttttgcacggcgaggtcgccgattattccggctcgggacggggaggcatatggaaatacagctttttgctcggcctaaagcggccgctgttcggtcagggaacaggctgctaccgtctcgccatggatgattttgcgcaaaatgcgggatacacctactacacctcaagaaacgccgttctcgacgccgcccataacgaatttctgcaaattttcgtcacaaacggaattttcggtttggtaagttatctcgggttctgtgtcacgctgcttgcaaaggctgtgaaaagcttttgcggcggcaaatatgtcctgcccctttttgcggcggtgacgggctatcttatacaaagctttttcaccttttccgttgtggaggtcacaccgattttttggatgttttgcggggtgctgctttcggccgcccttcatacaaataatgacgaattatgaaaataatagttgttgatttaaattcgtttccatggtatacttatacatataaaaatataaattatccgatcgaagggaaattctcattttaggaggactgttatgtgtaaatgtcaaaacagcgatctttcgctcatcgatccggtgcttgagaaatacgggaaaaacccgggcaacctcatcaccattcttcaaaaggctcaggagatctacggttatctccccaccgacgtcatctataaagtggccgagcagaccggctcgactcccgccaaggtcatgggtgtggcaacgttttatacccagttcagattaaagccggtgggaaaatatcttataatgctatgtaagggcacggcctgccacgtcaacggagcagaccgtattgaaaccgctctttcggaggagctcggcatttccgacggcgaaaccaccgacgacggccttttttccatcaaaaacgtggcatgtctcgggtgctgttccctttcccccgtcatgatgataaacgacgaaacctacggaagtctcacccccgaaaaggccgtgggaattatcagagagcttaaggaaaggggcggtgacaaatgagaatagccgttggacagggaagctgcggtattgcggccggagccggagcagtttactcgcggcttaaagaactcctcggaaacgatgtttataccaccggatgtatcggaatgtgctttgtcgagcccattgtggacatttatgacggaaaagaccttaaaaaaagacttgtgaaggtcaaaaaggaggacgccgacaaaatcgcgaatgcggtgaaatccggcgatctcgacagcctttccgaccttgaaatctccgccgacgacgcggcatttctcgagggtcagacacgcattgcccttcgcaactgcggtatcatcgaccccaccgacatcaacgaatatattgccgcaggcggctatgaggcgcttaagaaggctgtttgcgatctgactcccgaacaggtcatcgaaattataaaggtttcgggtcttgcgggccgcggcggcgcgggattccccacatggtttaaatggaacgccgcaagacagtcggtttccgacaagaaatatctcatatgcaacgccgacgagggcgaccccggcgcatttatggaccgcgcagttatagaaagcgacccccacaatcttatcgagggtatgctcatcggcgcctatgccatcggagccgacgaatgtgtggtttatgtccgcgccgaatatcctcttgccatagtacgtctcgaaaacgccattaaacaggcggtcgaaaaaggcttcctcggaaagaatattttcggaagcggctttaactgcacgatacgcattaaagcgggtgcaggcgcctttgtgtgcggcgaggaaaccgctcttatcgaatccctcgagggaaaacgcggtatgccgagacttaagcctcccttccccgcacagtgcggatataacaatctcccctccaacatcaacaacgtcgaaacctttgcaaacgtcccctggatcattgcaaacggcggcgaaaaatttgccgctttgggcaccgaaacgagcaaaggaaccaaggttttcgcgctgacaggtaaaatcaagcgcggcggtcttgtggaaattcccatgggaaagacccttcgcgacgtcattttcggtatcggcggaggaatcagggacggcaaggaattcaaggccgttcagatgggcggaccctcgggaggatgtatccccaaggatctgctcgacacggtcatagactataaggccctttcggccacgggagcaattatgggctcgggcggaatggtcgtcatggaccaaagcacctgcatggtcggcatggccaaattcttccttgactttaccgcgaaagaatcctgcggaaaatgcgtccattgccgactcggcacgagaagaatgctcgacgtgctgacaaggatagtaaacggagacggcaaagagggcgacatagagctgcttgaagagctttgctatgccgtcaaggacggtgccctttgcggtctcggtcaaacggctccaaaccccgtgctcaccacgataagatacttcagaaacgagtatgaagctcacataaacgacaaaaaatgtcccgcaaaggaatgtgccgagcttatcgcctattcaatcgacaaggacaagtgcaaaggctgctccctttgcgccaagaagtgtcccgtcggcgccatttcggggcagcttaagagtccctatgaaatcgatcccgagctttgcataaagtgcggaaactgcctgacaagctgccgtttcggcgccgtcatggccgactaacacggaggtgagaaaatggaaaaaataaatatcacaatcgacggaaaggctctcaccgccgaaaaaggacaaacaatacttgaggctgcaatcgccgcgggaattgaaatccccaccctttgccacaacaaaaccgtcaaggtttacggtgcctgcggactgtgcgttgtggaggccgacggaattcccaagcttctccgttcatgttcggcaaaggtaagcgacggaatggtcattcacacccattcaaagcgcgtcgaccaatcgagaaaaatcgctctcgagctcatcatgagcgaccacgaaggtgactgcgtgggtccctgctcgctcaactgccccgcccacacaaattgtcaggaatatgtcaaacaaatagctctcggaaacgacaaaaaggccgtcgaggtcataaaggagaaaattcctcttccccgctcgataggacgggtatgtccccacccctgcgaaaccgcctgccgccgcaaaaacgtcgagcagcccatttcgatttgctcgctcaaggcctttgccgccgacgcagacaaaaaatccgccgaccgctttgtgccggaagtttcggacaaaaccggaaagacggtgggaattatcggaggaggccccgcgggacttaccgccgcatatttcctcgctcttaagggtcacacggtcaccgtgctcgaccaaatgcccaaaatgggcggtatgcttcgctacggtattcccgaataccgcctgccgaaagccgtactcgacgaagaaattgccgatattgaggcgcttggcgtaacccttaaaaataactttaaaatcggaaaagacgcaagctttgaagaaataaaatcccgatatgacgccgtcatcgtcgccatcggagcgtggcaaagcatgggactgcgctgtgaaggagccgacctttcgggagtttacggcggaattgattttctcgaggctgtggctctcggcaatcccccgaaaatcggtaaaagcgttgcgattgtcggcggaggaaacaccgccatggacgcctgccgcaccgccgtgcggctcggcgccgaaaacgtctacgtcgtctaccgcagaacgagagccgaaatgccggccgaggacattgaaatcgaggaagcaatcgaggaaggcgtggagttcaaattcctcaccaatcccgacgtcattttgggcgaaaacggacacgtcaccggcataaagcttcaggtcatggagctcggcgagcccgacgaaagcggacgccgctcccccgttcccgtcgagggcaaatttgaggagctttcggtcgataccgttatttcggctctcggccagcgcataaaagccgacggatttgacgccgtcgaaaagaatcagcgtggaaacatcattgccgacgaagccacctacaagacaaatgtcgacggtgtttttgccgtgggcgacgccaccaacagaggcgctcacatcgcaatctcggcaatcggagaggccggtcgctgcgccgatatatgcgacgcataccttcacggagtcgacgtttattacgaaaagccctttgtgtccgagagaaaaaccgaggacatagactttaccgtgtatgaaaaccgccaaagagcaaaaatgcccacccgccccgcagacgagcgcaaaaaggatttcggtgaggtcgctctcgggttcacacccgagcaggccagagccgaggctgcacgctgccttgaatgcggctgccacgactacggccactgcaagctgattaaatatgcaaacgaatatcccattcacccggaacgtctgggcagcgaaaagcatccctattttgtggaggaacgccttgaggcaatcgaacgcaaccagggaaaatgtattctctgcggcctgtgcgtcagggtttgcgacgaggttgcaaagcagggtattctcggtcttgtgggacgcggatttacaacggtcataaaaccggaattccgaaatcccgagacaataaagatatgcgcctcctgcggaaaatgcgttgaggcctgtcccaccggcgcacttaaatttttgaataaataatcaaaaacaaattcaagggaaagggcaaaaaacgtcctttcccttattttcataaaaacgcttgtatttttatgaaaaatcaattataatgtaacagtcgaattttatgccgtaaaggaggtctgtaacagtgaacaaaacaatcgacggttttgaggaagaacaggcggaagaaatttcggtcccttctcccgaggtttcacttgcagaaaaaccgaaacgcaaacgccgtttcggcgaccgatacgacggttatcgtgtcaaaaagcttgacacgcagttttggatagttcccaacatcatgagaacccgcacagacagccaggtaatgttcaacgaggttgtgggaataggagagcttgaccgctacatacacagaaagcgcgacggcgacattcccaatctccgcatggttcatgttgtcattgccgccgctttaaggctgtttgccgaacgcccgaggcttaaccgttttgtcgccggtaaaaaaatctatgcccacaacaacattcgcttttccatgtcaataaagcggtccatgaccgacgacggcgaggagaccgaaattatgccggttttcgagcccacagacacgctttatgacgtcgtggaaaagttcgaagccgctctttcggaaagcgttgaggaggccaccaaagagaacaacaacaccgataaggtggcgggtgcgctgagccacattcccacatggcttaaaagctttgtggtttttaccatccgaaatcttgataaaatcggacttatgccgaaaatgatctaccacgcaagtccctttcactccagcgtttttataaccgatgtgggaagtctcggaatcgattccatttatcatcatctttatgaattcggaacaacgtcatgttttatcgccatgggcaaaaagcagtttgttccctttgtgcgccccgacggcactctcggtcaacgcaaggtcataaacttccgttttgtgcttgacgaacgcatatgcgacggatattactatgccgcgtcaatcaagaaattcagaagatatttaaagcatcccgagcttcttgagcgtccgcccgaaaaccttcccgacgaaatataaatttaagaccgacaatcggatttgtttccggctgtcggtcttttttcaaacttcttttaatgtgatttcataaacggtaattccgttttgccttgcaataacataaatatgtccgtctatgatatttatgccctcaggctcgggagaccatgtgttccattcgggcatatcgatttggaatttcagctccccgttccagtcgtatatgcggatttccgaaaaggtgtccccgccggcatgggagcgaacgaaatagatatattcgctgtcgcaaaaaacgccctgggaaagggacgacggctgagtcacgtcaaactcctttgcaagggtcatgtctccgttccatgtgtgaaccttctgccccgccgaaaagcccgacgcatacatatcaagcacgggagaatatgccatcgaaaagaaatcccgttcaaggctgccgcttgatttttcggtcagcgtatcggcgtcaataagggaataaacattccacccgggctgacaatgagacacaagataggcattttccttgggtacaaaggtgacgttgttgccgtgctcgatgttgagctccttgctgtatcttatggggtttccctctttgtcaaactcggcgattattcccacctcgttgttttggcgcatggagccttttgtgagagcgcaaacgaattttgttccgtcaaaatatccgccttgaatattggtataattcgcgttgggagttctgaaattcagcagctgcttatactcgtcgacggcatattttttgccttgctcaagggtaagcgtgctgccgaaatattttgatttttccgagataatcggtctgccttccgcctcaaagcgggaaattttgcccaccgaatactgcaaaatcaaaagcgcatcggtaacctcggtgtttccgcttttgtccacatcgcaaagaactctctgttcaccgtcaagctcggtttttcccaccgctccctgcagagcaaccagcgcgtcggaaacgttaaccgtgcggtttctgtcggcatcgccgtattcaaattccgaaagcttaccgtcaacaatgggctcatattcatcgctgacggcaataaaattgtcaaaatgcgccgaaaacttcacgtcctcgtctgcctcatttttccacaaaatcgcgaccgctccgatgtctctccagcttaccgacggatttttggccgtcacctgcgtttttctgaaagcaaggcgggttttgccctttgcaaatttacagggaacggtatattcaaatcccttttggtcggccgaattttgataaaatgcaaccgtgaggcttccgctttcaaaatcctccgcaaagaaaatgtcaacggcaaaggttctgtaggacgaaaggtcggcctcaccgacgtcaagtttcattcccgcgccgataccgtctggctgtcccacggctctgaagggttcgagacggacgctgtaatttccctgtgatacaaactcctttttggagctttttgccgcaatggaggcgttaattttttgaattttcggattttcaaagctttcaatcataaaattcccgaaggaatcgattctttgctcctcggcagatgaagcagcgggaaaagaaagaatcaagcaggccgaaattaaaaacgaaagaatttttttcatttatttttcctctaaaataatctcataaagggcgaattcctcatcctcgcccattatgtatatatgtccgtcgacgatgtttatggattcgggttccatgtcccaggaatcccattcgtcaagatcaatttggaaggcaagacttccgtcccacttgtatatgcggatttccgaccatgtgtcgccgctgttataggaacggacaaaatagatatacttgctgtcgcaaaaggcaccctgcgaaagagacgcgggcttttccacattaaactcatcaataagctttaaatcgccgtcccaagtgtgtaccatttctcccgccgcaaagcccgacgcatatttatcgaccgcggggctgtatgcgatggaatagaaattgcgctcaagggctccgtttgaggtttcccttaatgtatcggcgtcaatcatagaatagacgttccagcccggctggcaatgggacacgataaaggaattggttttgggaatgtatgaaatattatttccgtgctcgattgaaaggctgtcgctcatttgaagaaggtttccggaattgtcgtattttgcgattattccgcactcattaccctctctcatgctgccctttgtgatgcacataacaaactgcgagccgtcataatatccgccctggagattgttatatctcgagtcgggcgtcttaaagctcataaggcggcggtattcggccaccttatattcctttccctcttcaagggtcagactgcagccgaaattatcgggcaaagagctttcgtcggcaattccctcaaagcaatcgaaataaagcgtcggcttaatgtcctcttggtcgtcgttgacccatttaagacaaagcgcgtttatttccgacaaatcggcatttgaacgaagggagcaaacaagctccgaggccgaaaagtatatttcgtttgcaccttttttaaggttgcaatgtcggcggaaattatatccctgctcataatcggcggacttaagcagcgctatatcaagatgtccgcttgaaagctcgtcctccgaataaacgttaattttaaaatatttataatccgcggcatttacggggtttttcaaattaaccgtgacctgcgcccccacattgtcgggatttcccacgggagaggagcttgaaacaacaagcgccgccttgccctgttcggcattttttgaagtcagctcggcatttgtaaagctttcggccgtgaatttagaatcgtcaaagctctcaatcataatatttccctccttggttttggcgccgctttccaccgtctgctcggcacagcccgaaagcaccgacagcgcaacaaccgatgcggttataaaacttaatgcttttttcattttatcctccaaaatgcttttttaatattttagcttaaatccaacataaaatcaagtgaaatcaaagtaaaatcagcgcatccggcctcattttgcggtgtcgttacggattttttccttttgaaaagcaacaaaaataaaacagcatactaaaaaaaatcggaaacacccgacttgcgaaaacaggtcgggtgtttcctttgagattgagagatcggcttatattgccgaaaaggattttttaatttttatctttttcttttgaatacaataagtgctcccgcgcttaaagcaagcattgcaaccgccgcaagagcgccgctttctccggacttcgggttttgagcctctcccgaggtgtttgaggagacattcgaaacaaccgaagaaacgtcggaatctgtctttgaggtgtcggacgagggttcggtcgagcctcccgactcggttttttcctcaagctttgcaatcacggtgtcgttcttgcttatctcctttgtgccgttttggtcggcaaaatacttaccgcaatctttgcagaaccagtattcgatgttgccctcacgctctgtcgtggcgggcgtgccttcaaaatgcttaaggccggcatgattaacggtatttatctcaccgtattcgctgccgcagaattcgcaaacgggcttggcggtgcaggtggcttctccgcccttatgggcacaggcatatccgcactcttcgcacttgccgtctttccattcgtggttttcctcggcgaccgtaaccgtgccgcagcaatcccacttctgcgaatgagtcttttcgtcggtgctccaaaccttttcgccggtgtggttgtcggcgtttatttcgccgtactcggcaaggcaaacatcacaaacggcctttgccgtacaggttgcggttccgccgatatggctgttgcaaatgatggttccgtcgcggacaattgtgccgacaacattgatagttccgttattggtaaaggtttttccttcgggaacggtgagaacggttccctcggggatgtcaagggtcataccgttttccacggcgacatctccgggaatggcggcatttccgacaacctttccctcattgccgttaaagagaacgctgtttgcaattgaattgggggcgtcgtcaagagtttcgggacccgaagtctttatccaagagtcggaaacatttacgccgccgtttgcacagataccgtaatacccttcggcaccgtcaaaatccgcaatgcagccgttaacggttatggcgccgtttgcacaatataccgctgcgtcgcccgaagaggtaattttaagcttgctgttttcaaaagagatactgctttctgcataaacggccggataatatcccgaaatttcggcatttccgttcttaattataacattattggcataaattccgttggactttttgctgtcgacaatgagatttccgccgtctgtaataacgtcgacaaaggttgctatggcagagccgtaagcggtggcctttaaggttgcattgccttcaacggtaacattaccgtcgggaatcaaggccgacccgagataaccgccttcaaggctgtcacggccttccgcctcaagataggcgttgtcctgaagttttacttcgccggacacggtaattccgtcaaccgcccactgtgaaagctcggcgccctctccctgcagacaataaagcttggcattatccttcatggtcagcgaatgagtcacgccgtaggtctgaccaaccctgagagccggatagcttgtgttgctgacataggttacgtttgccgaaccgtcaagcaggcaggtgccgttccattggctgctgttgccggccgtgggaagctgatttaccacaatttcggtgtcggttatatgaagggcgcttaagttgcgctcgtcttttgactgggtagctccaaggtcattcgatgtgatttttccctttccgctgatcgtcaaatcaacggcatacactctgctcacgatattctcggtaccgtcgcaaacctccaaaacaagctttgcgcccgaggtgtttgttatcgtgataccgctgttgagagcggcgccgttaaggcgcagataaaaggttttgagggcattaaggtcgttgctgccccacatttgaatttttctgtcggtggtaccggtcagctcataaacaataccgtctttgcggatatttatagcattgtccataaccttgtaatcgtcgttttcggtgttttccataccgacgtcaatggtcacgtcggcgggagtggcggcgctgaacatctgcacaggcaccaaaaacagcaccatacaaagtaccgttacaagaccgagcaatttctttttcattttgtctcatcctccgttttgtttcatattttctctcaattccgaaaaaacggcaaaaattttgccgatttattcttcatatatggtacaaaatttcgtttccgaaaacaatagccatggcacaagcggtcattttttggcacaaacggtatgttaaaatgccgaaaaggaaaatcaaggtaattttattgtttgcgaggcaaaaatatcacttgaccttaatttacaaaagccgcgagacgttgtataattttaacacaaatatacttcagataggatgagggactttatgaagaaaattttatcggccgttcttgccgccgtcatgctcctttcgacgctttgctgcgtcaatgttgcggcggacgacgcaagcgaggatcttaccgagcgttttaacgatttgggaatgtatattctcttttacggcaccggcgacgacgtttcgaaattcaccgcagacgacatggtatattgggtagagcatcaatacccttataaagattatacaatcggcaattgggaaaacggagcttttgtcgaaaacagcgagggaatgtattattcctatcctgcggacaagtttaatgaaatcgctcacattctttttgactttgacggtgaattcaaaaatctcataggccgagagttcggggaagatacgaacgccgtttatgatgaaactttggacagaattgtcgttgacattgccggcaaaggcggagttctttacaggcagctcagctataacgaaaccggcgacaacgtatacgatgtttatttccaaggcggatattggggtgacaccgacataatttggcttgaagagtatatacatgttaccgccgaaatcgtcggagactatttaaaggtttatgcgtgcgaagatgccaatattcctgccgttaacgacgaggacaaggctctctgcgacagctttgacattctctacggatatataatcaactacgacgatctcgacaaggatatttccgccttcaccgccgacgacatgggatgaaaaactcctgcatttcagtacaaagaaaatccggcatt

SEQ ID NO: 3169 - DNA, 19294 bp, Unknown
  16S sequences of unknown bacteria
agccgcagccgtagaagtgcgcgataatgtcgggatcgatgtccttcaggacgtcgagcacgtatttgggaggagtcgaggcgcaatcgcacgcgttggtgcgcagcgattcgccgtcctcgagcgaatcgtagtagtcgctcaccatgcggcgaatctcttcatcggtcttgatcgtgcccattggtctcccttcgtgcgaaaaaagtcatccgccattgtacgcgcctcttagagcaatgcaggtaacagtatcgcgcaaatacaggaagcccgctacaaagcgggcttccgagaggttcctatgagggaaagattcgctaggcttgcgcctcttcctcggcttcttccgcggcgatgcgcgcctttgcctccttgccgccatggtgcgccttggcgcaggatgcgacggcaccggacagggcaaacagggcgatggcgttggggatgaccatgagctggttgaacatgtccgccagctcccagacgaggtcgttggagagcagcgagcccatgaagatgaagacgagcgcgatgacgaagaacggcatgacgcccttcttgccaaacaggtactcgacgttgatacgcgcgaacaggttccagccgataatcgtcgaaaacgcgaagaagagcaggcagatcgccacgaacgcgctgccgaagccctccccgaagaacgcaccgaacgctgcctgggccatgttcgttttgtcgagcccggcggcaacgcccgtggcatcgaccgtcatcgggccgtttccgcagtagagtacgctgatgacgacgagcgcggtcatggagacgacgacgatcgtgtcgatgaagacgccgatcatggcgacgacgccctgatcatgcgggtccttgacctttgccatcgcatgggcgtgcggcgtggagcccataccggcctcgttggagaacaggccgcgcttggcgccctggctcagcgccgcgatgatgccgaacgtcacgccgccgaccgacgcctgcgggttgaaggcgcaggtgaagatgagctcgaacgcagggatgatgttctgccagttcatgacgagcaccaccaggctgccgacgatgtagagcagtgccatgatcgggacgagcttctcggtgaccgcggcgatgcgcgtgacgccgccgatgaagatgaagccgccgatgagcacgacgacaaggcccatgatccaggtggggatgccgaaggccgtgttcatggtcgccgcgatggagttcgactggaccatcgagcccatgaagccgagtgccaagataatggccacagagaagaagcctgcgagaaacttgccgccggcacccttgaaggcagtgcggatgtagtagaccgggccgccgtggacacggccgtcctcatcgacgtgacgggtcttctgcgccatgaccgcctcggcgtagttggtggccatgccgaggatggcgatgagccacatccagaagatggcgcccggtccgccgatcaagatcgcaccgcacgcaccgacgatgttgcccgtgccgacctgcgcggcgactgccgtcgcaagcgcctggaacgagctgatgccgccgtggtgcttgccgccatgcagcgaaaagccgccgaaggcacggcgcatgccctcgccaaagcagcggaactgcacgccacgcgtgcggatggtgaagaacacgcccatcgagatgagcaagatgatcagcacatagttcgacagatacgagttgatggtctgaacgatggtgagaagcactgcttccatgaaataaataacctcctctagtctaataaaacaatccagagaaggtcacaaatgatgcacgttatgtacgcgtcggctctgtccgtttgcctgagagattcagcctggctatatgcccgaccttgcaccttcggcactcatttaagagattctccagaggcttctccccgcccggtttcttttcggattccgaacggatcaatgaagcaacacagcgggaattatgcacttcatgtatcgcccgcgcaataacttttcggaaatagtgccgcgcatggcacgaggggccgtgggtatcgtgccattttggttcggagggacaccccgacctgtccctccgtgtcatacaggcatggcgatttcgcctagcggcgcccctcgtctgccatgccgaagcactcggtgaaaaacacctgggcatccaggtcgtagcgctcgcacacctcgtcgagcgcgtcgtccatgagccgcgcgagcttgcgcgacgggcacacggcgcgcgcgttcacgatcacgctgaggttgcggtgcacggcctcggtcttgtgctcgtactcgatgtcgtagtcgacgccgatgagagatgccttcacgtagtcgtcgtcgcagatgccgtacagcttgaggtgcggaacattgcccttgcgctcgatcagcccgagcctgatctcctcgatgaaatcgtccacgacctcgttgtagtcgatttcgctgccatcgagcgtcttgaagtacaggcgacggttgtaccacgtgagcaccgcctctgcctgcgcatagtcgggccccgcgtaatcgatctcgacgtggcggcaggcggttccgttgtggatgaggaaatccgcgagctcggggatgcccgtcccctcccgcgcgctaatggcgagtacggggacgctgcagctctgtcgcagaaacgacaggtagcgctcgacttcttcgtcgctcagcgtgtcgatcttgttcaagacgacgacgtcgccttcctcgacctgctgctcaagcaggaacttgagctcctgcggcagattgatgtccgcctgctcgggcatgaccatccggagacgctcggggtcgacgatgacggcgagcgggccgagctcgaactcgtcggcgttgtcccgcaggatctgcttgtagacgtgctcgaccgtgccgacgccgcaccccgggatgtcgctcatgacgagctttgccccgtcccggtcgcgcatgcgcctgatcttgtctaccgtgttgtccatctggtagcagatgcacccagaggagatctcctcgaccgtgcacccgttctcgcgcgtcaggttggtatccacgagctgcgcgccgaggtcgttggcgatgatgccgaccttctcgacgtttttgtccatgtactcggcgagcgcgatcatcgtcgtcgtcttgcccgcgcccaaaaacccgctcaccacgagaaactcaatcttttccacgtcacgccccttcacgagctgtcatctcgagttgaattactatcggtctactatagcaccgtatctactattagaacgttacactcgtcgtcttgccgctatttcgagaacggcagatcgccgcgcttgaatcgggcgatcatctcgctcgtgaggctcacgccgtcttcttcctcggtgatctcgtccctcgaaacccatgcgccatagccgagctcgtcttcctgcagcgtgatggtggcatccccgtcgagctcgcagaagtacccgagcagcagattgctcgcgtagccccaaggctggcttctgtagtagcggatgttcttgacgcgcaggcccacctcttcgcgcacctcgcgctcgacggtctgctcggctgtctcgccgatctcgacgaaccccgcgacgagcgcgcgcttcgggctgtccgtgttccacgcatacttggtgagcaagatcttgtcgccgtccaccaccgcgacgatgaccgcgggcgcgatcttgggatagacgatgttgccgcagctcctgcactcgagcgcgcgctcggtgtgggaatacgccaacagctttccgcagcgcccacacctgacgttgtcccgataccactcatgcaggtgaaagcccgtgatggccgcaaacgcgcgtgcgcgctcggcggactcgcgcacgtctttcatgtgagcaaacccgtacccttccggctgcggcggcaggcgccggaacacgtctttttccggacgcgcgatgaaaaaacgctcgccatcgacagaaaacgcgtagacgcacgggcagtcggtgtcgagctcggcaaacgtcgggtagtccagcttcgcagcatccctctggcgcaccaggaccgaattgtgggggtcccccgccacgcggtcgcgatagaccagcacgcggtcatgtgctgcgggttttgcgaagacgatctggttatcgaacgagtgaggcgcgatgtcttgaatcatggcggctccaatgcttgggaattgtcgtttcgtccatgctacttcgttctcgcgcaggcggcagctcacttttcccacgtgtgccccgaggctgcacgctccgcacacgtgcctcatccaaattaaggcttgcgcatatattggatgttatcttatactaggcaatgtcaactcatattccgcactttcgcggctgttctccgcagcgcagttcagccgcaacgggttggggtatctcggctgggaggcggctggggtgccccgcttcggaacacggaccagcaagccgcctcctggcggctttttcatatccgtatgcagttcgacgcactcgatggcattcaagctgcgctccggacgcgtgtcgccctggcaacaatgtttcttcaattatctagaaggagtggcgtagtattatggcagtcaaaatcaacgaaaggaaatccttaatgtggtctgcctgccacccgaaatccgaagaagagctcaacgagtgctcgcagctcggcaagagcctgagccgactgacccagccctcgatcctcgcggcactcgcgcgcgctgacaagccgcagcatggctacctcatcattcaggagatgacaaaaagccccatgttcggcgggagctcccccgatccgacgggcgtctatcgcatcctcaagcagatggagaacaacgggctggtcacgagtgaatgggacacctcggaatccggccccgccaagcgctgctacagcctcaccgaagagggccgcgcgtgcctgcggcgctgggtcgacgcccttgcctgctacagcgccagcatccaggagctgcgcatgattgcctgcgactccctcggcatcgaggtccccgacctgcccgtatgcctccacgaccccgcagaggcactcgcgaaagacgaatagccccacggcgacgtgaattcgtccccaaaagccccgtgccagtacaggtgcggggctttttctatcccagacgctctatcccaggcgctctatctcagatgcgcacggggatgggtcgagagatattcctcgcgaatgtgcgcccggtcgacatgcgtgtagatctgcgtcgtggagatatcgctgtgcccgagcatctcctgcaagatgcgcaggtccgccccgccttcgagcagatgcgtcgcgaagctgtggcgcagcgtgtgcgggtgcagcccctcgagccccacgcgcttgccgtacgtttcgaccatcttgcagaccgcgcgcctggtcaggcgtccgccacgcgcgttgagaaacaccgctgccggctccttgggcgcgtcttgccccttggtgtgcaggtgcggccgcccctcgtcgaggtacttctcgagcgccgcccttgccgtgcccagcagcgggacgatgcgctccttgccgcccttgccgcgcacgcgcacgagcccctcatccagcagcaggctggaaaagtcgaggccgcacagttcgctcacgcgcagcccgcagccgtagaggacctcgaggatggcgttgtcgcgcagcccggtgggcgttgcgggaaacggctggtccagcagcgcggcaatctgctcgaccgtcaccgcctcgggcaggcgggcgggcttacgcgggagcggcacggacgaggcggggtccttctcggtcatgccctcgcgcacgcagaagcggtgaaaccccttgacggccgcgacgtggcgctcgacgctgctcgccgcgtacgcgcggcggcgcaggtcctcgaggtagtcggtgaccgtgtcacgctcgatgtcctcgagctgctcgcagccgtcggagcgcacgaacccgaggtagtcggcgaggtctctcccgtagttctcgacgctcgccttggacagtccccgctcgacggtcaggaacatgaggtactcgtcaaggcacgcggaaaagcccccgaggtcttcgcggggacgcgccttgacctcgcggctgctcaccgccctgccgcccgcagccccagcgcgacggcgagcctggcggtgttctcgaggtcctcgaccttgaggcactcgtctaccgagtggaagttcgtcatgcccgtcgagacgaccaaaggctccacgcccagctcgatgtacatgttcgcgtcggtgccgccggcggacttgacggtatcgggcgaaagcccgaccgaacgcgcggcgtcgtcgaacagcttgaccgccggcgcatctgcatccaggcagaacccggagtactcgagattccagtcgatgcggacgcgcgcccccacctgcgcggcggcgttgcgcatcgcctcgtccatgccgtcgtggacgcggtcgacgtcttctttctcgatggcgcggcactcgccggtcagcaagcaggagggcgcgacgacgttgttggccgagccgccccgtatcgtcccgatattcgacgcgcagtagtccccaacggccccgagcaggccgcgctcgcgcatgtccgcgatggcgacggaagccgcctcgatggcgctgatgcccttctcgggggcgacgccagcgtggcttgccttgcccatgaactccgcctcgaacgtgtagtggtacggcgccgcgaggcacgcgagtcccacgtctccctccccgtcaaagacgaagcacggctcgccctgctcgaaggtgccagccgagaggttcttcgcgccacagcacccgacctcttcttggatgctgaagatgaccttcaccgtcgcatggggctcatcgccctcgctcaaggtgtgcaccgcctcgatgatggaggcgacgccgaccttgtcgtccccgcccagaaccgtcgttccgtcagagcggatgacgccgtcttcgatgacgggggtgacacgctcgcatggctgcacgcagtcgaggtgcgccgtcatgatgacggacccggaagcggtgccggggagcacggcatacaggttgcccgtgtccgagccgatgcgctcgcccgcgtcgtcgatttcgaccgtgcacccgcacgcgcgcaatgcggcagcgcagtattcggccgccgccccctcgtgccctgacggggagctcgtggtgacaaggtcgagaaacgtgttgagtagacgttcgctgttcatgaaaatgcccctttctttcgcccaatcttcacgcagatgacgggcagaaagcaaggggcaatcagaatcgggagggtgctaggcctcgcgcctttcgatggcggccgcgaccaggccgttgaacagcggatgggggcgcgtcgggcgcgacttgaactcggggtgtccctggctcgcgatgaagaagggatggtcttcgagctcgatcatctcgacgaggcggtcgtcgggcgagacgccgctcacgacgaggccggcctcgatgagccgctgcctgaactggttgttgacctcgtagcgatggcgatggcgctcgtagatgaggggcgagccgtacaggcgctctgccagcgtgcccggcgcgaccttgcacgggtacgacccgagcctctgcgtgccgcccatgtccgcgacgtcgccctgttccggcatcaggtcgatgaccggatactcgaggtcgtctccaaactcgcccgaagaggcgcccggcatacccgccacgtcgcgtgcgtattcgcagacggccgcctgcaggcccaggcaaatgccgaggaacggcacgttgtgggtacgtgcgtagcgcacggcgcagatcttgccctcgaatgcgcgcacgccaaagccgcccggcacgaggatgccgtccatcttgccgagtatcgagtcgacgttttcgtcgttgaggttctcgccgtcgacgaggtgcacgttggtgtggtggcagttcgcgacgcccgcgtggtgcagcgcctcgatgacggagaggtaggcgtcgggcagcccgacgtacttgccgacgatcgcgatgtcgacgggcgcgtcgcacgtcgcctcctggtggaggtacttctcccaggtctccaggttggcctcgcgcacctcaagccccagacggcgcagcacgcgctcgtcgaagccctgctggtacaggctcatgggaacctggtagatgctcggggcatcgacgcaggcgaacacatggtcttcgtcgacgtcgcagaacatcgagatcttcgacttgatgcggtccgagatgtcgcggtcggagcggagcaccagaaaatcgggctggacgcccagcgactggagctccttgacggagtgctgggtcggcttggtcttcagctcgtgagctgccgagatgtacgggacgagcgtgcagtgcacgaacgcgacgttttccggaccgcactcgcggcgccactggcggaccgcctcgatgaacggctgcgactcgatgtcgccgacggtgccgcccacttccgtgatgacgatgtcggcagacgtctggtcggcgatgcgcttgatgcgctctttgatggcgttcgtgacgtgcgggatgacctgcaccgtgccacccaagaaatcgccgtggcgctcgcgggcgatgagcgcctggtagatggagccctgcgtgacgtttgactcgcgcgtgaggttctcgtcgatgaagcgctcgtaatgccccaggtcgaggtcggattcgagcccgtcgtccgtgacgaatacctcgccgtgctggaacggactcatcgtgcccgggtcgacgttgaggtaggggtccatcttctgcatggtcactttatagccacgcgatttgaggagggtgcccaacgatgccgccgtgatccccttgcccaaagacgagacgacgccaccggttacaaaaatatgctttgccatacagcatgctcctcacagccaagatcaatacaaaaaatatggccacgcagcaatgcataggccctgcctatcttagagtctcgggcaagcgcgaactgcctcgagcgaaaggcttaacaaaaacttaatgaaactgccgaagcgatgccgcacgtggatattgcataaaggcgtggcacgttgccgcatatgccagtactatgtctacccatgaacacttcaaagacttcgcaaacagacgagcagccctcgtcgagcgcacgctccatcgccaaatcgacgggaatgatgtccgcgctcatcctcgtctcccgcatcacgggcttcatccgcacctgggcgatggcgttcgccttgggcaacaccttcctcgccgcctcctactcgctggcaaacaacctgccgaacatgatctacgagcttgtcgcgggcggcgtgctctccacggcgtttctgcccatctacatgcagcagcgcaacgcgcattcgcgcgaggccgccaacgactacgtgagcaacctgctctccatcgcggtcgtgttcctagggctcgtctcgctggcggcgagcatcttcgccccgcaggtcatgatcacgcagagcctgttctcgtccgcgagcaacgacaccgtcgaagcggcggtctggttcttcaggttcttcgcgttccagatcatcttctacggcctgagcgcgatcttctccggcgtgctcaacgccgagcgcaggtacttctggccgtcggtgagctcggtgttcatgaacatcatcaccatcgtcacgttcttcggctacccgctcgtcaacggcatgggcacaggggcgggcatcacctggctcgccgtcgggacgacgctctcgatcgccgtcctcgcgctcgtccaggttcccgcgctcgtgaaaagcggttatcgcttccgcttcttcatcgacctgcacggcgagggcctgcgcgacaccgtcaagctcgcgctgcccgccatcgcgtgcacggcgatcaacctcgtgtcgctgagcttcatgaactcgaccgccctgcacgtcgccgacaacggcccctcatctgtcagctacgcatggatgtggtaccagttcccctacggcgttcttggcgtggcgctttccaccgccatgttcaccgagatgtccgatgcgatgtcgcgcggcgactacgaccgtttcaagcggcagctcaacttcgggttgcggacgacgtggctgctcatcatccccatggcggtcatggtgttcgtgtgcgcagcccagctcatcggcctgtactcggccggccgcttcacggcgcaggatatcgcccccatcgcgaacctgctgcgcggatgggccatcgcgttgccgctctacgctggctacatgttcttgtaccgtgcttattcctcgctcaaggacctgaagaccatcgcgctgtgcaacctgttcttgaccatcgtgcaggtgtttctctacatgctgctcaccggggtcatcacgctgccggggcttcccacactcgcgctggggctcatcggtatcccttgcggcgatatcgtgttctacgcgctcatgatggtgctgctgctgctcgtcttgcgccgcaggatcggcgggttcgagttcaagagcacgctcgtcgccacctgcaaggtgctcgtcgcgagcgttatcggaggcgccgccagcgccgccctcatcgccgcgctcgggctcgtgctcgacctgcagaccatcgggggcagcctcgtcgcgctcgtcgtcgccggcggcatcgggctcgcactcatcttcgcgctttgccgcatgctcgggattaccgaggtggcaaccatggcgcggcgcatcgccgagaaggtgcgccgccgctaggcgatgtcgatctcgctgcggtcgtcgcgcagctcgttgggcatcacgcggatgtcgccaaatcccatctcgcgaaacgccttcgcggtgcggtgcgggatcgtgatgtcggattggaactgcccgcagtactcgagcgcctgcacgagcgtcacgttgtggtacaggtcggcaatcgtgtccacatcgggcacatcgggcagatacagcgcaggaagccccaggcggctcgccttctggatgtaggccggcaggaccgtcagcccgtcttggttgtagtacacgccggtatggtcgaaggccgtcttcgcggtccagccgaccatgctgacgcccatctcctggtcgggggcgagcacgatgccgccgccctcccgctcgcacaggtcgtgcaggcgcccaaagccctcgacgatgatgctgcgccgcaaggcgggcatgtcgcaccccatgctcaagatcgtgtcgaaaccacgctcccagacctgctggaacgcgccgttgtagtgctcgtcgaagctcgcaccgtcatcgtggataaacgtgagctcgtgcggccaggtgccgctttgcgcgaacagctcgcgcatcttgcgctcgccttgttcgcccggcgaggagatgaagatgctgtactcgtcgttgacgggcatgtgctcgcaggtgccctcgtacgcgcggcgttcgaggtttgcgcgctcgaggtcgtcgacggcgtcacagcatgcctcgacaacgtcgaacagcatgcaatggtacaggcgggatgccgtttccgggtcgaagtagccgtctttgagcggcgtgaggcgcgtcttgaccttacccggctccggcactttcgaaaacagcagtatggcgtttcttctcgtatccatggcgcctattgtatctcaagcgccgaaaaaagaagaggagccggacctggggataagtccggctcctaaaaggagagaggtaagagggagatgctatgatttgccgtgcccatgtggagtcgcccgcatgggcacgcgacgcagcttactgaatctcgaggtgcgtcttcttgggaaggagttcttccttcttgggcatgtcgagcgtcagcacgccgttttcgaacttggcgctgatgtgatcgacatcgatggcggacacgtcgaagctgcggctgtacgtaccgtacgaacgctcgcaacgtacgtagttgccctgcttgtccttgtcctcgtagtcggaatggcgctccgccttgatggtcaggatgtcattgtcgacgtcgaggttgatgtcgtctttgttgaatccgggcaggtcggcctccaggacgaacttgccgtcatcctccttgatgtcggtcttgaaaatggcagcgggcccagcgacgttgaagggcgtgaacggctccctgaacatgcgcttctcaaattcatcgattgcgcggaacgggttgtagccagtgatttctctactcatgatttcggtcctttccaatcgagtggttacttcggtgtgagtcatatctaagtcttactgactcatatctttttacatcgattatagtaggatactttatattgcatgtgggcatcgtctaaatgtcattttggtgacattggagacggcaccgttacgcaaactcagaggacgcgccccgccagcgggcgcgtgcgagtacactggcaaataacagctaggcacgaataaggaggcagccatgcagatgcagaatcgcggaacgttgttcggaggcgggatcgtgatggtcgtgctgggaatcatcttcctggcgtttccgggcttcaccatgtcgtttttcacggtgctcgccggcattgggtttctggcagggggcatcagcgcaatcgtcgcgtggtggggcacgcgtgaattcggcggaggcggcggtgttctgttcttcgggatactgagcatcatcttcgcgctcgtgtgcttcgtgcatcccctggcgcttgccacgacgctcacctggcttgttgcgctgtgcgtgctcatcgcgggcatcgcgcaaatcgcctcgctcatcgccatgggggactttcccatgcgcgccgcggcaatcgcaagcacggccatcatggcgctgtttggcctcttcgccctcatctggccgccgatggtcgtccagttcgtgggcatctcgctcattatcgagggcgtcacggcattcgtgctcggccttacctcgaagcagagcttctagaacgtcgcctcaacgtcctgccctatgcgggaagcgtggcacagccacgcttcccgcgtttttttgcatgagatatgtggcagtgccagaatttttgcgcgagctgcatcggatgtgtggcagtgccacgcatctcgcgcggagagcgcgtagtgccgtcacacgacggcgacgatatggcggtgctttcccgccaggtcgtcaataatgcggacgtcatgcagccctgcatcgacaagtcgcctctgcgcctcttcgaggcaggtctcgtgaagctcgcaggcaaacagtccgccctcgcgcacgagcacaagcccttcgttgacgagcctgtcgaagaattccagaccgtcggctcccccatccagcgcaagatgcggctcgaaaccggagacctcgtggggcagcgtctccatcactgccgtcgggatgtagggagggttgctgatcagcaggtcgaacgtcccttccacgccctcgacgcaatccgccttcctgatctccacgaggtcatcgaggccaagcgcagacacgttccgcgtcgcgcaggcaacggcatcatcggaaatgtccgtggcaagcacttccatgcccgcttccttggcaagcgagcatgcgatgcacccggtgcccgtgccgacctcgagcgcccgtaccgtctgttgcgcgccctcgaagtaatcgagcgcagcctggacgagcagttcggtctcgggacgcggaatcagcacgcctgacgccgtccgcacgacgatatgccgaaacccgctctcgcccgtgatgtactgcaggggctcgctctgcccgcgtcgtttgaggctttcacgcagaacgtcccgctcttccatgctcagcggcttgtcgaagttcacgtacaggttcaggcgggacagccccgtcgccgcggacagcagccactcggcgctcaggcgcgggttctcgtcgccgtgcttttccagatagccccgacaccactccaacgtgcgctggatcgtccattgttcgggcattattcggcttccgaagtagcccgctccaggcgctccgcacggtctgcggcagcaaggttctcgatgaggtcggcgagtccgtcgccttccagaacgcccgtgtaggtgccgttgtagccgatgcggtgatccgtcacgcggtcttgtggagcattgtaggtgcgaatcttctcagaacggtttccgccgccaatctggctgcggcgctctgctccgactgcctcttgctgctcttggagcatcttgtcgtacagacgggcacgcagcacctgcatggccgcctcgcggttctggatctgggatttctggtcttgcgactggacgacgagccccgtggggagatgcgtgatgcgcactgcggaatccgttgtgttgacgcactggccgcctgggccaccggcgcggtagacatcgatacgcaggtcttcctgcttgatgtcaatctccacatcatccgcttcgggcagaaccgcgaccgtcgccgtcgaggtctggatgcgcccttggctctcggtcttggggacgcgctggacgcggtgcacgcccgactcgtacttcatggagctgtagaccttgtcccccagcaccttgaactcgatcttcgagtaaccgccctggtcagaaggcgatgcatcgatgacctcgaccttccagttccgcgactccgcataacgcgagtacatcttgaacaggtcgccggcaaagatggcggcctcgtcgccacccgcagcgctgcggatctcgacgatgatgtccttctcgtcgttggggtctgccggaagcagcatgaacttgatgtcatcttccagcggaggaatcttctgctcgagctcggcgacctcttcctgcgcaagttccttcagatcggggtcgctctcggctctgatttcctcttttgccgattcgagctggtcgcacagcgagatgtacttgcgcgccgcctcgacgagctcgctttgacgagagtgctcctttgcaaggcgggtgtactccttctggtccgcgagcaccgacggatccgcgagcttctgctcgagtccctcgtatgcttcgatgattttcttcagcttttcgtacatggctcttctttcgtgtatgtctcgaacatccggtcattttcttcgcgcgagcgtgccttcacctctttcgcgaacaagaagtgaccagctatggctcgcgtccatacagcaggtatttcaatgcggctcctagttgaacttgaacagcttctgggcaagatggtatcccgatacgagcattttgtcgcccgccttcccgggaagatgtgccccgatgcccatgatgccgtggcgaatcttgcggtacgtcgcctcgtcgtgcgccttcaggtactcccaaatgccctgacggagctcctctttgtccggccggtcgctcagcatgctgaaaatcgtgcagatgatcatcatcatggaaaggtagttggtcatgtactgacgcagcttgaggctcggcacgtcttcctcgagccggaacgcgtcgatcatcacgcgcgtgatcttgagctgctgatcgatgcgcccgatcatcaccgactcgttgacgctttggtcgtcgcggccgatgaagtaacggtacaggtcaacgtccaggtaatagatgcgcttgcacgaggggagcgggacgtacacgaagatattgtccacatagaaggtatggcgcggcagctcgagcccgcagtctctcagcatctgcgtacggtagacaaccgagtgcatcaagataaccttcgacaaggggaaatggccgcactcctcccagcgaaacaccttgtgctgcgggaggatgccgtgatagttcatgacctgctgggttttgtccacggtatgctcgtagacgtagttgacgaccatcagatcgatgggatgcgcttcgaactccctgagctgcgcgagcagcttgacgttggcgtcgttatcgacccagtcgtcactgtccaccaccttgaagtacaggccggaagcattctcgagccccttcatgactgccgcgccatgtccgccgttctcctggtgcaccgccttgatgatctcagggtgacggcgttcccactcctgcgccttctcgagcgtgttgtccttcgtcgaaccgtcgtcgacgatgacaatctcgatatcggatgcaccgcaggcgagaatcgactcgatgcagtggtccatgtactctgccgagttatagcagggaatcgtatatgtgatgagtttgtcagccaccaagctgccttcctcgttgcttcgtaatgtcactcgcgcaatgatacgagtaaggtgggggcatttccagcccgccccggctcctgcgcgaaactgctgccgttccgtcaacaggcagtcgtgaagggccgctaccgcagcgcctttcttgcttgagactgaacgcaggtgatggcaaccgtcccgacgatgtcttcgaccgagcagccacgcgacaagtcatttaccggcttggccatgccttgcatgaccggcccgtacgcctgcgccttggcaaggcgctggacaagcttgtagccgatgttacctgcatcgatgttagggaagatgaggacgttcgccttgccggcaacgggcgactcgggagccttgagcgaaccgacggacgcgacaatcgcggcatccgcctgaagctcgccgtcaacctggagatcaggggccttctccttcgcaatctgcgtagcctcatgcaccttgtcgacgctttcgcctttgccagacccataggaggaatacgacagcagcgccacgcgcgcagtaccaccgcagagcctttcaaaggtatgggccgaggcaatggcgatctcactcagctcatctgcagttggatacatgttgagcgcgcagtctcccatgacgaaaagcccgccgtcgccgtactcgcaatcgggcacgtccatgacgaaagacgaggagacgagcttggtgccaggagcggtgcgcagaatctgaagagcaggccgaagcgtgtcggccgtgctgtggcaggcaccggagaccatgccatcggcatcgccgagatagaccatcatgacgccaaagtaactgacgtcgagcatctgctcgcgcgcctgctccaaagtcacgccctttttggcgcggagctcggcgaacttctccgcataagcctcgaacttgtcgctcgtcgcagggtcgatgatcgttgcaccatcaagaccaaccccatgggtccgcatatcgctttctgagcccaaaataatgacgtctgcgataccttggtcgataatctctcgagccgccttaagcgtgcgaatgtcgcttccctcaggcagaactatcgtctgcctgtcagccttggccttctcgatagtcttagtcagaaaatcactcatgaagcaccctgccctcgccgtagatatgtagtcgaattctaccgcaacagactgcagagccttcctgcgcacccttgaggccagcgcgagcatcgataaacggcagaagccagaaggctatacgaatacacaaaaggccgcatgaaaatcatgcggccaaatgaagggaatcaatagctggaactagagcaaacgacttactgggctgacatcgtgctttcctcgatgatattgccgttctcgtcgactttggtgacatggatgttgttctcgaacgtatccatctcgccagtcatcggatcggtaataacggtcttgttcatatcgggcaatacacgctcgacgcccggaacatgctcggtcaagacgcgctcgataccctgggacaaggtaagcgcggaaagcgggcagtcgacgcaggccccgcgcaacgcaacatagacgatgcccttttcatcatcgacttccgtcacgtcaacgtctccgccatcggcctgaatctgcggcctaatgcggctgataacgtaatcgagcattcctctatctatcatttcaggctcccaactagccagcactttaatcaacgaaatgcagactaccacttagaaaacagccatgaaaccacagcaaagcaacaggaagacaaccaaaaagggatatgaacaagttcagttaaaaggaaatatcggcgggccccgaaagacgtcggggcccccggaaggcccagctgcgtcctgccctcccacggactgcaccgcagtactctcggcgatggggcgcttaacttccgggttcggaatgggaccgggtgtggccgcccctctctggcagctgggccctccgggggcccctctcggcgagccaccctggaggtcgcatagcgcgcagaccgtgccttccatctcgtctcccgcgacccgccccggaaaggggcattgcgagaagagctcggccgattagtaccgctcgcctgagcgcctcgcggcgcttgcagctgcggcctatcaacctcgtggtctacgaggggccttaccgaaaggaggactaatctcggagccggcttcccgcttagatgccttcagcggttatccgatccggacgtagctaaccggcggtgccgttggccgacaaccggtgcaccagaggtccgtccatcccggtcctctcgtactagggacagatctcctcagttctcctgcgcccacggaggatagggaccgaactgtctcacgacgttctgaacccagctcgcgtaccgctttaatgggcgaacagcccaacccttgggacctgctccagccccaggatgcgatgagccgacatcgaggtgccaaaccttgccgtcgatgtggactcttgggcaagatcagcctgttatccccggagtaccttttatccgttgagcgacggccattccactctgggccgccggatcactagagccgactttcgtccctgcccgacttgtcagtctcgcagtcaagcccgcttgcgctcttgcactctgaagcctggttgccgaccaggccgagcggaccttgcgcgcgcctccgttactctttgggaggcgaccgccccagtcaaactgcccacctgacacggtccccgcgccggatgacggccgcgggttagatcgccagtccgacgagggtggtattccaagggcggctccgccggggctggcgccccggcttcgatgcctcccacctatcctctacacgacgaaccggcgagcaatgtcaagctgcagtaaaggttcacggggtctttccgtccttccgtgggtaattcgcatcttcacgaatagtacaatttcaccgggtctatggttgagacagcgtccaagtcgttacgccattcgtgcaggtcggaacttacccgacaaggaatttcgct

SEQ ID NO: 3170 - DNA, 7842 bp, Unknown
  16S sequences of unknown bacteria
tgcgaggacatgtgcctcgcaaacacaccttataggcgaaaaccggcggaaacacccgtgtttccgccggttttcaagagcaggggtgggactggcggggacagagggagtaaggctcgtattaacgagccgccgcgatccggcgtccccgcccagcagcttgtcgacaacgtcgacaagctgaaacagcggccgaaaaggccgctgtttttgcgcaacgctccggcggggcgaaatagggacaaccagggtcttgacagacagagggagcccgtgtatactataaatcatactaaacctatatgaatatatggaggcgttgatgatgtcccgtgtgtataccaaaatgaccgatttgatcggccgcacccccctgctggagttgacccgcgtggaagaggccgaggagctcaaagcgtccctgctggtcaagctggagagctttaacccggcgggtagcgccaaggatcggattgccaaggccatgattgaggacgcggaggcccggggcctgctgggaccgggctcggttatcatcgagcccacaagcggtaataccggcatcggcctggccgccgtggcagcctccaagggctaccgggtgattcttaccatgccggagaccatgagcgtcgagcgccgcaacctgctgcgcgcctacggggcggagctggtgctgaccgagggggccaaggggatgcccggcgccatcgccaaggcggaggagctggccgccgaaacacctggctccttcctgccgggccagtttgtcaatcccgccaatcccgcagtgcataaggcgaccaccggcccggaaatttgggaggataccgacggccgggtggatatctttgtcgccggtgtgggcaccggcggcaccatcagcggcgtgggcgctttcctaaaggagaagaatccggctgtccgcgtggtggcggtggagcctgccgcttcccccgtcctgtccggcggcgcggccggcccgcataagattcagggcatcggggcgggctttgtgcccgataccctggacacgggaatttacgacgaagtcctgaccatcgggaacgaggaggccttcgccgccgcccgccgggtggcccacctggaaggcgtgctcgcggggatttcctccggcgcggcggtggccgccgccattcagctggctcgccggccggagaacgaggggaaaaccatcgtcgccctcctgcccgacaccggggagcggtacctatccatgccggtgttcttcgactgagccaccgtgacaaaaagcccggcagaattttctgccggacttttttacgtccatttataggctctcatacatggcggccagcctcttggccgcgtccgccaactgccgaatgccctcgaaaaccgtctcgctggtataattgcgcaggaactgatcggcttccagcgtaaaatacccggcatagccgatggccttcagtgcccgaaccaccccgtcaaaatcgattttcatggaaaacggtatttgatgcgcgtcgtgccattgatcgttgtcgtggatatgcagcgcctgcagcttatcgcccaaagcctgaatcatctggacggccgacgtatcggatcccttcatttcggcatgaccgatatcgaggcacgcgacgaaggcatcgtcgttcacggcctgcaaatgcgcgcaaaagctctccggcgtggcgcaggcggcgaaagaagaacagtctctttccgcgtcccagttccacatgttttcggtggcgattttgacgccgcaccctttcgcaaagggcagcagctccctgtacatgtccgcgttttcctcgggcgattgatcgttatccggatggatgatacagatttgtccccccgcctccgcggtgcactcgatggcccgctgaaaataggagcggatttcccggcagctgcttgggaagggcgcgtgcgactgattgcacacgatgccgttgtcctctcccacccgcctcagctttctggcgaaggatagatagccgccgcccgccagcgggtgatcgcttttcagagccgtcttggtcccccaatcgtagccgcacatttcgaacatggaaaagtcccaggcgtcaaagccggccttcgcgatgtattcgacggccctttcttcgcctacatgacgagcggcggaaccgatttccgtagaaattttcatccactatcacctcacaaaaattatagcccaaatctttataaatgacaagcggcaatccgtatggacacgggggagcggccaaagagaaaaaacggtgcgaaaaaatgcgaaatcgtataggaaaagtgcgccgcccggttgattaaagtgggaaaaagaggtataatattttagttatcgtgcttttgagtggaggaaagaacttggctatcaatccggaagagacggcggcccccgcgggcacgcccttggaaagggaaatccggcggcggcgcaccttcgccatcatttcccaccccgacgcgggcaaaaccaccctgactgaaaaactgctgctctacggcggggccatccagaccgccggcatggtcaaaggcaaaaaatccatgaagcacgcggtttccgactggatggaaatcgagaagcagcgcggtatttcggtgacttcttcggtgatgcagttcaattacagggacttctgcatcaacatcctggacaccccgggacaccaggatttctcggaggacacctaccgcaccctgatggcggcggattcggccgtcatggtcatcgacgcctccaagggcgtcgagaggcagactatcaagctgttcaaggtctgcctgctgcgggacatcccgatcttcaccttcatcaacaagatggatcgcgaggctcgcagccccttcgatttgctggacgagatcgagacggtgctgggcatcaagacctatcccatgaactggcccatcggctcgggcaaggagttcaagggggtgtttgaccgccagcgcagccggatcatcgccttcacggcgaacaacggccagcatgaggtggacgccaccgaggtggatctggccgatgagagcctcaaagggatgctcggagaaaggctgtaccagaatctggccgacgacgtggagctgctcgacggcgcgggatatgacttcgacatggacgcggtgcgccacgggcggctgtctccggtgtttttcggctcggccctgaccaattttggggtggagccgttcctgcaggagtttttgcgcatgacctccccgcctctgccccgccattccagcgggggagaggtggatcccttctccccggcgttttccgcctttgtgtttaagatccaggccaacatgaacaaggcccaccgggaccgggtggctttcatgcgcatttgctccggccggttcgacaaaaacgccgacgtgctgcatgtccagggcgggcggaaaatgaagctctcccagccccagcagctgatggcccaggatcgggaaatcatcgaggaggcttatgcgggggacatcatcggcgtgttcgatcccggcgttttctccatcggcgataccctgtgcgcgcccggcaaggcctttaccttcgaggggatccccaccttcgccccggagcatttcagcttggtgcggcaggtggacaccatgaagcgcaagcagtttatcaagggcaccacccagatcgcccaggagggcgccatccaaatcttccaggagattggcggcggcatggaggaggtcatcgtgggggtggtgggcacgctccagttcgacgtgctggaataccggctgaaaaatgagtacaatgtggatatccgcatggagggcctgccctatcagtatatccgctggatcgagaacgaggatttggatcccaagaccctcaacctcacctccgacaccaagcgaatccaggacgtccgtggccggtatctgctgttgttcaccaacagctggaacatcaactgggccgaggagcataacccggatctcgtcctgtccgagtttggacggaattaagcggaacgctgccgaaccttcggaagggaaagagggaaatggagtgacggaaggttacccggtttctctaaagcgattgcttgcggggatatcgacgcaaaggaggcgccccgccgatggtatttaggagcgaggatgccaaccaacccataagataaatacggcaagcccgcagattccatttcatgaatctgcgggcttgcttttttctcaaagactgtatgaccatttgcatggcgtttgtctctttttttatccttccggcggcaagcgcttgcatttgcgcggaggtctggtatactgataaagactttaccgctggattttccggccttgtatccggtattgcgcgggcagcatcagccgggtaggcagcagcttgcctaacaggtggagcagcttggcccccgcgccggggaggatgacggttttcccccgcgccaggccccgcaaagcgatgcgggcgcagcgggtcggggacatgccacgccggacggctgtcgcccccgccgcccggtcgaagccggtggccagcggtcccgggcagagcacggccagacgcaccgggcggccttcccgtttgagttcatagcccaccgcccggctccattggagaaggaacgccttagacgccgcgtaggaggccatgcccggctcgggctgaaaacccgccaggctggcgacgttgaggatgcagccccgctccatagaggcggcgaaggccttggtcagccggcagggggccagcatattggctgtcagcagcgcctcctcggcctcccacgggatgtctgaggaggcgccgatttgcccggcgcccgcgttgttaattaccagcccgaccggcagatcggcgcaggcccgtagcagggcgccgacctcctccggccgggataaatcggcgggacacacctggactgccactccgtgggccgcccgcagggcggcggccagggcttccagatgcccggcccgacgggcggtcagcagcagatcccagcccttggccgccagctgcccggccagttcccggccgagcccgccggacgcgccggttatcactgccaccatagccccatccccttcctttcctttcctatttaggtatagtatatcggatttcaacacgccctgcaaccgaaaggagacgccgcatgaatattcagatcttcggaaagcccaagtgcttcgatactaaaaaggcggagcggtatttcaaagagcggggcatccggttccagcgcattgacctggataaatccggcatcagcaagggggaactggccagcgtgaaggccgccgtcggcgggctggacgcgctggtggacgataggcatcccgacgcggcgctgctgcggtacctggcctatgaggaggacaaggaacagaagctgctggacaatccccggctgctgcgcacccccatcgtccgcaacggcaggctggccacggtgggtttttgtccggaaatttggaagggctggacgtaaccattgtgaaaaagttgatacttttataatccctctgaacagtttccgcacaatggcttgcgaaactatcaaatatgctatactgagcaggaaggggattggaaagagacgttcgccggccgcacggggggccggcgctccgctgcgcggggacacgcctctttccagtcgatcgcagctgcctacgggcgacagaatgggaggatagccaagaaagcaaaccagaaaagggattggaaagagccgttcgccggccgcacggggggccggcgccccgctgcgcggggacacgcctctttccagtcgaccgtagctgcctacgggcgacagaatgggaggaagtattatgcaatttcaaattggaattatcgccgactggctgggcttgcctctggacaaggcgctggccaaatgcgccgcgctgggggccgatggcgtacagctgtacgctgtcggcggggaaatggcgccggaaaacatgacgcccgcttccctgcaagagaaacgggcgctgctgaaggacaacgggctgacggtgtcggcgctgtgcggcgatctgggcggacacggcttcgcccgggcggcggagaatccagccaaaatcgagaaatccaagcggattgtggatttggccctggagctgggctccaaggtggtgaccacccacatcggcgtggtgccggcggacacggccagcgacacctatcaggtgatgcaggcggcctgcaacgagctggcggagtacgcccatgaaaacggggcgtttttcgccattgaaacggggccagaaccggccgaacgactgaaaaccttcctggacggcctgccctcgaagggggtggcggtcaacctggatcccgccaatctggtgatggtgaccggggacgacccggtgcaggcggtatataccttgaaggactacattgtccacacgcacgccaaggacgggcggatgcttcggaaaaccgacccgcgtgtcatctacgacttttttgccgagggcggcatcggggatcttcggctggacgagtactttaaagaaatgccgctgggacagggcggcgtggatttcgacggctacatgaaggcgctggaggatatcggctacaccggctttctcaccatcgaacgggaagtgggggagaacccggcggcggacatcgctttggctgtggaattcctgaacagatatcgataaaggcaagagggatcgaatcatgaacaagcggtacggcgtggtgctcatcggctgcggccacatcgggcaggagcacatagaggacatctatttccgggacaacatacgggtggtggcgacggtggacacccgcgaggagcaggcgcgcctgttcgcccgccggtacggggccgaccattacgggacggattatcgcccctttctgcggctgcctgaaacggacatcgtcatcatcgccacctatgtcaacacccatctgtccattctccgggactgcctggaggcgggcaagcatgtcctgtgcgaaaagcccattgccggtaccctggaggagggggaggccttttaccgtctggttaagggcgcctcgagccaggtgctggtggcccatatcctgcggcacaaccgtacctatcaaaccgcggcccgcctgatcggggagggggctgtcggccggctgtccctgatgcggatggtacaaaatcatcacgccatggactggccccggtataagcggctgatggccgactgcccgcctatcgtggactgcggcgtccattatatcgacgtcatgcagtggttcagcggctcccgggtggtggaggtcagcggcgtgggctgccgcctggacgcggacagcgggcaggataactacggcatgatccaggcccggctggccaacggctgcatcgccagctatgaggcgggttggagccggaacctggcggcccaaaacctgaaggaattcattggggacaagggccggctgaccatcacgctgcgggacaaccggataaccgacaaggaggagggcgactgcattaccctctataccagcgacaccggggaataccgcaccatcaacgtggccgccaaatacaaggacatgtacgcccagctgtcggcgcttatcggcatgatagagggcaaggcttccgcctcgccctctatcgacgaggtttacagcgccttcgttatcgccatgacggccaaaaaggccatcgagacccgcaccgtccagtttgttcccgctctcatcgagggaaagcgggaaaagggcgcgtcctaatgaaaaggcgccggattgctccggcgcctcagcgtgtcgacaaagtcgacacgctgctggacggggatgccggatcgcggcgg

SEQ ID NO: 3171 - DNA, 22003 bp, Unknown
  16S sequences of unknown bacteria
gggcatctcatacgtctcgtcctcccacgcatagggtccgtcgtgcgtctttatgccgttgtcggtccacctcgaaaggagcccggagttgtccgtgtaccagcaagccgtgtgcgaaaacagctgactgtcaccgttccaataattcttctcccttgtcgggcagtcggtcgggccgttcgagatattgttgagccacgagcggcgggccgccgtgaaaatgcggcttatatccccgtccggagtgtcgatctcacccgtcagcctgaggtcgttgtacagctcgaacgccgtcagcgactttatctgctccggtgaatcaagcccctcgacccatatatacctgaacccggtgtaggcgaagcggcactcatatctctcctccggcgcgcctttcgcggtgtagacgtcggtgttgcgcataaagccttcgctccgtccgcccttgccgcagtcgttctggtagtacacgcagacgtaagcgccgttctccggctcgccgtcgtctctcagacgctcgcagtatctcaggcgcactttctgtccgggtcggagatttctgaacgtcgcctccgcgcgcccggcaatgctcacacctgtgtcatagatcggtgaaccgtcacttaacagtctgtacttggtcagaacgtgatccttcatccgtttcaccggcggatagctctgaagcaggaactcttcccctccggcgtctctcgcggaaacgggggaggtcagcgacagatcgagactgtcgaggcaccagtcgtcaacttcaagccgcgcgtcgtatctctcgccgtactgaatgtcgttctcggtcagcggcgaaggcagacagcgccagctctcgtcggtcactatccgctcgcttgtcccgtcggcatatgatatatcgacagacgccatgtattccggcactttcgcgccgaggtttccccatgagtggcagttgtacgagccgttgccgagaaccgcgccgatgacgtttgttccgcgcttcacaagcggcgttatgtcgtactcctgatattccttaacgtagttcatgcagaacggctcgaaacgcgcgtcggacacacgtgcgccgttcatgtacggctcatagcacccgagcgccgtcgccctcagcttcacgctgaggatatcttttttcacctcaaagcggcggatgaagcagaacgagcgcctgagcgcaacggggtgcatatccgtcaccctgagatcgctgacactccgcccctttgtttctgtctcgaagccctccggctccttagtctcccagaagttcacaagtccgacctgcttatagctgctgccggtcgggaagtcctcgctcgtaccatcctcgtatataagtcttatcccgccggtcagcgcggcgctgaactcgtcataggacgagctctgatagccgcggatatgcaggttgttctccccgtcccgcaggaacctcgtcacgtcggtgagttcaaggtgtctcgtgtcggtgacgatattctcaccgttcagccagacgtcgaacaggttgtcgcaccggaaagccatctcggcacgtctcaccttcttctcaggcgtgaagagcctgaacgcgtggaacctgacgctcccgtacggccagatgaacttcgcgtccgggaagttctcctccttcggtcggtcaaacaccgcgagcgcgtccctcgccggggatatccacttcgccccgtccgccggggtcaggtatgtcttcgtatactgcttcatgatgtcacctgttaaaatcaattattttccgagcaccttaatctccgtgccggaagtatagcccatatccttcaagctctctgagacatagataaccttcacgctgtcctcggtgatgatcttcttcccgtcaacacggcagttcagcgcggtcgggacgccgttcacgtcgaccaccgcagcggtcttcacccacgtgtcataagccctcgcccaagcgtagcgggagagcgaatagtccggtgtttccggataatcgtgaaccacgtggtactgcttaagcccttcaagcttcggccatgtcataaggctcctgcgtatcccgtcgacccctccgccgcagatgtagtccgggatatagcaggaatacgagtcgccgttctcctttatcttcgcgaagttcgtaataaagccgttccacgagtcgaccatagccgcggcgtccccggtccggacggcgtaccagtaaagcgcctccgcgcgccatatcgtccacgcgtgtcctccgcagatgttcggtccggtggcgtcgccctcccagatcgtctcccaccagcgaagggacgagccgtagattctcgcgtccggcgagtacatcttccacgcgccgtgtatgtcgagtatcttctttccgaactcgatgtattccggcttgtactcgagatgcgccgccacgtagagcacagtaagcgcggtgcaggatatcgatccgtcctccatctcgacccgctcggtgcggcagccctcggtcgggaaatcaaacccgcgcgcgacgacgtggtcagccatagcgatcgccgcttttctgtatttctcgtactttttctcgtccttccccttgaactcgagcgccatgtcgaccaccggaatcacaaggcaggtgacggtagtgtactcctcgtcgcccttcatgacggctccgtccggggtcatccagttgtcgatgagctcatcgagcgcctttgaggcgaggtcaaggtactcgtcgacatggaaaagtctgtaggaatcaagcagtatcgacacgccgaaatactgctcctgaattcgattggaatcgaaaatgtgatacggagcgtagccgttctgcgcttccggagagatagtccggcggactacgtaggttttcttctcaccggttatcgtcctcagatcgtcgaggacagcggcggtgagccttccgttctcgtgagttttcaggtatcgcgcgagcgcccatgtccagcagccgccttcacagaggttcgtgtcgccgtgatatatttccgacgtgctctccgagtttttcgtccagcagccatccatgctgacgccgttccagacgatcgcggggatgccgcgctctccgttcttcacgggcgtgacggtcgcaaagccgtacgcgttcagctttaccggaacaatattcctgtcggtctttatgacgctcgtactgccgtcgctctcagtcacttcaagcgaatcgacaccgccggacaccttcacatacgtatctccgccgaaagtgccggaaacgaccggaaccgcgaaggattttccgaaaatcccgccgatcttcgcgtaggctttctcaacattctcagccggcgtgagcacaaccgacaccgactttctcccgctcccgccgtagctgtcgtcaaaggacgcgaggaacgagaagctgttgatgaagtgccccagcgcctccggagagtactgtatcttccatccgtcgcacacggtgaccgccgccgcgacaaggcatctcccgtccggtctcgtgaatatgcagtacatgactttcccgtccggcgacgtgtaaggcgaggtcggcagaacctgacgctcgaacggcgtgtcggtcagcttcgacatcatattgaggtcaagcataacgccgaactccgaaacattgtcgttgtcgaccgaaagatctatcctgagacccatatcgtcaagagttatattgctcttcagcccgtcgagcttctcgtcagccgagttgtgctcgttgtacggcgtgcagaccggtttgttctttcttatgtcttcgcccttcagcgtccagacggcggcaccggtctttccgcgcttgtcggcgtagttcgcggtgtgaggatcgtttctgtcgattatgtagtgaatgattccgtcatccgcgacgacggtcatgctttcactttcgtaaatgttcattaatgttctcctgataaattattgctgttctgatagcttgcagacgtccacccactccgggtatcccgagtacttctcaagctcggggatggtcagcccgatcgcgctgttatcgctcccgcacgccgggaagacctcgtcaaagcgcttcagcgacacatcgaggcatatcttcaccccgtcgttcaccgcaaacgggcagacgcccccgggcgcgtgtccgatcagctccgacgtctcctccggcgtcagcatcttcgccttcgcgtggaagagagcccggtacttcgcgttgtctatcttcgcgtccccggcggtgacgacgaggatcggcgtctcgccgacgataagcgccagcgtcttcgcgatgcggcatggctcgcagccgagcgctttagcggcgagcgcgacagtggcgctcgactcgtcgagctcgcggatacgtgaatcaattccctgagccttgaaatacgctcttactctttcgattgacattttcttttctttacttctttctttaattttaatgtttgcgctgaatattcggcggcataaaaagcaaaacagggaccccggcaatggagtcccctattactcttagtagttgtcgcgcttattcttctgaagtatcccgatgatctcactgaaatcgtcgtccgagataagctcgttcgctttcttcttttcgggttcttccgccttcggagcttcttcggtctttgcctcttcggcggagccagcggcttccttcgccgccttgattgcctcaccggcggacttgaagccggtcacggtgttctgcatcgacttcggcgcgttgtcaaagccggtcgcgatgaccgtcacgtgcatctcgtcttccatgttctcgtcgagagccgcgccccagatgatgttcgcgtccggatgcgcctcttcctttaccatgctcgacgcgatatcgacctcctcgagtccgatatccggcgaagccgtgatgttgatgatgattccgcgcgcgccagcgatcgaagtctcgagcagagggctcgagatagccgccttagccgcgagctcagccttgtccttaccggaagcctcaccgacgcccatgtgcgcgtagcccgcgttgagcatgacgctcgacacgtccgcgaagtcaagattgacaatgcccggaacgttgataagatcggaaatcgactgaacgccgtgtctcagcacgtcgtccgcctcggtgaacgcgttcagaagagtgattctcgtgtccgagacctctttgagtctctcgttcggtatgatgacgagcgagtcaacagaatcaatcagcttcttgattccctcctcggcctgcatcatacgtctcttgccctcaaacgcgaagggcttcgtcacgacgccgatggtaaggatacccatatccttagccgccttagcgaccataggagccgcgccggtaccggtgccgccgcccattccggcggtgatgaacaccatgtccgcgccctccatcgctttctttatctcgtcgatgctctcctcagcggcggcggcgccgacctcggggttggagcccgctccgtgtcccttcgtgcgcttttcgccgattgctatcttgtttgtcgccttggagttgacaagcgcctgcttgtccgtgtttatcgctatgaattcgacgccgcggatctttgtcgagatcatgcggttgaccgcgttgtttccgccgccgcctacgcctatgacctttatatttacgccgctgtcgaagttatcgtcaagttcgaatgccatttttaagtatcctcctgattcaagcctttatagaagaaaagcccctgtaaatcccatacatatataataatatatttccgcccggatatcaagtgtattgaaaaaaatttataaaatatttactctttatcaatcaaacgagacatccacccgatcggaaacgattgcgctcggagacgccgggttcgtcatgtcgatcttcgccttggtattcgccggaaaagcctcggtctgtgagagcaccgccacggtcgtcgaaagcttcgtcgcgaggtcctcgccgtcgccgatctcaacgagatatatcccgtcgcagataagcttcaggtcgaacttgtcccgcaggtcgaaagccgtcacccggtatttaagcgtgctgtcctgcatagccgaaacatacgccgaaacgtatttatcgtcggcgtcggactcaaatacaatccgcccgcctacaaccgccgagtcaatcgccggcaattcaagcctgacatacccgtccgaaacaaacccctcgtcgctgtccgcccgttcgagcaccctgagatcctcagaaagcgcgaagtactcgccgtaaagctcgcagtaatacccggcgctgtcctcactcaccgttatcgtgatcgtgtacggcagcttcctcgatattttcgcggactttatatacggcagtctgtcgtgcaggaccgagagatcgggggacgaaaagaggctgtcgccctcggatatcccgctgacgactatgacctgctgtgccgagtatctcgtggtcccggcgacctcaatcgtccggaccctgaacatagccgccatcgcgagggtgacgaaaacggcggcgagcgccacgaagagcgccatacgtccgagcttgccgagactccttcggttccggctccgtctgacgaacttttgcaggctctccttgctttttatatcccctatgctctgtccgtcagaggtccggttatcatatgcggttccactcattgaaatcaccatagctttcgccgcggcgaaagcttccttgtctcccattttgcgggtggttctgcggagcagaatcgttgtcggaagacagcgaaagccacaaaatgttttgtgtgaaagatttatctttcacaccagacctccccctgaaaatacgaacagccggaaagctgagggcgtttgaccccgctttatattattatatcacagacaaacatgaaaagtcaagtacattcctgcatatttatccgccgcgggcgtatttttttacattccggtcatttcccggcgagcttcatgagatcgagatatatctcccggtttgcgtccggaagggcgaatgcctttatcttctccgacatatccttccgtttcgcgtcgtcctgaagaagcccggctatcgcctttgtcagcctgtcgtcggtcagatccttctcttcaaagagcattgccgccccggcgtccgcgagcaccttcgcgttcttgtactggtggttgtccgtgacgtgaggggagggtatcagcaccgtgcactttccgagcaccgcgagctccgagagcgtcatggcgcccgcgcggctgacgacgatatccgccgccgccatctcctccggcatatcgaagatatactcgacgagcttcagattgtcgtgtccctcgagcccgtagtcatggaacatcttcttcgatatctcatactcgatcgacccggaggcgtggatatgcaggagctccggatgatctttcccatagtcccgcatgaagtcgagcatctcgaagttgaccttctcagctcccatactgccgccgcaggagaggaggaagtacttgtattttccggtgacgccgagctttttccgtgccatgtcgtaatcgagcgacgcgaactgcggctttatcgggttgccgactttgagaactttcggggctatctcgccgccgagagccttcgcagtggcgtcgaagttcacgtagacccggtcgacgagcggcgcaagcatcctgacggcgacgcccggaatggcgttcgattcgtgtactgctgttggtattcccatagccgcggcggctttgaggagaggccacgagacgtacccgccggtcccgacgacgaggtcgggcttgtattccttcaggagtttcttcgctttgaagggagacgtgaaggcgagccacgcggacttgatgttgtacggggtgagtttgcgtttgaagccctgtacttcgacgtgttcgagtttgtagccttccttcggaacgagtttgttctcgatgccgtgggacgtgccgacgaagattatttcggcgtccggctgattttgttttatgttcccggcgatagcgagggcggggttgacgtgcccgcccgtgccgcctccggtcatcattactttcattggattgcctttcgagtgattatttgtagaaatacaggtcagaggcagagccgcgacgcagtatgtctgatgaggcagaaacttcatccgaccatcatataaaccttgactatcgggtccaggggctggcccctggttatttcttttgtttggtatagcgtgatattgacagaacgattcccatctcagcgataagcacgcacagtgacgagccgccgtaggagaagaacgggagggaaattccggtgttcggtattgactttgtgacgacggcgatgttgaggaccgcctgaataacaaccttactgacgattccggcgacgacgagctgtgagaagacgtccggggctttcatcgcgattgagattccgcgccataaaaagagcaggaacagcaggattacggtcgccgcgccgacgaagccgagttcttcgcagacgatggtgaatatgaagtcgttctgcggctgagacacataaaggtgcttctgacggctctcaccgagaccgactccgaagaagccgccggagcctatcgcgtagagtccctgcaaggtctggtagccttttccctgcgggtcgagttcggggtggagccagtattcgatacgctgtctcgcgtgcggaagagcgaaagccaggacagcgagagaactgacgccgaacgtgcccatgacgtaaagaggtcttgtgttggctccgccgacgaaaatcagcactatgcctatagcgaacattatgatcgtaccggaaaggtgcttctcgagtaccatcagcaggcagacgaccgccgttatggcaagcgggacatagacgccgaagaatgacgcccttccgcggtaggtgaggtcggtgatgcgtttgtgataccggtcgatgtaccacgcgagcatgaacacgagaccggttttcatgaactcggatggctgtatctcggtgaatccgattgacagccaccgtctcgcgccgccgtgcacgcgcccgattccggggatcggcacgatgcagagtaagaagaagcagacgagaaacagcggtattgcgcccgcccggtatgtgtccggcttgagcctcatcgtgaacatcataccgacaagtccgaccgccatgaacatgaactgacgcgagatgatatagtagctgtcgtcgtacttccacttggaataggcgtagctcgccgaatagaccatgatggttccgaacgccagaagcacgagaactatcacgagaaagacgtagtcgtatcccgagtcctcggtgtacctgacgcgcacgacctcgtcgtccttaaggcggaagatgtgcttgacccacgcgacggctctgctgtcgggctttttcggcttcgagacttttccgggacgctttgcgggcgcgacggatgttgacgcggtattccgtctgacttctgacggctgacgcggctgcacgggcgctccgctttgctgagggcgcgacggacgctgttgttgtggctgcggcgggcggttcgcgggacgctgaccctgtaccggtctctgctggcccgccgcctgtccgtttctgtgggagtagttcccgcgcggcgcggtgttctgtgttctgttgtccgcccggtcctgccggtcgtttctgtacccgcctgtgttgttcaaaccggcacctccctgttatagtttttttacagaccgagaagagatatggctcccgcgatcagggttatcagcgagaagacgccgacgatctttatctcgctccagccgcacttctcgaaatggtgatgtatcggcgccatcttgaagaggcgttttccgtgcgtcagcttgaaatacccgacctgcagaatgaccgacgccgcctcgcagatatacacgatgccgacgacgatgatgatcagcggattcccgatcatgaacgccatcccgacgacaagcccgccgaggaacagcgacccggtgtcccccatgaacacccgcgccggatagaagttgtaaacgagaaacccgaggcacgcgccgatagtcatcccggcaagcacagcctccggaagcgcgccgagcatgaacgccgccaccgcgaagaaagcccccacggcaagcgtgaccgagctcgcgagcccgtcgatgccgtcggtcaggttgacgctgttgacgacgccggttatcagtatcagtgatataatatagtagaatatcccgaggtcgaccgacttcccgacaaacggaatatagagctcggtcgtgagattcccggtgagcttcatagccgcgaggaaagccgccgccgccgcgagctgcaacagatacttctgcgtcgcggtcagtccttcgtttctgtgattgtggaattttgtcaggtcgtcgatgacgccgacggcgccgttcgccgccgctccgagcaggactatgatgagcttcggcagtccatcgctgttatcggtcgcgaccatcacgaccgacattatgacagccgtgatgagagacgcgaagatgaagctgagtccgcccatcgtcggcgtaccctccttggatttgtgccagcgaggacctatgtcgagtatcttctgcccgagcttcatgctcttcagcttcggtatgagtatgcgcgcggcgatgaccgtcagaatgaagttcccggcgagcgccgctgtgaaaaatggtatcatgtgttatctcgcgctctccccgtcgtttccgatagtgtccggcatgactgtcttctgcggcttcggttccgcgccgttctcgtctgtcatgcgcttgaactcggcgatcacccgctcgagcctgacggcgcggctcgccttgaagagtatgacgtcgcccttcgaaaccgcgtcgcagaccgccctcgcggcgagagccggagcctcgatattgttgttgatgctgatgtcccccggcttgtacgcgtggtttatcgcgccgagagcgatgttctccgcctcgcgtccgaaagtgatgagcttcgaaatgtgcctcgacgcgacgagctttccgacctccatgtggagctgcttcgagtactcgccgagctcgcgcatatctccgagaacggcgatcgagcgccccttgttcttctcggcgacggaagctaagacctcgagagccgccttcatcgattccggaccggcgttgtagcagtcctcgattatcgtgcacccgccgtactcgtagatgttctgtctcattccggtgttgcggaacgccctgagcccgcgctttatctcctcgtcgctcatgcccgcctcgacccccgccgcgaaggcgaaggtcgcgtcatagacgttgtgcagaccgatcgtggggatatgaacgttcgtaacaactctcgttcccgcgacaagatcgaaatccgtgctgtcctcatactcgcggatgttgagcgccctgtagtccgccgtcgggttgatgagcgagacaaaaagcgtcctctgcttaagcgtccccttcttcgcgaagagaagcggctcgtcggcgttgagtatgacgcacccgtcgccgctcattccctcgactatctcgagcttcgctttgcagatgttctccctcgagccgagattttctatatgtgagttgccgatatttgtgattatcgcgatatccggcatcgccgccctcgtcatgcgtccgatctcgcccgcctggctcatgcccatctcgagaacgcagacctgcgtcgtctggggcatcgagagaatcgagagcggcattccgatctcactgttgaaattgccctcggacttgtgcgtctggtacttcgagccgcagacggcgctgacgaactccttcgtcgtggtctttccgacgcttccggtgaccgcgatgaccttcggcgcgatgcgcgtcctgtaagccgcggcgagccttccgagagcctcgagagagtcgcgcacgacaaacaccttcctgctgtcactctcatccatcccttccggcagacgctctgcgacaaccgccgaagctccgcgagccacggcctgcccgacgaaatcgtttccgtcgaatctctcgccgcgaagcgcgacgaataaagctcccgactctgtctcccttgaatcggtggttatcgcgtaaatgtccgccccgccgcggttcggcacgccgagcgttgccgccgcctcatcgaaggtgaatagttccttcatgtttctgttacccattgcttatttccccgcgccagaggcgcttcctttctgtcagccggaaagaacggcttctcatttgtatcattataatattcacgcatgacatatgtcatacggagttgtcatctttaccttcccgctccagcctgagggcgtctgttatctcttccctctcgacgaagcggtgtttgccggttttgtcggtctcgtagtcctcgtgaccttttccggcgaggaggatcacgtcgccgggtccggcggtgcttatcgcgtacctgatggcgtcccgccgtctttcaatcacgcggcaggaggttctgtcctctattccgcgcaggatgtcgcagatgattgcgcgcggattctctgtccggctgttgtcgccggttattatgaccctgtcggcgagagcggaggcgatccgtcccatctccggccgtttctgtttctcgcggtcccctccgcacccgaagagcacggtgagccgtccgccgtcgcgccgtcgtgagagcagggtctttatcgccctcgcaagcgcgtccggcgtgtgcgcgtagtctatgtaaacttcaaaatccctgtcagtcctgactttctccattcttccgggaatctgcgggcagctctcgagcgccctacggatgatctccggctttatcccgaagagtctcgcggcggataccgccccgagcgtgttcgctatcgtgaagtcgccgctcacgggacaggttatcctgtagagcttcccggtctcgcatacgtcatacgcgatcccgcccgacgcgaggtcgcagcgctgatttctcgccgagaagtccgcccgctcgtccccgaccggagagaagccgaccgtcggtatcacgggcgcttcacacagcgtctcaaaccacccgtcgtcgatattcacgaccgcgacctcggagagatcgataagccgcttcttcgcctcaaagtagttctccatcgtcccgtgatagtcgagatgatcctcagtcaggttcgtgaacaccgaaacgatgaagcgtatcgggtcgagcctccgctgatcaagcgagtgcgacgacgcctcgaggaaaacgatctcaaccccggcgtccgccatgcgtttcaggagcgggtaaagcgtctccggcgcgggcgtcgtcatgccgttcacgtccgagaaatcgggagagtcaatattgaaactctcgtccccgataaagcacctgaccgtgccgataagcccggtcctgtatcccgcctctctgaagatctgccgcaggaagtacgcggtcgaggtcttcccgttcgtgccggtgacggcggcgaacatcattctgtccgacggcttcccacagaggttgttccacatgacggcgagcgccagacgcgtattttcaacgagcacataacagacctccggatgattttccagaaatccggtcaccctctcgcagacgacaaccttcgccccgcgcccgaccgcgatgcagataaagtcgtgcccatcgtattttgttcccctgaccgcgacgaacacgtccccgggcgtcacccggaaggagtcgtcgcgaatcgagttcaccccgatatccgtaagatcgccgccgatgacgcccgcgccgtcgagaagttccgaaagaagtgccatatgatccctcaccttcgcgcaaaattcattcacagaagtttacgccgggcgggagttttttatgacctgaaatatcagtctgtgccgtccatatgccgaagctcgattgttatgacggttccgggagaaaccatcgtgccctcggcgggcgactgcgcgacgaccacggcgctcgagccctgatcatagttctgggcgccctcgatgcggacgttcagacgtcgggctgttatctggtagttcgcctgcgcggcggtgagacctatgaggttcgggacagtctttgtgtcggaaggcgtagcggtgccggtgtagagatatacgattccgctctccttctgtatgcgcgcgccgaccgccggcacgctctggacgacttccttgccgtcgccgatgatcttgtactgcatctggcggttggttatccagcggcaggcgctctcggtgtcaagcccgacaagcgtcgcgatcgtgacctcggtgtttttgagatcctcctcggaatactgcgcctcacagcccatgtaaggcaggacctgcgccaggaacttcgatatatacggagccgcgacggtcgagccgtaagacacgccggtaggctcgtcgaccacaaggagcaccgcgatctgcgggtcctcggaaggagcgaaagcgacggtcgaaccgacacggaaaggacgctgtgcgtcgatgacgtttccttcctcgtcgtaggtgtagacccacttgtcctgcttctgcgaggttccggtcttcgccgcgacgttgtaacccttgacataggcgttcttcgcgccgccgtcggtcgccacgccctctgtgaggatattcgtgaccgtcttgcaggtgtccgcgctcaggacctgtatctttttctcggtctcgtaggtgtagatagtgttcccgtcgtcgtcgaccatctccttgaggacatggggagtgacgagataaccgccgttcgcgaccgaacagatggcggtcagctgctggagcggagtcgccttgaatgtctgaccgaaagaatagacagcaagctcggtcgggtgcatttcggacttatcgtgatagattccgtagacctcgcccgggagatcgacgccggtcttgcccgtgtagccgaacgcctcgaaatacttgtagaatttatcgagcccgagtctctccgccgtcatcatcagcgtcgggttgcaggattgttgcagacctctcgcgaaggtgactgtgccatgcccggcggtgcggtggcaggaaatcggctggctgaatccctctcccatataccagccggggcagtagaacgtgtcgtcaaccttgaccgcgccctcctcgagagccgccgccgccgtcagaatcttgaaagtcgagcccggctcataggtctcgctgacgcacttgttgttccacatctcgaagatgaggtcgctcttcagctcggaatactcgtcgctgtcctccacgtagccgctgtcgttcagctgtgttaaaaactcctctgcgagctcgtacggcgagttcaggtcatagttcgggtagaccgccatcgcgagaatcgccccggtgttcgggtccatcgcgattccgcagacacggttgcccgcctgcgcggagtcgtacgccgcctgcacctgcgtctcgaggtcgtactggatcttcaggtcgatcgtgacgacgaggttcgcgccgttctcggcgtttatatagctctcgtacttgaacggcatactctttccgaccgagtccttcgccgttatgtacttgccgtttgtgcccttgagatattcgttgtaggtcgcctcgacgccgtatactccgtttccgtccgagttcgtgaagccgatcacgtggcacgcgagctctccgtaacagtaatatctcttcgactcggcgtaaaggttcagcattccctgaagctcgctctcctgtatgaacgtgcgcagctccgcggcgacgtcagggtcgacgttcttggttattgtctcgtcgcggcgcctgaccttcgccgccttctgcatcgtcgtgtcgtaggagacgccgaacatctcctcgcactttctcgcgattatctgcgccttctggttgttcgaggcgtcgaccgtcagggaagcgacggcggcgtccatgtcctcgtcggaaatgttcttgaagacctcgtcgcctccggcgatatcgtacggggagatcgcgacacggtagaccgtcgtgtttgtcgcgagaaggttcatgttcgtgtcgtatatctttccacgctccggcgtcgttgtcgtctcgcgcgtaagctggcttatgacctttgactgatatttttcatagtcggtaatctgcaaaacgaacagccgcccgatcagcaggacgctgagccccgccacgatcgagccgaacgcgatcatcctgcgcgtcatgcggcgcccggtctcacccgcggcgcgcgacggcttcttaatattctttttcttcgtgtccttagtgttctttccgagaccgaatgccaaatcgaatacctcctgtatcagccatcatttatcttatctgccgaagaacgcctttactctgtccgcgatgttctttccgaagtcgacgatcttgtcgataacgccggtcttttcgaccgccttctcctcgacgatctcgatcttgtcctcgttccttatcgtcagatagtacttcgggacctgatccttcttgaccatgccgagctcgttcttcgccttttcctcgacgactctgaggtcgtcgcggctctcgagcttggttctgagctcgctctgctccgacacgagcgaattataggtcgagcgcagcgcggagttctctgtcgtgacctcacttatccgcaccgacgccgttattatcagcatgacgagaatggatatcgcgagagctatgaatatgatagacagcgggaaattatattttctctcggtgatgattatgtgcgtgcgcgactctttccacttctcgtagagaccggcgagccactgctttgtcgtctttttttccttcggaggcttcgccggggctttcggcttcggtctcgcgctgacgcttccgttgggggccgactgtggcattccgcttcgtctgaccgcgccgggagccatgctcttcggtcttgcgggagtctgttccgcgggcgctctgccggtcataactcccgcctgagcgttctttacgttattcggagccgcctgacgcggagcctgcgtcgtgcgccgcggctgtgtgcgggcgccctgattgttcccctgagcgcgcccggtcccctgacgcggtatcgtcccggtcaggctctcccacgagtactcgcggtacgccggatgggtcgtgcgcatattgcgctgattcttgttttcctgtgcggcaccggtcataggcttccctcctttgttatgcttatgttaatctttttttcagtcttgtgtaatctgatttccgtccttgtcgagcttttcggcgactcttaatttcgcgcttctcgagcgcgggttctcgtcgagctctctctctgacggaagtatcggttttctgttcacaagtctcagcgacggcttcttcccgcacacacacaccgggaactccggcgggcaggtgcatccgcgcgtgaacttcgcgaaggtctgcttcacgatcctgtcctcgagcgaatggaaggttatcacagacagccttccgcccggtctcagaaaaccgacgagcgaatcgagcgtcggctcgatcacgtcgagctccgagttcacctcgatgcgtatcgcctgaaacgtgcgctttgccgggtgcggtccgtcctcgcggttcttcgccgggatggcggattttatgatatcgacaagctcgaaggtggtctcgagcgggcgcctttccctcgcctcgcatattctcgacgcgatgcgtcccgcgaagcgctcctcgccgtaatcatagatcagctttttcagtctctcctcgctgtatgtgttgacgacctcatgtgcggtcagcggagccgtcgggtccatgcgcatatcgagcggcgcgtccttcatgtaggaaaagcccctctccggagtgtcaagctgatacgacgagaccccgaggtcgatcaccgcgccgtcgatgccgtcgtatccgatctccttcgccctcatgacggcgttctcgaagttgtcgtgtatgaagtcgattttgtcaagatagtccgcgagccgcttcttcgacgccgcgattgcttccgcgtcctgatcgaccgcgatgagacgtcccttgtccccgagccttttcagtatctcgagcgagtgtccgccgccgccgagcgtacagtccatataaacgccgtccggctttatcgcgagcccatcgaccgcctcatataaaagcaccgaataatgcgagaataccggcgcggctttattgtcatccataaaaaccctttcccgtcctcagacagatataccttatgatattataccgcaaatcggacagcaattcaagtcttttcggcggaatttttttacctgtatgcaaattttttcgccgcatgcaccgcgtttccggcatatctccgtcttccgcgcgcgcagcttgaaactttttgtgaacgatagccgcgtcccgttaacatcccgttcacctatcacgttcagcgataatctgagccaccccgcgcggcagatattccgacgggtccttgccgtactttatgagctccgagaccatcgtcgagctgacaaacatatactcctgctttgtcggaagtatgacagtctcgagctcagggtcaaaggcgcggtttatcatcgcgagtgacagctcatagtcgaaatccaccgccgagcgcgaacccttaacgatgaagcgtatccccttctcacggcagaaatcggctaaaagaccgtgcgacattccgcatatgatgttcggtatcccgtcaaaagccgtctcaagcatacgcagtctcgtctggtcgtcgaaccgaccgcgcttttccccgttcgaaaaagcggtcacgtacacctcgtcaaatatctccgcggcgcgcagggcgaggtcataatgcccgatcgtcggcgggtcgaagctgcccggaacgagggctcgtctgattttgtccatgacttaccccttcagtttcagaacggtaatgtgaacccgcccgtagccgcattccttgacaacctcgtactttgccgcgagatcatcgtccccggcgaacgggtcgttcttttcgtcctcggcaaaaatccacgcgccgtcatttaacagcttcccgtcagacagcatcgcgagcgaatcgtgcagaagcccgctcccgtacggcgggtcgaggaacacgaaatcgaacttgcagcgcccctttgacgagcgtatatactccgcggcgtccgaggtcatgacgctcgccctgtcggagagatgcgtcttctcggcgttctgtctgattatagcggcggcttcgggagagcggtcgatcatgtgcgccttcgcggctccgcggctcagtgcctcgagccccatctgcccgctcccggcgaacaggtcgaggaaattcgcgtcctcgaggtcgaactgtatcatgctgaaaacggcttccttgacccgctcaggggtcggtctcgtgttgtcgccctcgagggtcatgagcttcgtgcctctcgcggttcctgtgattattctcattttttgtttcctttcggtttattttcgtctgcgtactttgctattatggcgtccgcgttcgcgccggttattccggggacgcgcatcagcgccatcttgtccgccttctttatcgcggcgatgctccggaaatggtttaacagcgccttcgccttgagcgcgcctatgccgtctatctcttcaagcgtcgagtgctttagcgtcttcgtcttcgcgttctccatgcgggttatcgtgtagcggtgaacttcctcttgcaggcggtatatgaacatgaacaccgactggtcgcgcgctatgcttatctcgctcgtgtcgtcggtcagagctctcgtcttgtggtagtcgtccttgaccatgccgaacaccgggatgtcgcacccgatctcccgcataagctcgcgtatgaccgacacgtgcccgcgcccgccgtcgagcagtatgagatccggcgccgccccgaaggtctcgtccgagagatgggcaagtctgcgccccagcgcctcgcgcatggctccgtagtcgtcgatgccgtcggtcgtctttattttgaacgtgcggtaatccgactttttgagcttcgcgttctcggcgactatcattcccgccgttatattgtccgagccgaagttcgagatatcgtatgcctcgattctctccgggacgacctcgagacgcagcatagtcgcgagcttcacgagggtcttgttgtccttctcgctctccgccttgtatatttccgcctgctgcttcgcgttgtcgcggaccatctcgcagagcttccgcttgtcgccgcgctcaggggtcctgaactcgggtttcgttccgcagcgctgttctatgtgtccggcgagcatcgcgatgtcctcgtccggcaggacgaaatcgagcaggatctccttcggcacatattcgcggatgttgtacagctcatcgaggaacgcgaccatgttctcctcgtccaccagctgctccgccgggaacaggaagtgctcgttgtcgacaaggcttccgccgcggatatagaagaccgatatacacgagcacgcgtcgtcggtatagaaggcgatcgcgtcctcctccatgtccggcggtccgacgaccttctgtctctgccagagcttcgacaaagcctctatccggtcgcggtacttcgccgccgcctcgaacatcaggttgtccgacgcctcgagcatcttgcgtctcagctcgtcctcgcactccttgaaggaacctcgcaggaagttcgccgcctccctgaactgcgccctgtactcctcgctcgacacgtcgcccgcgcacggagccgagcagtagccgagatgccggttgagacacggtctgcccttcccgatgtccctcgggaactcccgcccgcaggacgcgagaccgaaagacttctgcgcggttccgagtatggagtacgccgccgacgtccccgaatagggaccgaaatacttcgccttgtcggacgttctgcgccgcgtgacgctgatcttcgggtacgggtcgttcatcgttatctttatatacgggtaggacttcgaatccttcagttttatattatacttcggcgtgtactgcttaatcaggctgttctcgagcgacagcgcctccatctctgtgtcgcagaggatatagtcgaagcggcagacgttcgagaccatccgccgtgtcttctcgctgtgcgacgcggactcatggaaatactgcgagacgcggttcctcagcgacctcgatttgccgacatagatgaccttgtcgttcctgtcgcgcattatatacacgccggggcgcagcggcagggcgttcgccctctcggcgagcgcggcgcgggtctcctcggttccgggcttcagtacaggcaattccggtctcgccgcggactccggtaagatgttatcttccataaatctccaagtttcgtaaagaaaagacgagccctgcgatttatgcacgctgtgacccgtcagtgatctcttttattttccgtatccgatcattcgccgaagttggtgtcgatcagctcggcaagtccgtcgatagcctctttctcgtcgcttccgtcagcgatgagggtcacggtcatgccctttgtgatgccgagcgacagaacgccgagcaggctcttcgcgttgacgcggcggtcttccttctcgacccagaccgagctctgataagtgttcgccttctggataaagaaagtagcgggtctcgcgtgcaggccgacattgttctggatcgttacgtttttcgaaatcattttgtattcgctcctatcataaaaatcataaaataacagaataagataaccctgtccgactaaacaattatactgattatagtatagcagattttcgcttcaaaatcaatagcctttttgcatatattttcagcccgtataaattttttctctgccaataatcgatatattgtacaccggactgccgttttctcactcggaaacggtgtcgacgcgctccacggcggtcacggtcaggatgacgtcgaggtcccggctctggac

SEQ ID NO: 3172 - DNA, 3889 bp, Unknown
  16S sequences of unknown bacteria
cgcctcgtgcgcatggtcgagcacaacgccaaccgcgtcaagtacaataacccaaaaaacgcggcggacatgcttgaaaatcgcggttttacaagactttacgaaaacgagtcttggaagctttgccgcggcggcagctattattttttgagaaacgattgctgtcttatcgcctttaaacttcctaaagaggaattctcgggtttcaaaattttctcctgccacggcgactcccccgcctttaagatgaaggaaaatcccgaaagaaaaaccgctccctatgtcaccttaaacgtcgaacgctacggcggaacggttccctatctttggtttgaccgtcccctttcggtttccgggcgcgtgtttgtgaaaaccgactgcggcgcgaaaatgaagcttgtaaacttcggccgccctcttttgcttataccgagccttgcgccccatcttcgcacgggcgaggaaatatactcaaaaatcaaaattcaaaaggaaattcagccgctcataagcggagacgccgaattttcgctgcgccgtgccgttgcaaatgagctcggcgtttcccccgacgacattatttcccatgacctttttgcgacaaactgccaagagggcgagattttcggaggcggcagagaattcttttgctgcccgagaatcgacgatctgctttgcgcctacggcgggcttttgggctttgccgacgggcaaaacgcctcatccgcttcggtttatgcactttttgacaacgaggaggtaggaagctcctcccgccagggtgccctttccgacattttgcggctgaccctttcgcgcataaattcaagtctcggaattcccgaaagcagactttttgagcagcttgcaaacagctttgccctttcggccgacaacggccacgcccttcaccccaacttccccgaaaaggccgaccccaccaaccgtcccgtgctcggagggggaattctcattaaacattcggctaatcaaaaatacaccaccgacggcctgtcctcggcggttttcaaaacaattctcgagagggaaggcattcccttccaaacctttgtaaatcactcggacattccgggaggcagcaccctcggaaacctttcgggacgtcaggtctcggtcgcttcggccgacatcggcatggctcagcttgccatgcactccccttgcgaaatcgggtcggtcaaggacgtttatcagctttatgccggcacaaagagctttttttcaagcagcatcaaattcttaaaggacggcggattttcgatagaccgaaagccgaccggggaggcatgatttatgaaaaaaaccaaacagcgcaatcagataatcaaggagctcctcgacataaccgacagggaattcaccgacgaggaacttatacaccgacttatcatgaccgaaatgaccgaaaattccgacagcgaggaaaaggtgtccttcggacaaaaggcctccgacgcggtggcgaaatttgccggcagctgggcatttatcttcagctttatcgccgtcatggtcatttggatggtgctgaacatcgtgctggcgcaaagggcttttgacgcctatccctttatactgctcaaccttgtgctttcctgcattgccgccgttcaggcacctctcataatgatgagccaaaacaggcaggaggcaaaggacagaaagcgcgccgaaaacgactatcgcataaatctcaaaagcgagcttataatcgacgacctccaccgaaagcttgatttggttcttgaaaatcaaaagaaaatttcaaaacgtctttacgaccttgaagccgaaaagagggaaaatcaaaatgagcgcggataatatcatcgaaattgagcatttgtcaaaatccttcgggcagataaaggcggtggacgacctttcctttcgggttaaaaggggcgagcttttcgcctttctcggcgttaacggagcaggaaaatccaccacgatttccatgatttgcggtctgcttaaaaaggacgcgggaagcattcgggtttgcggaagcgaggtcgaaaaaacaggcggagacacatcgaaaaagctcggcattgtctttcagaattcggtgcttgacgctcccctcacagtgctgcaaaatctccgctgcagagccgctctctacggcataaccgggaaggccttttccgaaaggatagacggactttgcggccttctcgggcttttcgacatacttaaccgccctgtgggaaagctttcgggcgggcagcgccgaagagccgatgtcgcaagagcgcttttacaccgtcccgagatactcattctcgacgaaccaaccaccggactcgaccccaaaacacgaaaaatcctgtgggacgccgtcggctccttaagagccgaggataataccaccgtttttctcacgacgcattacatggaggaggcggccgacgccgattttgccgttattctcgacagcggaaaaattgccgcggcgggcacccctttggagcttaaaaacacctatgccggcgactatataaccctttacggcgtcacaaaggaacagctttcccctctcgggcttgactgtgccgagataaaggacggagttcggctttttgttaaaaacacggccgaggctgccgagcttataaaaaaacacccttcacttttttcggatttcgaggtcacaaagggtaaaatggacgacattttccttgctgtaaccggcaaaaaacttgaaggagggatgtgaaatgaaacagctgagtgccttaacggccagaaacatccgactttattttaaagatagggggcttttctttgtgtcccttataacccccgtgatactgcttgttcttttcgtgacctttctcggaagggtatataaagacagctttctttcggcaattcccgcagggcttttaagcgacggctcggttatcgacggtgcggtgggaggtcagcttatttcctctctgcttgccgtttcctgcgttaccgtggccttttgctccaatgccctcatggtttcagacaaagcaaacggagtcaaaaacgatttgacggtatcccccttaaagccctcggtgcttgcgctttcatattttcttgcctgcacggcctccacgcttatcgtaaattatacggccgccgggctttgccttttgtatcttgcaaaggtaggatttttcatgagcctttgcgacgttatgctttttttgcttgacatattgctgctttcgcttttcggagtggctctttcctccctcgttcattcgtttttgaaaactcaggggcaggtttcggccgtgggaacggtggtcagcgcgggatacggatttctctgcggcgcctatatgcccgtttcaagcttctcggcggggcttcaaaaggttctgtcctttctccccggaacatacggcacaagccttcttcgcaaccacgcccttgccggcgtatttaaaaagatggaggagctttccttcccgaaagaggccgtggacggcataaaggaatcggtcgattgccgaattttcttttgcgggcaggaggtgtcggcagcgggaatgtacgcgtttttgtgcggtgccgccgtcctgttaattgccgcctacatcataaaaagccgcctttccgaaaaaagatgattataaaaaacaacggcactcagtcttaatttttcataaccgaacaccgttaagtatctgttgcttaattgaaagaagctgggaaaataatgacaatacctccgtcacggctgcgccgcgctacctccctttacacaagggaggctttgaatttgctttgcctgtcgttttttgattctaatatgaaaaattaaaaatggtttttgtttggttttggtgctttcataaaaaaactaaaatgtgttttg

SEQ ID NO: 3173 - DNA, 32759 bp, Unknown
  16S sequences of unknown bacteria
tggtcatcatctttgccaaagtcatcacggctcagtcgttcgtacagagcagtgattttctcgttttttctcataacttgcgctcctttcttcggttttaggttgtgtgttctaagagacttcccaaccgcttgattaagaagtcttttagagcatacaacacctgttgccgaaatggtattggaaacaagagaaatgctgtgtgaactgtttcattttaaccgttcgcagaacgtaatttttaccatgaatattacccagtcgctgaattttctgaaaaagggttttggggggccaggggatcatgtgctggtcagcgcaatggagcacaatgcagtcatgcgcccgctcactcagttggcagatatcggcgtgacgtttacccagatgccgtgcagcgaacagggagagttgctgaccgatcagttggatgagctggtgcggcccaacaccaaagcgatgatactgctgcacgcttccaatgtgtgtggtacttttaatgccactggaagtggtgagtgtcttttaccgaaagcacaagttgctttttttgctggattcggcccaaaccgcaggcgttttccctattgacatgaaagcccttgggctggatgccctggcttttaccgggcataaatcgctgctggggctgcagggcatcggcggatttttgctgacgggcgatctggctgcaaagattacgcctttgatcagcgcaggtgccggcagtatctcggatcaggaaagcgttccggcttttttgccggaccggtttgagtctagtaccatgaatctgccgggaattgcgggattgcatgcatccttgggatatctgaaagagattgggattgattccatccgcgcgcatgagcagaatttgagtggattgttgcagcaggaattgtcttcttttccaagtgtacgcattgtcggcattgcggatgctcaaaaacgggcgccagtggtatcggtggattttattgggtatgacaatgcccagattgcttatctgctggacagtgagcatcaggttatgacccgatgcggactgcactgcgtacctaacgcccataaaacgatgggaacttttccgcagggaacggtgcgtttttctgtcggagtccacaatacagaagatcagattctttttgccataggcgctgtttccaaggttctgaaaaaagcgacccctctctgctgaacttcccccagaaacaaaacaggcgctgcttttttagcagcgcctgttttgtttccatcaaaatcagtttacagcccatgagggatctcatcagcaaagcacccccgcagaatccccactgcctttttttcaatgcgggatacataagaacgggaaatacccaaaagcgccgcgacttcccgctgggccatcggggctttgccgtcgagaccatatcgcaggcggatcacctgctgttctcttgcatccaacgcctgattaatgtaagaatgcagccgatcgcctttcaatttgcggtccacgtcttccagaatatcgccatcctgtgccataatatccatcagcgtcagagcatttccgtctgtatccacatcaatcggatcctgtatgtataaatcctgcgcatattttttccgcccgcgaaaatgcatcaaaatctcattttcaatacatctagatgcataggtcgcaaaacggatgcccttattgctgtcaaaggttcccactgctttaatcagtccgattgtcccaatggaaatcaaatcctcctgctctttataagaggcatagtattttttgataatgtgagccaccagccgcaggttgtgttcaataaaataatccctagcctgctgatccccttctttgattttctgaaggcattcccgctcctgtgcaactgttaaggggcggggaaaggaaccggatgcggtcagatgcagcgcaaaatacaaaaagccgcccgccagggcggatagccagactgataacatgtctcctccttgtttggccttgcagcacaaggtcaataccgcgtccggttccggccggcggcccgccgaaaatcgtcctctttgtaataagcatgaggccctattgtcagcttatgcgccggttggaaaatcgtgcgcgtcccaaaaacaaaaaggtttctggttgcggttcgccgccggatatgatacacttatgggcagaaaaaaggggggaatccggatgctatcgacactgctggaactttccacctgttgggaacagctacaaaagacaaacaaaccggtcgtgatgtatggaatgggcaacggcgccgatcatatcctgcgatatttggatcagatgggcgtaccggttcaggagttttttgccagtgatagatttgtccgcggccacagttttcatggcaggcgggtgaaaaagctttcggaaattcaggcccaatatgaggattttgttatcgttactgcttttgccgtgcaggatgagcctacgatggccgccattcaacgattggaccagcagtatgaactgtatgccccggacgttccggtagcgggagagaatctgtttgaccagacgtttttagcagctcatctggctgaggtccaagctgtagacgccctttgggcagacgagagatcccggcgagtttaccgggatctcatcgcttataagctcaccggaaagctatcctatctggttcccaccgccagctcccggcaggaggttttttccgatttactgcagctgggtccaaaggagttctatgcggatttgggcgcctacaacggcgataccatcgaggaatttttgcagtatactggcggccgctttgccggggtatacggcgtggagccggaccccaaaaactaccgcaaactctgcgaaagagccgaacgcctgggcattttccacgatgaccgggtgagtctgtggaatcttgccgcctgggacgatcggggtgttctgacctttgcaccccgggccggacgcaattccgccgtggcagacagcggccgccggatcgaggcggattctctggataatttgttgggaaaagcaccgcttacctttctgaaaatggatgtggagggcagcgaggcccgagcgattctgggatcggctaacgccatccggcggcataagccaaaactgatgatttctgcttaccaccgcagcgaggacctgtttgccctgccgctgcaaattcagcgcatccagcctggctatcggttctatcttcggcggtttccctatatccctgcctgggaaatcaatctcatcggtttatgggagggataatcgtggaatacacgctttacgaccatcataagcgctatcgcacctggagcggcgagctgcgtcgccggtacggccaaaaggtctgtaaaattccgctgaatgccggattcggctgtcccaatcgggacggaacctgtggtatttccggctgtacttactgctccggattgcaaagcggcgatttcggcggagatccatctctttccattgaagagcaatttgcgcagatgcgggcggtatttgacaaaaagtggcccggtgcgcagtatattgcctattttcaggcgggtaccaatacctatgccccagtggatgtgctgcaaagtttttttgagccggtgctggcattccccgatgtggtcgggctggcggtggctacccgggccgactgtctgccagaaccggtgctggattatctggccgatctttcccgccgcaccgacctgacggtagagctggggttacagaccgtccacgatgaaaccgcccggcggattgggcggggacatgactacgaaacctttttgtgtggatatcgggcgctgacctaccgtggcattcgggtttgtattcatctcatcaacggactgccgggcgaaaaccgtcggatgatgctccaaacggcgcggcaagttgcggcgctgcggccctatgcggtcaaaattcatctgctgcaccttttgaggggaacaccgctggccgctgaatatgaatcggaccctttccggcttttggaaagggaagaatatgtccagctcgtctgcgatcagttggagctgctgccgccagagaccatgatccagcgacttactggcgatggggaccgccggctgttggtcggccccatgtggagcgttcgcaaacgggaggtgctcaatgccatagaccgggagatggcccggcgcggtacggtacagggagcccggttttgttcggaactgtcccgtgaaaaggaggcggatttttaatgcaaagtattcttcatacggccaaggagctgttgcttccagctcttcggcctggcggtacggcggcggattttaccatgggaaacggccacgacacactgttcctcagccgcgctttgcccggcggacaggtttgggcctttgatatccaaccagcggcgctgaaagcgacccaggcccttttggataacaacagcgccggcgggaacgtccggctgattttggacagtcacagcaatctggaccgctatatccagactccgctggatgccggcgtgtttaatctgggatatctgccctgggcggataaggcaataaccacccggagagaaactaccctagaagcagtggacaaggctctgcctttgctgcgggtaggcggcgtgctggtgattgtgatttatcccggccacgaggaaggacggctggagggggaggctcttcagcaaaaactttccggcctggatcccaagcggtacgacgtgttgctgcaccggctgatccacgtaccggaatgcccgtatattttggcggtggaacgccgcaagtaatcggttttattgcgcgatcgcagtcaaaaaggccccggaaaagaaaaatccttttccggggccttatgatttttcaaacagcacttgctaaaccatcatccggtccgcttctgtaatcggccggatgactcggcagggcactcctgcggcgacaacgcccggcgggatatcccgggttactacgctgcccgcccctatcactgcgccacggccgatggtcacgccgccgttgacaattacaccgccgcccagccacacgtcgtcttctatggtgatcggtttggcgtattccaaattgtaccggcggcccgtttcgtcggtacgggcgttgcgttcttccgcccgcaacgggtgcagtgcggtaaagaacgaagttcctggcccagccattacgttggagccgatacggataggagcgcagtctaaaaatactgcgttgaaattaaaatagcagttgtctcccacaaaagtattgcagccatagtcaaaccgaacagaagcccgaaaagtcacatgatcgcccatactgcccaaaagtgcctgcaagatttcccgctgggctgcggcgtcctctttttgcagacggttgaaccgctctaccaactggaacgcacgttttcgcagatgggatagctcttcgtcagaaggatcatacagctgtcctgccagcattttttcccgctcggtcatggattgtcctccttttttcgagtttgccaaaacaatatgaccgcgaaaatgaatcggtgaaacacaaaaatccggcggaattcctgttcttaccatccagacagagttgctttaccggcctaaaaattgcgccagccagctcaacgcagtggccagcccccagctgtaagccaatagagcaagcggcttgcccagcaggatgatagcgacaaagcgccgaaatttcatcggtgtcagccctgccagcaggcagagaaaatcatctggggccaccggaaaaaagattgccagcgcaaaatacaaatcaaattttggagaatccagccatttgatgtattttccccacactttttccgaaacagaccgctccacaaagggacggccatattgttttgccagcgaaaaattgatgcaggaaccgatacagatccccacgtaattatatacaaagccccacacagggccaaacagaagcacaccggctatgcaggtcagcccgcctgggataatgggaaacacgacctgcaccacctgaatccccacaaaaaccagcggggcccaaagcccagcgccgcgcagaaacatctgcaacgtttccggggaggtaaacacccccattttcagtccgataatcaccagcaccagcgatatcagaattccaacaatggttactgtcgcactgagaatttttcctccgcagatactcataaatgcaaatcaccccgcgcctgcggcaccggttgcgcctgcggcaccggttgcgcctgcggcaataaagaggcatagcagtttttccaataagaaagcaccgccgcttttgtatagcgctgatgcccttcggcagagcgggcggcggccgccgaatgaaccgccggatcggtcagcgcacgcagctgacttacaaagccgtccacgtcgctggcggctgtgtaatatccttccagaatgcaggggtacaagtccaagtcccgtaccaaaattggtttgtggcagcacatggattccagcagcgtcatggggaatagttcgtcaaaagacggcaggaaaaacacgtccgctgcattgtaaagttcattcatcttttcccgtggtacaataccagtaagcgttacattggcgggcagatgttctgccgcgtgccggatttcttcatatccatcggtaatttttccaaaggaaaaccctcccgcccagacaaactgcatatccgggcagcggcgtgcggtctccaaaaagtccagaaatccctttcgtttctgcatctggccggcgcacagaaccgtaaacttttccgtatccagcccaaaagcctgtcgtgctttcaatcgctcatcctgcggcatcggataaaaatgcttatcatccacaaagttcgggatatattcaatcttttctgctggaataccgcactctaccagtttgggaataaaagatgggttgaccacgatcagcttgtccatcgatttataaaaaagcaaaacatatttgcacaaaagtttctgaatcggccggggcagccggatggacccctccagcgtctgcggcagaaaatgaacgtaccccacctttaccgcagaagtgaaccagctgcgcagcaggtaattggggtttactgtatgaaaatgcaaaatatctgattttttccagctgttgatcaccactgtataattgggaccgagtccctcgctgaccagctttgtctgctcttcaaaagcagagagaacgccatggcctttggtcattcccgctgaggacagcatgttgatgcgtaccatatgaacccctccttttgtctttctgtttcttcctctgctaaaagaacgactgggagactgttttttcttcatggattccagagtcgaaccggatttttctttctctttcaaggtccctcactccctctgcgccaaagctggatttttttcgtcaaaccgaaggggaaatatctcccttttgccccttaaaaaaccgcttttttattctttccggcgataagggggctaaaccgctaaactccagctttctaattttattatagcaaacatctatataaaaaggcaacaggacttttcggtaaaaagttggtattttcccaaaaggcggcattttctgaaaggataccggcaatcaagtcaaagcagttcgcgcagaagagccgaaggaattgccaagggatctggtgggtttacgtggaaaagggctcccgtgtttggaggtgagttctcaatccgtttgggtcaacgggaatcaaaacagcgggcttgctgtttgcggctgtattaccagcctccttttgcttccagttccagcagatagcggatcacgccgtcttctgtattggcaggcacgatttgatcggcgcgggccaatacatcggcagtggcgtttctcaccgcgcagaactgatccgctccatctgccatcgccagatcattgtgattatctccgaaagcaatgacgtggtctgcaccagccatttcgcggagaatctcaaccgaaagtcgtttgtccacgccgccagcctgaatttccagataccaaagcggctcataggtgtccagataataagaaagcgtaatatttggaattttttccatttcggcatacaagcaatccattttttcttttggccctggcatggagaaaaataccacccgctcattctctgctgttttagccagagagtctacctggcgccactttttttgaggaaaacgggagcgctcggctgcaaactggcgctccctttccgtatccagactagtgtaacaagcgaacagctgctgatcctggtaggtatacatggtgttgtgaagatcatactgttccatgacccgggcaacctgccgtgccgcctgcgggtcaatgtccatgacccggacaaaccgcgctgcggaataatcatagtaaattaccccgttaaacagtgcaatcgggacagtgagacgaagcccatcaagaatcccgatcaccgtaccggtgctgcgggcgctggagatagaaaagcacagccctttttcaatcatgcggttgagctcccggacagcaaacggagataaggacgcgtcattttgcagcagcgtaccgtccagatccgaaagataaagggttttgtcgcgcataaaagtcctcctatgaaaaagcggacggcagtttgtaaaatcgcgtccgcttgcaagattattgcagttcatttaaagtcagcttcagtgccagttcctcagcagttgtattccagtcccggaaagattctcctaccagccggcggagcagttcctttaaaatctccggatttttgaccagaagagggcctaactgccaggtgccgaaaaagttccggtacaaattcccctcgtgggattctccggcgatttcgccatcccccgccccttttactacagtaaagagcggatcccggtcattaccatgaatatgggcggttcggttgataaaaccataagatgcggtttccggcgcgaatatcgggtgagccaatacgtcggaaataaagacgttgccggtttcttcgcccgtatagtcaaacagcccaataccgggtatctgctgcccgtcggcaccagtaaagcttttgccgaacagaaggcggctgttcccggttgccaggaacacaacgccgcgctccaccgcatccagcacagcctgtttttgacaggccagatcttttgctgcttcggccagattccgcgcttttcccgggccaatataaatcatttgatagcgggaaaagtccggctgatcccccaagcttttgtggtcaatttcccatggaatccccatcgcatccagccctttggtcaccgcaagcaggttgccccagtctccatacaaatccaacaggtcgtcgtacatccagagaatgttcactttgctcatttgctgatcacctccagaatggactttgcatcatacagttcagtcaaaatgcaaatatcgccgcgggttttatccactactgctttgagttgggacaaatcccgttcgatgcggatttgttccggcggaaaacccgccagcttcagccgcactgccagatcataggccctgggcccggtgcccacaacagcgtctaccttgcccagcagccgttcaaagccaatgtcataaagccaagtggtatcccggtgaccggtatggttgatattattgatgaaaacgaccaccgtcttttccccatctcgctccaatacatgggtaatggactggtcaaaagagaccggattctggtttttggagaggatcatcaccgcacggcggctgccgacctggaattcgtcgtatcgctgtttcaacgcaacaaaagtggacacggcctgacaacagttctccagcggcaagcccaattctgtgcaggctgcaacagcggcggtagtattgaggatattgaacagatctttataatcggtgtgaacccggcacccgttgatggtaaaatcgcctgaagaaaaatcgacattgtcggccgtatagctccattggggattgatataaccgcatttggagcactggaaaccgccgatgtggttgtagtgatagtaagtatagctcatgcggccaaaacaacgggggcaaacctttgcgtcatgggtgatgttgaggcatttttccgatgattgctccgttttggaaaggccgtaataaaccctttggttctgtggggccagatcgccgctaatcgggtcgttcccatttaaaatcagcttgaccgacggtttgatcgcctcatgcagcttctcgataattacatccacatttccgttgcgggtcagctgatcgcggaataaattggtacaaagcagatagtccggtgaaaaatcccggaagatcagccgggaaaaacgctcgtccacttccagcaccacaaaatcctgtttgatacgcccccccatggtagacgccgccagcagcgtagtggccaccccgccggtcaggttggagcccttggcgttatgcgccaccgaatgcccctgctttttcaaaatatgggcaatcatattggccgtggaagtctttccattcgacccggtaacggcaaggattttaccgtcaaatcggaaattgcccatcatctgcgggcagatcttcagcgccagctcgccgggcagatttgtagattttccaaacggtttgcccagcagatacaaaagcttccccagcaaaagggccagtttcattttcataatagcacctcggttgagataaagtcggccactgaacaagcagcccgacaaaataaatgtatacaaattcctctttattctatcataaacaaaaaataaagaaaagagaaaaagcaggatctgcgaaaaactttccaatttggaatgatcactaaaaactttctgatttcaagtaaaaaacaagagtatttgttcaaaaccgacttgaaattaccacctttttccggtatgatggagaaaaggatgtattatcctgtcctattaaaagaaagcaggtgaattttttatggcaaacgctttttcccggctgttaagaaaaagtcccttgatggatcagctgatgcagctggaggggaatgccaagtggtgcgtgctgtgcgaaccattttgggcgattaccaatgcgctgtatgtggcttatgcggtggagtaccgaaaggcgatcatcgggctggacaatgccaacctgggaacgcttctgggaacattggtcaccattcagctggccgcgcagtttatcagctcctttttggggggcgtcatcaccgataaactgggccgcagaaaaacctgctattattttgatcttttgtccggcgcgctgtcagtgttgcttttggcctgcgcaaagaatttctggtggtttgcagcttccatggcattgggcggctgctggcagatcaataccaatgcttggaatggccttttgacagaagactgcccgcctaaaaaaattccctacgctttttccggtattactatggtgcagctggccgccacttttctgaccccgatttccatcattctggtgcaaaaattcagtatcatcccggcgttgcggggcgtttatttctttgcttttttgtcccaagcatttaaatgtacgctgcttttttggaaagcgaaagagacggcacagggcaaaaagaggatcactgagaccaaaaacattccgctttaccggatgttttccggctatggaagggtttttaaactgatttttaccacgccggcaacccgtcttttgctgatactggtgattaccattggcatcaacaatattattattaatacctttttctatgactttgccaccgaacggctgggcctgcccaccgcttcgctgggatacatccccatgatccgggcagctgtgtgcctgttatttatgtttaccgctcaaagcaaaatcaacgaaaaaagccatcggacggttttgacgatcgggcttgttttatacgcggttgcttttgcctgtccgctgttgttccaaggggcttcctggacaggagctgtcttttatatttttttcgaggccatcgccaatgcgtttgtcattccgagaaaggaatctctgctgtttttgtatgtggacaaaaaagagcgttcgcgggtttatgccatgctgcatgttattgctctggcaattacctcaccattcgggacggtgatgggggctatgagcgatgtcagccgcctgtatccctttttatttgccatcgtcgtttcgctgggctgcggcgcgctgatgttttggtcccgcacggagaaaaaagacgcgcaatccattgccgtgggagaatagcaaagcctttcctccgttttttcttgccagaggcggtgatctgtggtaaaatgcaggacagaaccgttaaaactgcaagctgtttggaggatgaggggcatgtctttacaaaaactgattttaccagatcattatacttcgaaattggatatcctcaatacggaaattgccattaagctggtgaaggatacttttgaacgggaattgggcgaggctttacacctgattcgggtgtccgctcctttatttgtccggccggagtcgggactcaacgacgatctcaatggtgtggagcgcccggttcagtttgacgtgttggaaatgcacagcgatgtgcaggtggtgcacagtctcgccaaatggaaacgtctggcgctcaagcgctacggctttggccccggcagcggcatttataccgatatgaatgccatccgccgggatgaggatctggataatctgcactcggtttacgtagatcaatgggattgggaaaaggtcatcacgacacagctgcgcaatatcacctatctgcaggacacggtaaaagccattgtcggcgcgctaaaacgtacccaggatcaggcgtgccggcggttccccattctgaaccgggtgattccggagaaaatcacctttcttactacacagcagctggaagaccgttatccggaactgacccccaaagagagggaagacacggcctgtaaagagcatggcctggtatttttaatgcagatcggggataagctgcgttccggcagaccccacgacggccgggctccagactatgacgactggtccttaaacggtgatattctggtatggtacccgcttttgaatcgggcggtggagatatcctctatgggtatccgggtagatgaaaaagcgctgcaagagcagttggccaaagcaaactgcgaatcccgcgccgaactaccgttccacaaaatgctgctggaagggcagctgccccttaccatgggtggcggtattgggcagtcgcgtatctgcatgctgatgctcaacaaggtgcatattggcgaagtacaggctgccgtctggtccaacgagatgatcgatgcctgcgaagccagaggggtacatctgctgtaaaacactggctttttccggttgggccaatcggagaaaatgggaataaacagtaaaagcaaactaggcgcagccaacggctgtgcctggtttttcctttttggcaaatgatgttgcttattctgttctccattccacaagaatcgcttctttcggggagaaatagtcttccgaattgctgctgaatccagcggctttccacgcttgttcaaacgagatttcttctaagttgctaagatatacaaaggtggagtccgcagcagcctgcggtgttctgccgctgatttccagtcgatactgataggtgcgtccatcacactgccaggaaccgtcgctcatttcataatagggttgaaaacctgtgtcaatcgtgcttttcacactgaccgcagacgattttgtttggcatccggtcagcgaggcaatgataatcagaatcagcataataacagacagcagtttttgcattttcccgcctcccatcagcccaatgaattttgctgccgtcaggagatttctccccaacagactacggcaaaagggtatctgccgcagtaggcagctgatcgttggtttttccgaagaaatactcgtcaaagatggcctttgccaccgccgcaccccaataaccatggtaaccattttcgatgaccaccgccacggcgatctgagggtcatccgccggcgcataacagatataggtgccgttgggaaacccagtggtttccggagtgccggttttagacgccaccgaaatggggtagttgccaaaatatgcgccggaggttccgctgtatccgttttggccggatgcgcggatcataccgtcccgaatggcgctgaccgccgtttctgacagtcccatatcgacgacaatttccggttcgatatcttccaccgtttcgtccagactataacttttcacgcttttgaccaggtgggttttcatccgcacgccgccgttggccagcgtggcggtgtaggtggccagctgcaaaggcgtaaacaggcttttgctctggccaatggaggtctggagcacgtcgccgggattccagatttcccctactgattcgctgtatttgggactggacatatggccggtggcctctggcagttcgataccggtgggttcgcccaagccaaactggcttgcgtagtccaccagagtatcaattcccaatcgacggcctaaatcataaaagaagatattgcaggaaacccgcagcgcgtccataacggtaaaattcgggtgccatcccaggcacctgggctggtaatcttcgtagaaagtataaacatgattacaggtgtaggtataagagggcgtgatcagcccctcctgtaagccggcggtaccaaccaacggtttgaaaatggagccgggagcataagtcccctgcaatgcccggttaaaaagggggttatccggattggccagaagatcattataatcctgattgtaggtggccagattataggttgggtagctggccattgcgagaacttcaccggtattacagtcaattgccaccaccgcacctgccgtggcctctttgccctcgccttcttctccgttggcctgcagccactggatttcttgttccatagaattctgagcggtccgctgcagatcaatgtccagggtgagcatgatagagttgccgggaaccggcggctcagtcaccgcggcatcgattacctctccgttggagttcagcgtaatggttctcttgccgttttgcccgcgaagctgagattcaaacgcttcttcaatcccgcttttcccaatgatgtcattcattgcatagcctttgtctttcagctcggcatattcctccgcataaataggaccgatctgtccgattaagtgagcggcgatatcacctgctacatattcgcggatggtgctctctaccaccataacgccggaaagctcataggaacgttctttgatctggataaccgtagaaaccgccacatccgccgctaatgtatagggagtagtaatggaaaaaccctgccgttccatttcgtagcgaatccccgcaagctgccgctgctgcaggggggtgtacttttccagctgatagcgttccaccagccagctcattacatcatctacattggtgtaggaaccgacctttaaaaaatctttcagcttggaaacttctgattcctgcccttcccgaaaggcaaatggttccgtgtcggtaattggaagtttatcaatccatggatcgccggctgctgttaacagatccagcaggcgaaggatgatttcgttttcctcccccttggtcagataggcccggtccagtgtgatattatacccgaccttattttgtaccagcggccggccgtaccggtcggcaatttctccccgggcggcttggatgatttgggatcgggtggcccctttcgtcgccagttcggaataagattggccatggacaatctgaatttcaatcagtaccagcccgaagaccagacaaattgcaaaaatgatgccaaacaggatccaaacacgattagaattgattttttttcccatgttctctcctttcaaccagataggacgcacactgtcctgcagaccgcagcggcaaaaacggatactggagttattcctgccactgtccatcacacttttctttgatttttcgaatcaaaagcaaaaagagcggggttaaaacagtggtataaatgaatattggtaatacagaatggataaaaatcagctgaatgttctcatatccccaaatcaggtagaagaaaaaaaactccagcaatgcgcggattgccgccaacgcaccgcccaaaagcaatgcgcttttccaattgaccttgatcagaaaaaaactcagtaagctgatcgccacacatccgcacagcaccaacaggccgttaaaaccaaataaggcctgactgcccaaatcgcaaagcaaaccgctgagagaaccgaaaacggcggcggacacaacatcttcgcacatggaaattgccacggcaaatgggagaacccagatgggacgaacgccgaaaaaggaaaaaaagcccgccgtggtttgcatggcataaagaacaattaaaataagcagatataaaaagtattttatggaaatccaaattctctttttccgaatcattggcccgcctccacagaagaggaatctgctgcaggcaaagaggaggtatcctcattcgcctcagattcttctattggggcgtcattctgccctaaatcttcgccaacaacaattccctgcccctcaaaggaggtaatcacaaaaacatccttggcatctgccacagacgcaaatggttcgattaccgcatagagggaaacgccatggctttcctgccggatttctttgatggtgccgattttcagtcctttgggaaaaacgttaccgccagaagtgaggatcatatctccgatggccgccccgctgtcccgaggtaaataggtcattttacattgcccatcctgcgccaaatccacggcgcctaccacaatgccggtatcccgggtacgggaaacataagcgcctacgttcaggctaggatcatgaagggtaatgactctggaataggttagtcccacctcttcaattactccgatcaacccgtcggaggtgatgaccggatcccgcttggcaacgccttgaagcgtccctttatcaataataaagctgccgaattggctgttggcatcgcggccgattaccatggcgggacaaaattcaaaatcagcattttgctctttgatgtccagaaatttttgatacagctggttttcatttttgatcgactcgtaatcgaccagctgatcctgtaattgccggatttcctctttcagcagctcattttcctcctgcagttgctcggttcgcaaatacccctgcagcatgttggtcacgccggaggagagttctgacgcgattttttgaaaaggatataccacagctcccatgatccgctgtgtgaaaatggcaattccatcggtataggcagcgcgcagcataaaagcgcacatcagcacggcaagccccaagatgactttgaaggtctttgtttttagaaaatcttttatgacctgcccctcctttgctgtctttttgatgtcaaacgtaaggccgcaatgaaaaacggccgtgggccgcttttcccctcctgcccaatggaaagaaaattacgccgttttccggcataaataggggaaaacgcggctgccaccgccgcaaaagaacacaaaactcaaaacgggttaaccgcgccggtcatcctccgcaagaacgtcgcgcagtttttccaagttttccagtacggtaccagccccgtctgccacacagtccagcggccgttccgctacatataccggcatgcccgtttctttggtgatcagctgatccagacctttgagcatcgcgccgccgccggtcagggtaatgccgtggtcgataatatcggcggacaactccggcggagtacgctccagcgtcgttttaatggcatccatcaccagttccagaggatcggccaatgcctcgcggatctcatgcggctcaaccatgatgtttttcggcagtccgtctaccagattacgccctttaatctccatcggcgcctcatcttcgtacgggaaagcagaaccaatttggattttcacatcctctgcggtgcgttcgccaatcaggagattgtatttctttttgatatattgaataatggaagaatcaaattcatcgccgccaacgcgtaccgagcgggctgctacaatgccccctaaagagattacagctacctcgctggttccgccgccaatatccacaaccatgcttccggtggcttcggccaccggaagcccggctccaatggccgccgccatcggctcttcaatgatggacacatatttggcgcctgctttctgggtcgcttcctttacggcccggcgttctacttcggttacaccggacggaatgcagatgacaacgcggggacgcacaaaaatcgagttgcccagcgcctttttgataaaaagctgcaacatgctggtcgtgatgtcaaaatcggcaattacaccgtctttcagcggacgaaccgccacaatagaaccgggtgttctgccgatgacgtctttggcttcctgtccaacaaatttaaccgagtcactgcgcacatccaccgcaacgaccgatggctcccgcatgatgatgcctttccccttcatgaaaatcagggtatttgccgtccccaggtcaataccgatgtcttttgtaaaaaacacaaatgcgtccccctttgatattccttgtttattcgaatttcgtaaaattacttaaaaaattctgtatttaccctgcagatctttccgctgctgaccgagcagatttgatgcggcagaatatttgcataccaaggatattatacccgctcacatgggatttctcaacctgtcaaacggaaaaattttctgaatttttcagatttttctgtaaggggctgactgttaaaaaatggttcctttccaagagaacatcctgctgtaaaaccggtgtttgaatgaatgattgttttatactttgcgagattgtaaaaatcttataaaaaagaaccggcgcaccgcttcaaacgttacagagaatcggcgtgccggatcaaaatttttagaataaaagggtctgcaaaggaatgtggccaaaagaatttttgataaaggagattccttgcttaccatttttccaagtggatttttttcaacggatcaatcggctcctgctttggaacggcgtccagatacatgctgcgctgacagtcatccagccgacgagaggccagagcctgcatttgctgctgcgttttttccccaacttgccccagtacagcttcgattgactgcctgctgcggagcactacaaactcccattcgcgaagatgattgttggcagggctttaagacctgcttgtaaaatccgatttacagtatcagccggtacgtctttttctgcaaagtcccgaatggtccgccgccggtagaccgcttcgtaaaaatccatgccatatgcctcctttggcaagctcaaaagttccaccgattatttttctggttctatgaatttaatcaatctggaaaaaatttcgttgagtattgtttttcaatctgagccaagaggtcatttttgcccgatctgaatacagtaattttcctggaatatctgtccgggagatatgcagttgccgtattcccgctgggtcagatcgccggaaaaatcttctgcatcgcagcggccataccagggctcgatgcagacaaaaggtgcatttttgcctgctggcgaccagatgccgaacagcggagcgttgaattctaccgtcacgaatggttttttctcccggtctgccagccaaacccgcccggcttgttttccttcgacgatcagtgcgtcccggtcaaacagagaaggagaaaggcgcaaaaggccatcctgcagcaaaagactgtgggtttgttctgtcaccagtccctgattgttaagcaggcgataggaaaggttgccgggcagatcaaatcccagatagcagccgtccattccgccgccgcagggaggacagaggaacgctggatgtgcgccgatagagaagagaaggcttttatctgaaggattgtgcacattccatagcacacggatggaattgtcttccagctgataaccgatatccagcacgaaggggaggggatatatggcaagcgtttcctcgttcgatgtgagccgaaaccaaatggaagcttcttctttttgcagcagagaaaagtccctgtcccgggcaaaaccatgctgccccatctgatatgattttccctcatagacgaaagatttgttcttcaaactccccacaaaagggaacagaacgggggcgctgcggccccagtaggcgggatttgcgtcaaacaggtattcggttccggctttgtcttttatcgaacacagttcagcgcccgcgtttttcacctgaacggtcaaaaagttgttttgtatggtgtgaatcatcgtattttatcctttcctttgaaaaaatcggaccatgctgcaacggaagttctttggtgatccgggtaaacatacttgagattctgtggagatcggcatcatctgaggttgcggcagcgggcataacgactgccggagtatgtttcctctacgtaccgcagacgatggcgaaatgcaggtcgtcgatttcgtccccataggtgcgtgggacagatacatcagttgacaagccatccccgtatggcagtttttttgcccaacgccattttttgatcgagggcatggtgaaaaaaacggaggtttatttgtcttttcgggcttttgaaaggcaaattcattggaaaaaccgtcacaagccccatcctgctgtttctttcattgtatcatgttgaggcgcttgcggtaagcaaaaaaccggcgatttcccccggcttttttactataccacctgaaaaaggtaaaatttcagataattggtttccggtacattccacaaaattggatgatccggcgactgttggcgcgcctcaatctgccgcagggaaacctttgcgtcaaaggctgccgcacgcagcattttgcagaaaagatcttcggtcatgaaatgagaacaggaacaagtagccagatatccgccgcggggaagcagtttcatcgccctcaggttgatttccttatagccccgcatggccgcttccaccgtctgatgcgatttggtaaaagcgggtggatccagaatgatatagtcgtaagggtgtccggagagagcaggaagcaggtcaaatacattggcggtttcaaagctcattttggattccagcccgttgaggcacgcattgcgccgggccatttccaccgcgtcgccggagatatctaccgcatgaacgtgagaggctccggcttttgccgcattgagcgcaaaggagccggtatgggtaaaacagtccagcacccgctttcctggagccagggcggctgcagcccgccggttatacttttgatccaggaaaaaaccggttttctggccgttttcaaagtctactgtataccggatgccgttttcggtgatctgcgttttggtactgtttggaacagagactccgtccagcgggaaaaagcctttgttttcgggcattccctccagttttcggatggctacatcattgcgttcgtaaatgccccggatagtctgtccgtcttctgccaacaggcgatacagttttggaaacaatagcggctttaaccgctcgatccccagcgacaaggtttgcgttaccaggatctccccaaaccggtccaccgtaaggccggggaataagtccgcttcgccgaagatcagccggcagcagttgatatccgctcccataaccgttttgcggtattcccaggcatgacacagccgccgtctgaaaaagtcccggtcaaaccggtcgttggcgttggtagaaatcacgcggatgcggattttggaacagctgttatagaatcctgtgccaaggtaccggcctttagggctggtcacttcgaccaggcttccgtcctcacagggggattccaacgagataacttccgaatcgtatacccatggatggcccgcccgcaggtgggcttcccctttttttgtgatctgtgctttgatgagatttctggtgtcagacgccatggaattcctcctttttcatcggtttggctggcctttcccgataccagtccagccagattctgctggggctgtctggcgggatgtgtttttccatatagtcacaggggtactcccgacaggtaccgcaatgggacagccctttttgtctggcgcaggaccggataaagcatttttggcagaataccgatagctgactttcctgcgccctacatccttgacagcggatatcctcggcggaaaggggttgtccggcagttgtatatcgctgtgccagttcttctttcatggatttgtcgccgtcggcagcggcccgatataccggacaacggtcgcagaaaaaaccgcaataagccggtaaggtcatcatggcgccccccttttttctatgaactctttgggttatcatagcatattttcagtcaaaaatgaagggttacgctgaaaaggaaagggggggggacgccggagcctcctcccgccacatcatgaaaaaaagccctctaaaaaagggcttttttgttatccagccgaaaactggtagatgaggtagacgacaaccggcatcaggtaaacaacggcgaagacgcctgcagtcagcagggcaaacaaaacacctgccggtttttcgagtggccggattcggactccttttcggaaaagaagccacccggtccataaagtaaagccaagacccagcacgctcagcgcaccgccaactgcaatccccgggggctgataacgcagggaaactgtgttttcccctttttccagcggaattgccatccaagtatcgaatacccgcagaattgggaccgtttgcccatttaccactgcggtatatcccttgtcataaggcagcgacaaaaataaatattcgccgtcctgctgtgcggtggcagtaccggataccgtatcccggccggtctgcatctgcgcggtgcgcatagacgccagggtctgggctaacgcatcatgagagacgctgaacacgccaaacgaccggaccgacacatctttatggaccgttaatgtcacacggacggattgattggcgcgtaccgtcagctcgaatataccgtttaggctttgcgttgggtattcccgattgaccagttccccgtctatataaatggaaaaggccttatagtacggttcgttaagattgttttgcaaagagtcaaagcaatcaaaatagtaagtgcaggtgctgtccgatgggggaagctggtattcaatgatcgaatcgccgctgccctgccgggtaatattgtaatatgcgccgtcccgcgttaaggagacattatgagtataggtaggcggatactcttttacaatggattgcccgctctgtgccaatgtgcgcagcaggtgttctcccgcataggggcgggctgtcagttccagctcctcttccaaagcaagattggcatcggtgacgattcccaaaggaagcacaagatcgttttggcgaatggaatattctccatcggaataaatcgtcgtttccgacacggggtgctgccggtaaacggtatatttctgattgagcagcgcatcgctgataagggttcctcctactgagctgacttccatccaataggcagagtagcccagctttcggatgccgtgcatatagttttccgacgtcagggaggtatagtggttcagagtcgggtagccaatggcacctgtgaggttcacatcgtagttttttcggttgtttttcacccgataaaaactgtcgtcgtcaatttttccttccaggtttgcgacatggacaaaacttccgtctgatttagaggcaaaaaaacaggttccgtaaaaaagagattcagttatggttaacacacacagacagattgccagcaggcgacggctgagcaggcggtgtcggtataaaaacagacccaaggcgcagcatccggctgacaacaggaaaaaaatcagaaaaagctggagggactgatcgtttccccaaagcgtgcgagtataagcagtaagggttttcggataccgattccagaggaaaaaggcagcgaaaatgacaaagcccaacaggaaaaacagcgccgcggtccaaggcgcagaagaacgattgcacggcgggtccgccggacgctgcagaatctgcgccgccaggcacaggcccaacaggacaagaatatacccataccggccgggaaaagcctggtagctgcccgtatgccagattttattgattggctccacaacaacgggaatgagcatcaaaacaaacagcaccagggtataagcttccctggaatctttcatttcccctctggcacagcgaagcgactgaaacaaaaaagcaggaatgacgatagaagtacacaaaagcagcatgccaatcgtatctagagggctaaagagcgctccgctgcccagactttggaacaggtttccgccgcgggcagaaattagatactgtaaaagcgccggcagccagacgactgcggagagcaaagccgctcccagcgtaccggcagccagctggataatccgttctccccggatggtatgcggagagaaaaagaaaacccaaatgccggcggccaaaatcagaaacagaactaccatatatcccaaataaaaattcacggtgatcatggcggccaggcaaaaagcatatggcgctaaggagcctgtttttgccagatgatgcagggaaagcagaaagagcgggaacagatacatcatatccagccataccatattctgataaaacagcatagtatatccgcaaaatgcatagctgatcgatagcaaaacggtaaaaaacggacgcaatttcggaaaaatccggtcaaaaaagactgatgcgcaaccggcgcagagcatgattttcaatagtaccaggatattggcaaagcgcatcatctgccatttttctacaaaagccaccagaaaagtaaaagggctggagataaaaaataaaaaaacaccccagaagttcatgccgccggcattttgcagattgagaaaaaggcttcctttgccttccagaatatctttgaattcacacaaaagcggaacgacctgctggttcatatcgcaccaggaaacggtaaactctccaaaggggaacagctccttcattgcataaagaacgagcagcagcccgccggcggcggccgccgacatggtatgtttcaggacttttttcatgaaagcacttctctcttatttgtcatatggccaatagtgtaaggatttttgaaaggaaaaacaagtcaaaaaatttcaattctttagagaattttcatatctttggcaacctgccaaaaaaattgattcttttgcaaaagaaatatgggactttaccgaaaatgttctactcctgctgaatggaaaactccttgacaaaccaatttgtttccgatagtataactagatggattggcattatataaattcataattggatgaatgtttctaccagctaccggaaatagttgactatatgcgaatcccccagcggggcgagtatatgtttttccgagatgctggttttttgctgtgtaaaaaagagggtattttttcactggatcggatcgtcgaaaaacaggtatttacccaaaatctatctgaaaataaaggaggcgcttcatttgaaatgtgacgttgtgattgttggagcaggtcccgcaggaatctttaccgctttggaattggtgagggggaacacccgaaaaaaaattgtgatggtagagaaaggaaatcctgtgcaaaagcgccactgtccgaaaaacgtgacggggcggtgcgtaaactgtaagccgtattgccatatcaccaccggcttttccggtgccggcgccttttcggacggcaagctgtctttaagctgtgaagtgggtggagagctgccggaactcatcggagaagagctggcccaaaagaccattgagtatactgaccgtgtttacctggaatttggggccgatacccatgtagagggaatcggggcgtcggagcaggtaaaacaaattcggtcccgggctattcaggcggggttgaaactggtcgactgtccaatccgccatttgggaaccgaaaaagcgcaggaaatctatctggcaatccaagagtacctgcaagccaacggcgtggagatcctgtttggatggaactgcgctaacctgctgctggagggagaaaattgccggggtgttttgctgcacaaggcttccggcccgtctcaaaccatggagatttcggctgacaccaccgtgatcgctacgggacggcggggtgcggattggctggaaaagctctgcgctgagcacggcattgcccatgagccgggaacggttgacattggcgtgcgggtggaagtccgaaatgaaattatggaagacgtgaataatgttttatatgagtcaaagttgattggctatccgctgccgtttaaaaataaagtccgcaccttttgccagaacccgggcggatttgtcagtcaggaaaactacgataatgatctggcggtggtcaacggacattcctacaaatcacagaaatccgggaacaccaatctcgcaattttatgttctcacaattttacacagccgtttaaccagccgattgcatatgcgcagaaaatcggggaactaacaaatatgctcggagacggacatattctggttcagcggttcggtgacattttagatggaaaacgtacctggcaaaaggagctgagccgctctaacgtacgcccaaccctgccggatgcgatagccggtgacatcactgctgctatgccgtaccgggccatggtcaacatcatcggttttatacaggcagtagaccatgttgtgccgggttttgccgcggtagaaacccttctgtactctccggaactcaaattttacagtaaccgggttaaaatggatcaaaattttgataccagcatctgcgggttgcattgcctgggagattccagcggttggacgcgcggcctgatgatggcttcggtcatgggcgttttgatgggacgccatatattggaacaagattaaaaaagggggaggggccgacctcccccttttttgctggtagttagagtttcctcagaggatggccgcgatcgaatatgtggatagcctttccgttccttcggcagttccattgattttagaaggctgccgccatattattgtgctcaaaaccttctctaaaatccacggaatggcggggattcgggtgggctatggtttggccgccgcagagatcattggtgatttgatgcgatctcccggcgtatttcatatcagtacggaggcgattgccggggcagtcgcctctttgggtgatcgggattttctttcttgctcctatcaaatggtaaaggaaggacgagattatctgaccaaagagatgaaaaagctgggatgtaaggtctatctgcctcaaacgagcttttcctattttggtgcccatatggatccccaaaagctcaaagcgcaaagaaggaatattctcatcggtgcatttgatttttcccacgtttctattgggagccaggtgcagaatgcagcctttctgtcctgtctgaaagaaatttgagctcaaaaggagtagacagtgttttaatcatcggtaaaatgcttgatgttcgtcataccacttttgcaggcaaaatcttcgagcaatctcttttggaagtccttttcggtatcctcctgatacgcctgcaaagcgtagtccttaaacggctgatagaccgcctgcggtccggtattgtcggcggtatccacaggttcttcaaaaaacatactggggatggaagagaaaatcatcatcagaaaaaccacaaccagaatgatccccttgataacaggcttggcgagcacggcaacagcaagtccggctaacgcccagcactgtaccggctgggccgcccactgcggtccccgctgcagcgcccgcaccgccggctgctgcggctccggctgctgcgatgtgcataaagggattggaaaacacgctgtcgaacatggcggtggccagcgtcagcagcttaaactcatagggagccggggctacatcaagaaagatggcatatgggtcggccatcagctgtaaaagtaggttcaccaccgaacgggagtagacgatcatccccaggaacaacgccgtcttgccgaggatttttaagggatcctccgcttccatgtccagcaccacgccgaaattgcggaacagctggaataccagcatgatgaacaggagcgaaacggcaaaaccaacaatcacctcatggtaatcggccgctgcggggaaatagtgttcgaaggtgtccaggtcaaagcccaaagcgccaagaaacccattgatggcagcgtccagcaggttgagcgccaacccaaacagatagcttactacgtcggataaactccccaatcaaccacctccttgcgacgcagcagatcgtatctttaaccggtgcaagcgccgccctgggtaaggttcaccagataggtcataatgaagcccaggacattcaggatcacccagcttaagaaaatccgcttgagctaagcgcgggaggtggcaaccgcccggtcgtcggtggagaaattcattaaaatcagacaaacgctggccgcaacacaggcggcgatggtggacaccgacaggaacttatcataaaggtccttgagggcaaagtccaaccaggtccaaatatccgagcctgcgcctaccgctgcgtccgcgtcatccccctccacggcaaaggggtggtcgccgtcatcatcgtacaggctgcccctgccgacagccgaagcagcaggctgcgccccttttgaagcaggccggctatccgggcaggttgcctgcataaagcaggtttacttttttcttttatcaatttcatgcgtgcctccttttgaagagggccggacaacgattgtccggccctcttcgtacaatatcaatcgtgtttctctgttaccatccagtcttgggcagatcgcccttgggcttgttgtaggtgatggtggttcagccatcggtgtcatagacccattcgccctcataccggccgcccacatccaccttattggtgaatttctgtttattctccacatcatccagcacccgcacttccagcttggatcctgtggtttcatggaatcccggctgcacctcgccccggaacacaatacggaactcggtcacatattctttagacccaaggccaagcgccgaacgggagcagtcgatctcattgttgacggtggaaagcagatttttctcaatggtgcgccatccgaatttctggttggtgcggatctgcacatccagcttgacccgctcactctactcgccggtccagactttctccaaccggactgcctcggtgggcagcttattgtaatatgatattgaggtgaattataatgttcgaatcctcacactctctcggtgatgttataaaacgtgcccggctggagcaaggattgacccaaatcaatctggcgggacgtattgccattgattccagaaccattcttaatatagaaaactacaatggaaacccaaaaatggaggtgctttttcctttaatccgcacgctcaaaatagacccatggccaattttttatccggaattagatggtcaaaacgcatcgttccgtcaaatgcagttgcttttaaaggaatgcagcgaggaagagatggaagccctgctgccgatctgcaaggcggcgctttcggtcctgaggtcaaaaaatgtgatcgaaataaaataggcatatagaaaacacagagcctgctctctcctgtaagggggattgcaggctctgtgcttctaagcatccggctcttggattggctccatgatttttatttccttcttgcattttggacagtaaaggggaaatttgagcagaacggtgtcctctttagttttttgacggttagcttttgtccttccgattggcagaatctgtttccatgattttctctacattaatccacatggttggcttgattaagcacttaaaagccatgtaaaatcagaccagcaatcccgcttttcccctccctttctaatccatctttgctgcattccaggcatctgtaaacggatcgtagacatatatcctgccgcttggggaaacggcatagaaccgttcgcggacaaaggtctccccatgatcagtccccagagcgatgacaacacagggttcctccccgatgacttccgtccctccttcaaagagcatggtcatcccctgttccagatagccctgtacctcgccgaactcacagaggaggatcgccgcctcttcttcggtcagctgcccatcggatccatagatgcagggctgcatttttaccacccggccccaatcatcggtctgcactgtccagagggcgccgtccgacaacggccaatcgggcaggtctgataaatccagctgcccggccgcctgatagggcaatgcctcataccgaccgatattgctgccatccgccattgcgtcgtccagccagacggtctgtgtcccatagtcgattttccaagcggccgcacagaaggtttccgcttttcttccctctccctgaagctgccagccggtatatcgtttccagatagggtacatctcgttaaaatacagggaaaacacgctctctccgttattgagctgcaataatcccagtacaacctctccatcacagagggttttctgttcaatccgataatccccaatagaattcatctggctaccgccagcaggcttatcccgattcttttataaagcacagccctcacatccttgccgtccgtcatggatcaaaacttcccgctggagtgggacgacccgctactgttgacggttgtacctccgctgcttgtacctccgctgttctttgggggttcgatataccgcttcgagcgggtggtgtgggtaaaccgatcctgctgtcccgtcagcaccaggccgttctggtcaatatactccttcgccgccttctgcatctttgctgttttcatctgggccttgaaaacggagcaaaccccgaaagcgatcccaagggggatcaggatgccaatcgccaaccccggaaccgggctgcggtcgctgcccacatcgaagggctttccttcacgggccagctccaggtattcttcacagcagtccagatactctgtaaatccgctgtaccaatcgtcatccccaaattcatccaggaaccgttccgccattttctcttttccgtagtcggtaaaggcgatgttcccatacaaggacgcgtgcatcatggaggattcggatggaaacgatgcccttgttatcacgctggatttcaccaacaacagcaaggacaacgcatcctacctctggtcggtttccgaaacagctatgcagaatggcgtggaactggagattgccacagtctttaccggtccagactcctatgatacggtgattgaaagccaatacctggaagttgcaccagggaaaacccttgaggtttgcaccccttttgtcctaaatgatggggcaagcgaagtggaagtaaccttcgaggaggcgtttggcagtaaaagcggcaaaattaccattgacccatccgaactcaaccatggatccgccggaaacagtgcatctggtagcgctatatccctaccgactgccggaactggcgatctcatgctcgattggtggaacggcgactggtacggctgttggactatgaccggctgctcaggttattacgcagatgcgggcatggaaggacaatcctgggatatctgcggtgcgattgacatcggcgaagatgatatgggcaccgtcaccctctgggacgaagactacaccaaggcagagccgatggcttcggcagcggtgagcctgaatgaagacggaaccaccgcgtacggcacgattatgtctgagggcggctacttcaccgatatggccctggagcacgcggactggatcgttgatccgggcctggtggattttgtggacaccataattatctccggcgactatgaaaacggcgcagatgcgttcacctatgatatcatcctgcgccgctggggcacctactgggaaatcgatatggatgaagcgaatttccccgcccactataacgattggtatgtacctctgatcgacgagggcaaacccatgcccgacagcatcggcgctgacgctccggcgtgaagcggcaataacagcaccccggcatcggaccgggctggaaacacatccggaggggatggtatcgtgaccgaagaataggtacaaaagggttatgtatggatgaatgaggtggccaaggacattttcaacaccacctacgaagagatagtggattatttcggcgtggaaggcgagttcgtcaaggaagagtacagcgaccacatgaaggtaaataagcgttactacaagtggatctcgtcagaaaacccaaaccactttatctacgtcaacttcgatgaagacgagtcgggtgtttatacggtcagcggttaagggaatggctcccgctccaaacggggcgggagccttcggctattggggaaaggtgggacaccgtgaaaagagacattgttattatcgcaattagcctcctgacatgttttcttggtctttccgcctgtaagtagggcagcgatccggttat

SEQ ID NO: 3174 - DNA, 2198 bp, Unknown
  16S sequences of unknown bacteria
atttcattctatcacatttggcactatctcgctcctttttctgtgcggtgttgccatagcctgcggccggacaacgaaccgttttccaccttgccgtagaaccggtccagcacgttgcggacgctgccgcagatattgtgccagtagacgggagagccgatgacaatggtatccgcctgacgcatggcggcaataacggcgtccagcccgtcaccgggaaggttctggccaaaagcgccgatggtgtagtcgatgagatttaaggtctcatactccttgcctttcagcagtgccgccgccaatgcggcggtatttccgtttttgttgggacttccgttgatgaataaaatgctcattacaatgctcctttcagtctgatcattacaatcccagcccatcgacccaagcctgtacatcagcgctggacacgccggaggagaaacgctgaccctcctgccagtcaccggtgccggccatgtcggccagcagactgccgctctgacccatgccggaggaggaagaagtggcaaagggaatgacggtcttgccggtgaagtcgttggctttcacgaaaccatccacgggccaggccgcaatgccccaccagatgggatagccgatgaacacggtgtcataagaatcccaatcgggcacctcggtggtggtcaggggcacatcccgcagggactcgtcgtcgtgctcccggctgacacggctatcggcgttcgtccaattcagatcatcactggtgtaaacctcggtgggaacgatctcaaagaggtcggcgctgacggcctcggcaatgtcctcagccacctgcttggtgttgccagaagcggagtagtagaccaccagagtttttccggtttgcgtttccggctccgattcggaaggttccgaagaagataccgccggttctgcggaagacgcagaggaagtgcttgacgggtttccggcagttccgcaggaagtaagcccgaacaccagcacaaggctcataaaaaaggcagtcaattttttcatgataaagtcatcctttcaatcttatttgcattcgcaaagaatgtcgtaaatttcatcgtgggtcagctttttgcagcacccggcagtggtattggtggagtcggcaatggcacggaagtccgtatcggcggaaatgctcagctcggcaaagctggtgggcagaccgatttccttgatgaagctggtcaatgcgtcgatactggcggcagcagtctcctcatcgctgcctttgggcgcaatgccccagacattctgcgcccagcgggcaaaccgcgccgcgccggatttgtaaatatggcggtacaaaaccgggtggattactgccagccccgcgccgtggttgcagttagtgtatgcgcccagctggtgctcaatctggtgcgcctgaaaatctgtaacctttccgattttcagcacgccgttttccgccatagaggaggcccaggccagctcgctgcgggcatcgtaattctccgggtcggtcagcaagacccgaatgttgcggatgacgctgcgcataacggcctcattgatgtcgtccgacaggttgttctcatcgggcttgccgaagtaggtctccatggcgtggctcagggtatcaaaagccccggaaatgacctgcttcataggcgaggacaggctgtacgtaggatccaggaaagcaaattccgcctgagccccccacagcgcacccttgatcttcttttcctcatgggtgatgacggcgccgttgttcatctcgctgccggtgccgaacaccgtgacgatcgtaccgaggggaatgaactccgaggggtaggtgtgcttggtgtactgcatttcccagatgccctcgtccagttttgcctgtgcggagacgaccttgcagcagtcggagacgctgccgccgcccacggccaaaatcagatcaacgtggttttcccgggccagcctggcgccctcctgcaccttggcataggtggggttggacatgatcccggaaaactccaccacccgcttgtccttggcgctcagaatccccatcacctcatcgtagacgccgttgcgcttgatggaaccgccgccgtaagccagcataacggtgtcgccgtagtgatccagcaggcagcccagatactccttcacgccgcccttgccgaaatacaccttggtcttgttttcaaaaataaagttgt

SEQ ID NO: 3175 - DNA, 1692 bp, Unknown
  16S sequences of unknown bacteria
ggagccggacttgtggccggcaagaccgccagggccgagtgcggacagacggcgcttgtgggtcagaccggtcagggggttcgcctggtccatgaactgcgagagctgcgaggaaccgaagaactccttgatggaggccacgatcggacggatgttgatgagcgactgcggggtgatctcgtcgatgtcctgggagctcatgcgctcacggacgacgcgctccatacggctcatgccgatacggaactggttggcgacgagctcgccgacggtacgaatacggcggttgccaaagtgatcgatgtcgtcgaccttgaagccctgctcgccggcagcgagggacagcaggtagcgcagcgtcgcgacgatatcctcgtcggtgagcaccgtgacctcttcctcggtggtgaggttgagcttcttgttgaccttgtaacgaccgacgcgggccagatcgtagcgctgcgggttaaagagcagaccctcgagcaggctgcgggaagcatccacggtgggaggctcgcccgggcgcagacgacggtagatctcgatgagggcgtcctcgcgagtgagggcggtgtcgcgctccagggtgcgcttgatcacatcggagttgccgagcagctcgatgatgtcatcgttggtgacggcaatgccaagggcgcgcaggaacatcgtggcgctctgcttgcgcttacggtcgatggagaccatgagctggtcgcgcttgtcgacctcaaactcaagccaggcaccgcgagacgggatgatctgggccttgtagatctgcttgcccgaatccatctcggagctgtagtacacgcccggggagcggacgagctgcgagacgacgatacgctcggtaccgttgatgatgaaggtgccctgatcggtcatcatagggaagtcgcccataaagacgagctgctccttgatctcgccggtctccttgttggtgagacggacgtcggtcagaagcggggcctgataggtcatgtccttctcgcggcactcctcgacggtgtgcgcggggtcgccgaactgatgctcgccgaaggtaacctcgagaacatggttctggctctggatggggctggattccttgaacgcctcacgaaggccctcgtccttaaaacgctcaaaggattccctttgaacagagataaggttggggagctccatggcctccgggattttcccgaagctgacgcgcttgcgctcagtggcagtgtatgcgtaggtcaccaggtttttcctccttcacggaaatgctcggtgggttggcgaggcatagcttcgccagttatcgcaacctaatagtttatcaggtaccgaccgttgggcaagaaaagccttgacgcgattgagtttttggagtagcaaagtttttcgacagaaaacacgcaggtagatgtatatgtatcgaacatctgttcatatattttctgtgaacagagagccggcaatcgcagctcttataaaaaacgggcgcgaaccgaggtccgcgcccgtaaatgtcgatgcccgaaggcttacttgcgcatcaatccgccgcgctcgtcgatggcgtcccagaaggcgctggcaaagcgaggatcgcttgcggccatgagggcgttggtggccatccagccagagggggtgccggtgtcgtagcccgacagcgggtcgataacgacagcgtacatagcc

SEQ ID NO: 3176 - DNA, 11126 bp, Unknown
  16S sequences of unknown bacteria
gaacatgttcgagtatgccagttcgcagacctcgccgcgcatcggcaagccatatgcgcctatccttgaccttgcactggagcagcttcagctgcatagagaagatgtcgtcctgatcggagacaatctggaaacggacatccggctggggacggacaacggcgtcgagacgatcttcgtgaccagcggtgtgcataagagagaagatatccagcgtttgggcgtcttccctgaccatgtggtggacgatctgcgggaactgatcggctgagatcgcgaattttgtttgccaaaatgatgatgtgatgctataatgggaaagtaaatccatataaacgggtaaaatgacagaaagggggagtatggtatggaatttttacaggttttgctgatgttggtagcggtcgtattgataatactctctttgctgcagggcggaaaatcagatggcctcagttcggcgtttaccggagctggtgatctgaatctgttcgcaaatacaaaagagcgcggtgccgagaggatcatttccaatgcaaccatggcagtggggatcttgttcttcttcttggtcgtgttgattcgtgtattgtcataaaggccctggatgggtctttttttatgaaaggaggggatcagggtgcgtgagcagatattgaagctgatggataagtgtcctgaccatcgattcagcgcagaggagatcagcgcgcatctccatgtgcagggaagcgcgcagcatcggaagatgatgcgggaactgaacgcgctggaggatgaactgacgctggcgcgggatgaaaaagaggggtatcagcgggcggaacgccttggttattttcaaggcaggctgcgcgtcaatgccaaaggattcggctttatcgaccgggacgaggtcagctattatgtagccagagaacatctgtgcctgggcatggacaatgatctggtcctggcccgcatattgcagggcggcggccatgagacggaatgtgaggtcgtccgcattctggaacacggcagcacgaagtttgtcggcgtggtcaagaaagatcggaaatcgttttatttcctgccggacaaggatctgggaagacggcgcatcacggtgagcaattatgcgcagtttccgctcgtccatgattccaaggtgctggtggagatcgactcattcggcagagagctgagcggacacatcaccaaggtgctgggatataagtacgatccgggcatcgatatcctgtctttgctggtggagaatgacatctatacagagtttgacaaagatacgctggaggagatcaggaacgtgccttctgcgatcgatgagcgcatgatcgacaaggcccggcatgatcttcgggatctgcagacgatcacgatcgatggggacgatgcgcgtgactttgatgacgccatcagcatcaaaaagatccctgagggctaccggctatgggtacatatcgccgatgtctcttattatgtgcggcctggcacggcgctggacaaagaggcgtatcggcgcgggaccagcgtgtatgtgacagacagggtggtgccgatgctgccgcaggtgctcagcaacggcatctgttccctgaatccgcatgaggaccgcttcacgatcacggcgcagatggatgtggggatggacggcgcggtgcgcagcgcacagatctatccggcgatcatccgcagcgatgagcggatgacctatggcaatgtcaaccggatcatcgccaaagatgaacagatggtccgccgctatgcgcatctgctgctcatgatcgacaatatgatggggtgcagtgcgctgatccgcaaacggcgccatgcgctcggcgcggtgaatttcgagacgcgcgaatcaaaggtcatcgtggatgaacagggcgtgccgcaggatatcgtcctgcgcgagcgcggcgaatccgaacgcatcatcgaggacttcatgatcgcggccaacgaatgcgtggccgcttacctgaagtggatggatcttccggccatgtaccgcgtgcatgagcagccggagccgaagaaggtgcgcgcttttgcgaaggttgccaagacgctgggctattcgttcatcgtcaatgtcagccacgtctatccaggacagtttcagcagctgctggaggaagcgcagggagcggacaattatgatgtgctttccgcatatatgctgcgcagcatgcagaaagcccgctatgatgtgcagtgcctgggccatttcggcctcggcctgaaggaatatctgcattttacctcaccgatccgccgttatcccgatcttgtcgtgcaccgcatgctgcgcaagtatgtgttcgcccatgatcaggatgcttcggccatgaagcgcgacagcgaatggatcgcacaggctgccgagcatgccagcgtgcgggagcgctgtgcccaggaggccgagcgcgatgtggacgacatgaagaaggcgcagtatatggaacagtatgtcggcaggacatataccgggaagatcagcggcatcacccgcttcggcatgttcgtcgagctggacaacacgatcgaaggcctggtgcatatctcgtccatgaaggatgaccgctatcagtatcatgaggaagcgctggcgctgatcggcgagcatacggccagacagtaccgcatggggcagaaggtgcgcgtaaagtgtatcggcgccaaccgttggaagcggcaggtcgactttgaattggtggaaaagagcggacgtgcggcgcgcagtccgcgtccggtccatggggcaaggcggcgtccgcagcgcaagcggatgaagcgtgcatgaagcgcttgctcgctgccctgctgatcttgctgacactgtgcggctgccagcaggccggccagcaagaaacgtcggatgacccgctcccgcagcaggcccgaaaggaagtcagcttcttagctgccggagacaacctgatccatggtttgatctacgagagcgggctgcaggaagatggcagctatgcgtttgaagagatgtatgcgcgggtgaagccgcagatcgctgcggccgatgtcgccgtgctcaatcaggagacggtctgcggcggaagcgagctgggcctttcttcctatccggcattcaacagcccggtcgagatcctggatgcggcggcggacgccggctttgactggctcaccacgagcacgaaccatgccatggatctcggcgaacaggccatcgtcaaccagctgcagcacatcaggacgcatcatccgcagatggtcgtgaccggtacgcatgacagcgaacaagatgccggccagctacgggtcatcgtgcgaaacgatgtgcgcatcggcatgctgagctacacatacgggctcaatgggatcgcattgccggatggcaaggaatacctggtcgatctgatcgatgtggaaaagatcgcggctgatctggcggcgctgaatgaagtgagcgacgtgcagatcgtcgggatgcactggggaagcgagtatcagttcgaaccggatgagcagcagcgcgatctggcgcagcagctgagcgacatgggcgcggatgtcatcatcggcacgcacccgcatgtgctgcagccgatcgaggtgatcagcggggaacagggcaacgatacgcttgtcttgtattcgctgggcaactttgtctctgcgcaagatgtgaacagccgcatgctgggcggaatggccaaatggacattggtctatgaaccacagacgaaggcagtctccattgaagatgtgcgcttcgaaccgacggtgatgttcttcgatgccgccgggaaagatgtgcaggtctggccgctgtcccagtatgatgatacgctcgctgcccgtcatctgctcagtcagcagggagaagacatgtcaaagcgatattttaccgatctttgccgagagatcatgggcggcatgatggaagaggaggatgaagatgtcagagcgaaaagtgatcgcatataaccggaaagcatcgcatgattattttctggaggaccgctatgaggccgggcttgagctgaagggaacggagatcaagtcgatccgtcagggcaaggtgcagctgaaggacgcctatatcagctttgtgaacaatgaggcgttcatcaaggagatgcacatctccgcgtatgcgtatggcaaccggttcaatcatgatgagacgcgcatccgccggctcctgctgcatcgggatgagatccgccgcttgcagcagaaggtgcagctgaagggctacacggtcgtgccgatctccttgtatctgcataaagggctggccaagctggagatcgcgctggccaagggaaaggatctgcacgataagcgcaacgcacagaaggaaaaagatgccagacgcgagatcgaaaaagcattgaagaatcactggtagtgtgctacactatcagtacacacggggctgtactggtttcgataggggtcagtctggtgcggactacagtcgtgtggctacgtaaaggccgcttaaaaataactggaaacaatttcagaactgcgaataacttcgcatttgctgcttaattaaccgataacggtctgcagcctccttccgcgttttgctttcgggcgcggaagttgagacaagatacgggagccaggcgcatgcggaggctgtccggacgcatgcgatggaaatctcaggacagaacgtcacagatgttcgttcatagcgttctgtgatctgatcattatgaactaaactgtaaacgttcgtacgggggacggcttttagacaggggttcgactcccctcagctccaccaaaagtaccttactcgaactattatggctaaaaaaatttgagccgttcgagtaagttgacatattcgtggaattatttatggtataaagaccacatccaaagattttctggatgtggtcttttgctatgtctatataatagctcagcttgcttgagcaatcctgtgctaatctattaattcgtataatatcatctttaaccggttcaagaatctggtcgaaaggtggcttaaattctgcatctaccttaaattccatatctgcgtcgttactaatatagaacttctcgaatattgcttgattcatcagctttttaatttttttcaaaaaaccacctgattgtgtggggtgctttctttttagaagtgttactataaagtagcttaaacaggcttttatcttatacgcacaaaaaggaggagtttttgatgaaactaaaaaaatggggagcgctcttgcttgcattatgcatgatagtcatggtgttcccgacaactgtaatggcgaatggagattctcttgcagggccagatgcggaaaagaaggtcatagaaaatgatcttattgttcagctcccgtcttcgttggatgatatgattggtacgtcagctggtaatggtgattggctggctgtcgcggcagaaccaacgtgggaggacggttttattcttgattatgtcgtacccactcaggaattttacgatagcaccggtaaaaaattaactgctgctgacacattccagaataatagccgatatacgatgaaaatgacgttccaatcatttgagtcttatcatggagattactattatgtattgtctgggaaaaacaatgtttatgtacaatatatgaatggcactggtgaaagagagcctatgaaggttaccgtaaataaagatgagaatggtaatccggtaatcacggcaacttacagcttctcaattggcacgcctccggaagaaccatcacaagaggcaacctatgaatgggttctttccagatgggacgactctgcaaatacacctttagacaaagtaactgcagtcattggacagccaatccaatatagagcgcaggttattgaaactcgcccggacggaacgaagtcacctgtgagtacagaacaaatggatcttcaatggggctacacttatgtaactactgatattgacatcacagtgacgacatactctaccggttatatatttactattaccggaaataagccgcttgaacgtcctgatggtttaatcttatatactgaaaacgtcggtcctgatccatgtgtagaagcatgttttgattttgaagtagttgagcctacagagattgaatcagacacagtttacaatatatccgataaggatgggcaagatttatattatcggtatcggcctacggatgcgcctgatgatggatcttaccgatcttacactctttggacagatggtggaactgcagaagccacaggtaatggcatttacgctggggaaaagcgttataatacttaccgcagacagggcaccgatcctattaattttcagttttctccaacaaccgatcatgctcgattcgaacttgttgaatcaaaacgagtgacaaaaatcgaatttttgtcagtgccggacagcatgattcaagatattcgtgaaaacggaagcaaagcgaatcttaacggatttacatttaaggtcacatatgcagacggcagcacacgaacatatgagtattctggaaaaaaagatgataattatttcgtttatcatatggattggactccggacgggaatatatatgattgttcctacgattcagaaaataacgccataagcattttgggattcaaagaacctgatgccccgacaatcgaatactataagatacctgatgagtcaaaagtcaacattaaggaaggtctcagtgaagtgaccggtgatcttggaaatacggaatacaatacggttgaaaagattgaaaacaaattgacagaaaccatcgtttccaatgaaggttacacggaagacaataccatgctttatgacattgagtttgtaacaagcgaggatggcggacagacatgggttccggttactgctgagaacttcccggaagaaggaattgtggtaacacttccttatccagagggaaccaatgctgacgagtacgattttgttgttacgcatatgttcgatgaagatgtgaatggtcatcatgccggagaagtggagacccctgaagtaacagagagtgagaatggcatatcgttccgcctgatgggaacctctcctgtcatgatcggatacaaaaaagtagctgcgactcacacccactcttatggagaatggacggattgtaaagatggaagcaatcaccagcgctcctgctcctgcggagatgttcagaaagaggctcacgtttgggatgacggaaaggtcacaaaagaggctacaaaggatgcagaaggtatcaaaacatatacttgcaagacctgtggtgcaacaaaaacggtaagcatccctaaattgacttccgacacaacgccatctaagcctggtgatcctacaaatccgaatacggatacaacatcaccagagactggagattcagcgaacattgctttatggatagtagtcatgctcgcatctgcggctggattaagctgtacttattttataaaacgcaaaaaggttaataactagttaaaagtaagatacccacaagccgaatgatgcttgtgggtattgcttattattaaaaaggccgaataagctacccttttgtgtggggcgaatttgatctttcatgctataatattcttattttattctaaggaatcatctttgggcaaggaggggaatagaatgggcaagcgaaaaaaatccgttgtccggctttttgcggctacggcgttgctttttgcagtctccgcataccggcagctcagcatgcgatacttgccggaggatgctctgcggtcatatcttgtctgggtggtctatatgctcctgcttttcggttggcaatatacgatcagtacgaaaatcacacaaaaaaccatgcgcagccatctaactgcgcaaaatatcgtcagtatcctgtatttaacggttcgctttgtccaggatgccttcctctatgtcaatattccgtggatgcgctttaccggatacttcatcaatatcgcggctattttcatcccgctgttcggtctttacggcgcattctatcttggcaaggcagacgattatcggatcagcgaaaagtggtatctgcttctgattccggcgtgccttttaagcgtactggcgctgacgaatgatctgcatcattttttctattacattatgccggaggaatcccagccaaatttgtattttcatccctacatcggaacatatatcgtctatatttggggacttagtatcatcagttatcaggtatatgtaatctaccggcgcaatggcacgacgaagtctgattcgctttaccgaaagctgattcctttttacgagccgattctgctgctcctattcagcattccttatgcaactacagcctatgtggttcgatttgagctggtggaatattcagcaggactgatttttattcttgtgctttgctggcagatttatatcctggtcggactgattccagtaaatacacagtacgaggaagtgttccggcggtctacggtggctatgcagattcttttaccaagcggcgagacgattgcagcatcggaaaacgcggcggagattacgcctgctatgttggaagccctaaagcaggagcagcgattttttgctacggaagatattaccatgcacctgcatcctgttctgggcggatatatggtctggcaaacagatctctcgcagatcaatcatgctttacgggagcttcagagactgaatgcgaaactggaagaagaacaagatctgctggcacaggaaatccatatccaatcggacgaagcaagcgttcaggcgcgcaatgatatttatgacagcctatcctcggaggtgtctgggcagcttaccttgctgacagagcttttatcgaaagaatccctttcagagaacgactggaaccgcatttgcctcatcggcacgtatatcaagcggttctgcaacttgcggctcacttatcaggagcagcagacgattccgatgggtgacttagccattagcttgcaggatatggcgaaatgcatgaagaatcttggaatcatgacaagtttggatttttgccccacattgaatttagaaccagagctgattcttctcattatgaaaactttggaagggattttagagaaggcagattttcgtttgtcttctgtggtaatccaaatcagcaacacggtttcctttgagattaccggtacagcctgcgagtttatttcccattctttggaaggcggatatggacttcaggcagaaaaaatccaagcaggatatcgacttctgctcttgcaggagggagaggtggtgtagtcatgaaaaagaatacgtcagctaaaatgattaaaaaagccatcgactcttaccccggcggaatctgcttctccgcattggatgggcgggtcattcttgttaatgagaagatgaatcagctggtgctggagctgaccggacatacaattctgaacgaaaaggcggcgtgggaggaactcacaaactttgccaataacggcaaggcggaaaagctaacccaatcctggctgccaaaagatacgaacaatgaaaatggaagcacccaccaacagttgttcttccgtttctccgacagcttggtctggcgttttgagctgagatttcttgattccaataccgttcagattgaggcggcggaaattacagaactctaccggctcagcgaagaactgtatgaaaacaccatccgactgcaggagatgcaaaagcgacagaaagccttgctggacagtatcgtggaagttaatttaaataaagagattcttgctgcaaaaatgcatattcatgatgagctgggtcactgtttgttggccaccactaaggcgattaccgaagacagtctggccgagaacgctgacgtgctgcgggaaagctggagcagcaccattcgcgatgtctccaatattcctatggcgtggacagttcccgattcctctctgcaatctgaactgcttcaggttgcggagctgattgactgtaaggttaccttccttggagaacagcccaaaagccgcaaggcattgcaattactatatgccgccgttcgagaggcactcaccaatgcggtacgccatgcggatgctacggaactgacggtaaagataaaacaagacaagcaaaggtatcatatagagatatccgacaacggcggcgtatctgtttcaagtattaccgagggtaatggcctcagcgcattgcgtcagcggctggagcaggaaggagctaccctgaaggtactctgcgacaacagtgtttccctgcttgtggatattccctttgattttgacgaagctcagaaaggaggacgaaaatgatacaggttttagtagtagaagattccaggattacccgggacgccattgaaagtcagattgccaaatcagaaagatatgtcctgtacgcctccatagaaaatgcagccaatgcagaaattgcctgtctgcgtggaagcgtcgatttaatcttgatggatgtatgtacggctgacgaagaatccggcctgaaagctgcggcaaagatcaaacagtacaatcctaaaatcaagattatcattatgacctccatgccggaacattcctttattcaaaaggcaaagacatgcggctgtaatggcttttggtataaggaatatggcagcactgccttgatggaggtttgcgaccgggtgatgaatggtgaatatgtttatcccgaggatacgccggtgattcgcattggatacagcaacagcgctgagtttaccagtcgggaatttgatattattcgggagctggcgcaaggcagaaaatacgaagagattgcggcagatctggatattacgctaaatacagtcaagtaccacatcaagaatatcttgcagaaaacgggttaccagaacaccttgcagcttgtggctgaggtggtagaaaaaagattgattttaccgaagtattaattaagaatccgctggacttcctgcaatatatgccgtaagctatacttctaaaaaggaaaggtggggtttattatggtttgtacttatgaggaatatttgaagcggccaaaagctattacgtttgcaaaaatgctgaagtgaaaaagtaaacgcaactctaataaggcaaaaaatgatcgttgcact

SEQ ID NO: 3177 - DNA, 32759 bp, Unknown
  16S sequences of unknown bacteria
tggtgatggcagcggtcagagtggtcttgccgtggtcaacgtggccgatggtgccaatgtttacgtgcggcttggtgcgttcaaacttagccttcgccattgtaaaaaccctccattagaatggatgtatttcgttgcagacgccctccccgcggcgcatgcgccgcggggaagcacctgccgtgcttatttctttcccagaaccttctcggcgatgttcttgggcacctgctcgtagcagtcgaactgcatggagtagttgccgcggccctgcgtggtggaacgcagcgcggtggcgtagccgaacatctccgccagcgggacgatcgcgtcgatgacctgggcgccgtgacggttctccatgccctcgatgcggccgcggcgcgcgttgatgtcgccgatgacgtcgcccatgtactcctcgggcacgacgatctcgaccttcatcatgggctcgagcagcgcgggcgcgcccttggtcatggcatccttaaacgccatggagccggcgatcttaaacgccatttcagaggagtcgacgtcgtggtaggagccgtcgatgacgcgggccttgaagtccatgacctcgtagccgcccaggatgccgttcttggccgcctcctggatgccctggttgatgggctcgatgaactccttggggatggaaccgccaaccgtggcgttctcaaactggtaacccgagccgggctccaggggcgtgaactccacaatgcagtgaccgtactggccatggccgccgctctggcggacgaagcggccttccgcgcgcggaacagccttggtaaaggcctcgcggtaggagacctgcggcgcgccgacggtcgcctcgaccttgtactcgcgcttgatgcggtcgacgatgatctccaggtggagctcgcccatgccggcgatgatcgtctggccggtctcctgatcggtgtaggtcttaaaggtcgggtcctcctccgccaggcggagcagggccatggtcagcttctcctgaccggccttggtcttgggctcgatggccacgcggatgaccggctccgggaagaccatggactccaggatgacgggatggtcctcgtcgcagagcgtgtcgcccgtggtggtctccttcaggccgaccgcggcggcgatgtcgccggagtagaccttctcgatctcctcgcggtggttggcgtgcatctgcaggatgcggccgaagcgctcgcgcttgcccttggtggagttgtagacgtaggtgccggcctcgcgcgtaccggagtagacgcggaagaaggcgagcttgccgacgaacgggtccgccatgatcttaaaggccagcgcggagaagggctcctcgtccgaagaggggcgctcggtctcctcgcccgtgcccggcaccgtgcccttgatgggcgggatgtcgacaggcgagggcatgtagtccacgatggcgtccagcagcttctgcacgcccttgttgcggtaggaagtgccgcacaggacggggacgaacttgttggcgatggtgcccttgcggatggcggccttgatctcgtcgatcgtcagctcctggccctccaggtacttctccatcaggtcgtcgtccagctccgcgaccttctccatgagctcggcgcggtacatctcgacctggtcggccatgtccgcggggatgggttcgtcctcgatgtgggtgcccaggtcgtcggtgtagacataggccttgttctccacaaggtcgaccaggccgacgaagctggactcgctgccgatgggcagctggatcggcaccgcattgcagtgcaggcgctcgtgcatcatgtccaggacgttgtagaagtccgcacccatgatgtccatcttgttgacatacgccatgcgcgggacgccgtacttatccgcctggtgccagaccgtttcggactggggttcgacgccgccctttgcgcagaagacgcaaacggcgccgtccaggacacgcagggagcgctcaacctcaaccgtaaagtcaacgtgcccgggagtgtcgatgatattgatgcgcttgccgttccaatggcaggtggttgcggcggaggtgatggtgatgccacgctcctgctcctgcaccatccagtccatggtcgcggtgccatcgtgcgtctcgccgatcttgcggttgacacccgtgtagaacaggatgcgctccgtggtggtcgtcttgcccgcgtcgatgtgcgccataataccaatatttctggtattttccaaagaatactctctgttagacacagccgtatatcctcctttcggtaggaattgagctgccctgcgcgtgtctcacagagcagtcaagtctcttctgcatgttaccaacgatagtgcgcgaacgccttgttggcctcggccatcttgtgcatgtcctccttgcgcttgacggaagcgccggtgttgttggaggcgtcgatgatctcgttgcacaggcgctcggcctgggtcttctcgccgcgcttgcgggagaactccaccagccagcgcagggccagggtctggcggcgctccgggcggatctcgatgggaacctggtaggtcgcgccgccgactctgcgggccttgacctcgagcacgggcatgatgttgttcatggccgcctcaaaaacttcggtcgcttccttgccggtcttctcggcaaccgcctcaaaggcctggtagcagaccttctgcgccgttccgcgcttgccgtcgtacatgacctgattaatcaacttcgtgacgatggtgctgccgtagatgggatcgggcagcacttcgcgcttcggtataaatccacgtctgggcatggatattccctccttacgtactcgctttggctcgaaaaaatcggactgcgtggatcgacggggccagaccgcgccgcgcgccgcgcaacctgcaacgagttgcccggctttcccaaagcgctcggctcagcattccgcgcacggccccggctgttccgaaccggagacgcacggacctttcggtcaggctttgggcgggtggaatctgcgtcccttcttttcaggccgtcttacttcttcgggcgcttggcgccgtagagggaccgagcctgcatgcgcttggcgacgccagccgcatccagcgtaccgcggatgatgtggtagcgaacgccaggcaggtcacgaactctgccgccgcggatgaggacgacggagtgctcctgcagattgtggccgatgccgggaatgtaggcagtgccttcaattccgctggtcaggcgcacacgcgcgatcttgcgcatggcggagttcggcttcttgggggtgagcgtcttgaccgacaggcacacgccgcgcttctgcgggcagccctgcaaaatcggggacttggacttatacgttttgttctcccgacccttgcgaatcaactgattaatcgtgggcacggaagcacctccttccaaaacaaagcatgatatatcccaaaggcgccgcaacccaatggcgtccatggaaacgaaagaaaagtcaaggctccttcaggagccccgcggcggcgctgccgaccgcgatgccgcacatctgcccaaggcgcgccatggtggcgacctcggtcacgggcacgccctgcgactgggcgcagcggacgatctccgtccgcatggcctcctgcgcgtcccgcgcgaggaagaccctttggacctcgcccttcttcaggtgcttcatgagctggcggaagccgacgacgcgtcgcgaactcacgcgcagatccgcatccatgtccgtttctccctcctcattttttctccaaaatgggccggaggcatacgagcaccatcatgtattttaccatcggggttgttctgtgtcaatgatttcatggaaacttaatcggaaacccacgaaaaaacagcagtttgaccttcttcttgtgcaaaaagccgtcccacggccgcgtggtgcggccgcgggacggttcttccgcttcacttttcccgaaagcgtccgggtttattcgcccagggtctcgtgaatctccaggttgtggtagcgcttcatgcccgtgcccgcggggatgagtttgccgatgagcacgttctccttcaggccgatgagcgggtcgaccttgcccttgatcgccgcttccgtcagcacgcgcgtcgtctcctggaaggaggcggcggacaggaagctgtccgttgcgagcgaggccttggtgatgcccagcagcacgcgcttggcaactgcgggacggccgccgttcttgatgacctcttcgttctcccgctcgaactggaagatgtccaccaggctgccggggagcatttcggtgtcgccgttctcctcgatgcggaccttgcgcagcatctggcggacgatgacctcgatgtgcttgtcgcagatgtcgacgccctgcatgcggtaggcggagaggacttccagggtgatgtaggcctgcacgcccttgacgcccttgatcttgaggatgtcgtgggggttgacagagccctcggtcagcgggtcgccggcggacacgtgctggccctcggtgacgctgatgcgcgcgccgtagttgatggcgtaggctgcgctctcgccgtcgtcgctggtgacggtgatctcgcgcttgttcttgttctggccgatgcgcacggtgccgccgatctcggtgatgacggccatgcccttgggcttgcgcgcctcgaagagctcttcgacgcggggaagaccctgcgtgatgtccgccgcctgcgcgacgccgccggtgtggaaggtgcgcatggtcagctgcgttccgggctcgccgatggactgcgccgcgacgatgccgacggcctcgccgatgtccacgggctcgccggtggccatgttggcgccgtagcacttggcgcacacgccggtctcattgcggcaggtgagcaccgtgcggatggtgaccttcttgacgccggccttgacgatcttctcggccaggcggtagtcgatgtcctggttgacgtcgcagagcagctcgccggtctccgggtggaagaccttctcggcggcgacgcggccgcggatgcggtcctcgagcgtctcgatgacctggccgttggagacgatctccgtcacctccatgccgcgcacgcgctccccgcgggaggcgaagcagtcctcctcgcggaccacgacgtcctgggagacgtcgaccaggcggcgggtgaggtaaccggagttcgcggtcttaagcgccgtatcggccaggccctttctggcgccgtgggaggaggtgaagaactccagcaccgtcagtccctcgcggaagttcgcgcggatgggcagctcgatgatgtggcccgagggatcggccatcaggccgcgcatgccggccagctggcggatctggttgatggaaccgcgggcgccggagttggccatcatggtgatggggttgaaggtgtccagcgaggccttcagggcgtcggtgacccggttggtcgtgtcgtcccagacggcgatgacgcgcttgtagcgctcctcgtccgagagcagaccgtcctcgaacgcctcctggatctcgccgatctgctcctccgcctcgtgcaggagctggggcttctccttgggcacgacgacgtcggagacggccacggtgatggcgcccttggtggagtacttaaagcccagggccttgatgcggtcggccatggcggagcactccgtcacgccgtgcacgcggtagcaggcgtggacgatcttgcccagcatcttcttgtccacgacgcggtcgatctccagcttaaaggcgtcctcggggaccttgcgctcgacaaagcccaggtcctgcggaatggcctcgttaaagatgatgcggccgatggaggtctcgatgatcttcttgcgcggctcgccgtcgatgatgcgggtgatgcgcaccttgatgcgggcctgcagggcgatctcgccgagctgataggccatcagggcctcgtcctcgtccatgaaggcgcggccgtcgcccttgaaggacttggggtgcttcttgtcctcgtcgcccatgatggtcaggtagtaggcgccgatgaccatgtcctgcgagggggagacgacgggcttgccgtcctggggcttgaggatgttgttggccgcgagcatgaggaagcgggcctcggcctgcgcctccatggacaggggcaggtgcacggccatctggtcgccgtcgaagtcggcgttgtacgcggtacaggccagggggtggagcttgagcgccttgccctcgaccagcaccggctcaaaggcctggatgcccaggcggtgcagcgtgggcgcgcggttgagcagcacggggtggtcgtggatgacgtcctccaggacgtcccagacctcgggcttgacgcgctcgacgatgcgcttggccgccttgatgttgggcgcatagcccgcggagatcagcttcttcatgacgaagggcttgaacagctccagggccatggtcttgggcaggccgcactggtacatcttcagctccgggccgacgacgataaccgagcggccggagtagtcgacgcgcttgcccagcaggttctggcggaagcggccctgcttgccgcgcagcaggtcggaaagggacttcagcgcgcggttgccggggcccgtgaccgggcggccgcggcggccgttgtcgatcagggcgtcgacggcctcctgcagcatgcgcttctcgttgcggacgatgatgtccggcgcgcccagctccaggagccgcttgaggcggttattgcggttgatgacgcggcggtagaggtcgttgaggtcgctggtggcaaagcggccgccgtccagctgcaccatggggcgcagctccggcgggatgaccggcacgacgtccaggatcatccaggaggggtggttgccgctcttgcggaaggactcgaccacctccaggcgcttgacggccttgacgcgcttttggcccgaggcgtccttgagctcggcgcgcagctcctgggagagcttatccaggtccagctccagcaggagctgcttgatggcctcgccgcccatcttggcgatgaaggtctggttggtgccctcgatgacgggcaggtcgctgttgtcctcgacggccttgcggtactcggtctcggtcaagagctgcttgcggatcaggggcgttgcgccggggtccagcacgatgtaggacgcaaagtagaggaccttctccagggagcgcggcgggatgtccagcagcagcgccatcttggaggggatggcgcggaagtaccagatgtgggacaccggcgcggccagctcgatgtggcccatgcgctcgcggcggaccttggcgcgggtgacctcgacgccgcacttgtcgcagacgatgcccttgtagcgcacgcgcttgtacttgccgcagtggcactcccagtccttggtcggcccaaagatgcgctcgcagaagaggccgtccttttcgggcttgagggttcggtagttgatggtttcgggctttttgacttcccctctggaccactcgcggatcttatccggagaagccagaccgatctttatcgaatcaaaattgttcagttcaaacaaagaggtcctctcccttctcttcaaaacatggccgtccggcccgcggaccctcgcgggtccgcagtccgtttcttagaggtcgtcgtcatcaagcaaaccgaaatcgccgaagtcgtccgaaaggatctcttcgaagttgtcgtcgtcaatgtcgagcttgtcgtcatcatcgacctcgatgatgtcgtcgtcgccctcgccctccagggtggactcgccctccagggcctcgcggcggtcgtccacgggcgcctggcccatgtcggcgtcgtcgtcgtccaccatttcgcgcagctcgatctcctcctggccgtcggtgaggacgcggatgtccagcgccagggcctgcagctccttgatgaggaccttgaaggactccggcacgcccggctcggggatgttttcgcccttggtgatggcctcgtaggtcttgacgcggccgaccacgtcgtcggacttgacggtgaggatctcctgcagggtgtgcgccgcgccgtaggcctccagcgcccagacctccatctcgccgaagcgctggccgccgaactgggccttgccgcccaggggctgctgggtgaccagggagtaggggccggtggagcgggcgtggatcttgtcgtcgaccaggtggtggagcttgagcatgtacatgtagccgacggtgacgcggttctcaaacggctcgccggtgcggccgtcgtagacctgggtcttgccgtcgcggggcaggcccgccatctccaggcagttggcgatgtcctcctcgtttgcgccgtcgaagaccggggtggcgacgcgccagcccagggccatggccgcatagcccaggtgcgtctcgagcacctggccgatgttcattcgcgagggaacgcccagcgggttgagcacgatctgcagcggcgtgccgtcgggcaggaagggcatgtcctcctccggcaggatgcgggagatgacgcccttgttgccgtggcggccggccatcttgtcgcccacggagatctttctcttctgggcgatgtagacgcgcaccagcatgttgacgccggcgttgagctcgtccttgttttcgcgggtgaagaccttgacgtcgacgatggtgccgtactcgccgtgcggcacgcgcagggaggtgtcgcgcacctcgcgcgccttttcgccgaagatcgcgcgcagcaggcgctcctcggcggtcagctccgtctcgcccttgggcgtgaccttgcccaccaggatgtcgccggcgcggacctcggcgccgatgcggatgatgccgcggtcgtccaggtcgcgcagggcgtcctcgccgacgttggggatgtcggcggtgatttcctccggcccgagcttcgtgtcgcgggcctcggtctcgtattcctccatgtggatggaggtcaggatgtcgtccttgaccatcttttcggagatcaggatggcgtcctcgtagttatagccttcccaggtcataaaggccatcagcacgttcttgcccagggcgatctcgccctgatcggtcgactggccgtcggcgatgacctggccctttgtcacgcgctcgccggcggagacgatgggccgctggttgatgcaggtggactggttggaccgggtgaacttgatgagcttgtgcgtgtcgcgcacgccgtcgtcgccccggatgatgatctggtccgcggcgaccttttccaccgtgccgtcgcgcttggccaggatgcacacgccggagtcgcaggccgcgcggtactcaatgcccgtggcgaccaccggcgcgtccgtggtcagaagcggcacggcctggcgctgcatgttggcgcccatcagggcgcggttggcgtcgtcgttctccaggaaggggatcatggccgacgcaacggagacgagctgctgggggctgacgtccatgtagtcgatctggttgcggtcgatctcgaccgtgtcctcgcggctgcgcgcggtgacgcgctcgtggacgaaccagtggttctcgtccaggggctcgttggcctgggtgatgatgtagttttcctcttcgtccgcggtcatgtagcggacctcgtccgtgacgcgcttggcggcctggtccacgcggcggtagggcgcctcgatgaagccgtagcggttgacgcgggcgtaggtcgccagcgcgccgatcaggccgatgttcgggccttccggcgtctcgatggggcacaggcgcgagtagtgcgagtggtgaacgtcgcgcacgtccatggaggcgcggtcgcggttgaggccgcccgggcccagggccgaggtgcggcgcttgttggtcagctccgccagggggttgggctggtccaggaactgggagagctgcgaggagccgaagaactccttgatcgccgcggagaccgggcggatgttgatgagggcctgcggggtcaccacgtccagatccgtgatcgccatgcgctccttgaccgtgcgctccaggcgggaaaggccgatgcggatctggttctgcagaagctcgcccaccgagcgcaggcggcggttgcccaggtggtcgatgtcgtcgatggtgccgatgccgtagttgaggccgatgacgtagctcatggaggccacgacgtcgtcgacgtagatgtgcttggggatcaggttgtcgatgttctggcggatggcggccttgaggctctcctcgtcctcgttttccgccatcagggcgcgcagcgtcgggacgtggaccttctcggtgatgccgacctcctccgggtcgaaggagaggaaggccgcggcgtcggcgaagttgttgcccagcaccttgatgtcaaaggcgcccctctcgttttccacgtgcagggtcacgctgttgacgccggcgttctggatggtctcggccatctcgcgggagatggtggccccggcggagacgaggatctcgcccgtctcggggttgaccacgtcctcggacgcgatgccgcccgcgatgcgcgcggccagtgccagcttcttgttgaacttatagcggccgaccttggctaggtcgtatctcttggggtcgaagaacaggccgttgaccagggaattggccgtctccaccgtcggcggctcgccggggcgcagcttcttgtagacctcgagcaaaccggtgtccacgctctttgcggtgtcgcgctcgatggtggccagcaggtgctcctcgctgcccagaagctcgaggatctcgttgtccgtgccgtagcccagcgcgcgcaggagcacggtcatgggcagcttgcgcgtgcggtcgatgcgcacccacatcacgtcgttggagtccgtctcgtactcgagccaggcgccgcggccggggatgacggtcgtggcgtagagggccttgccggtcttgtcgatggtcttggcgtagtagacgccgggcgagcggacgagctgggagacgatgacgcgctcggcaccgttgatgatgaaggtgcccgaggcggtcatcagcgggaagtcgcccatgaagacctcctgctccttgatctcgcccgtctccttgttcatcaggcgcacgttcacgcgcagggccgtggcgtaggtatagtcccgctccttgcagcgctcctccgtgtacttgggcgtttcatcgagggagtagtccgtaaactccagcaccaggttttccgaaaagtcggtaatgggagaaatgtcccggagcacctcgcggagatcttccttcagaaagcgttcgtaggagttcttctgcacctcgatcaggttgggcatttccaggacttcttcgatcttggaaaaactcatcctcgtgcgctttcccatctgaaccgcatggaccatgtaagcactcacctctcctgtagatttccgttcgcgggcttgcggcgcccgccccgggtggcctgtaaaggggtttgccggcgcgttttcctgatctttcgacaaggccgaaaaaaggcattgcaatttggaagaaaacgttgtacaatattgcatgacatcggatcggaagggtgtgaagacgcccttttccgcattatgcagattataattgtatcacttcagccttccaccgtcaattcggctgggagcttttttgtgcccaatttccgaggagttttgttaaaaatttgaaaactcccttgacaagccgctctcatgtgtgatattaaggttttcttttcgttaaacttttattaaggagaatgctcgttcgaatttcggttcgttccgcaaattttgcttcggaggttgtcgggtgtgaaagcgctaaaatcttgtctccggcaggagccggttctctgcgcgtccgcgctgtgcgcgctgctctcctttttcttccttccgccctcgcgggagacgctcacctttccggactaccgggtgctgagcctgctgttctgcctgatggcgtcggtggcgggcctgggggaggcggggctgatgcgcctgctctccggcgcgctgctgcgccgggcgcgcacgcagcggatgctggcgctgctgatgacgctgctgtgcttcttctcctcgatgctgatgacgaacgacgtgtcgctggtggcgtttgtgccgctgacgatcctcgttttgacgcaggccgggctttcgcgcctgctcatcccggtcatcgcgctggagacggccgcggcgaacctgggcagcgcgctgacgcccgtgggcaacccgcagaacctctacctcttttccgcctacgagatgggcgcgggggagttcttcgccgtgacggtgccgctgacgctggcgtcgctgctgctgatcgtcgctgcggtatttgcgctgcgcctgcgcggaccgctgcgcgtggcgcccgcggcgccggccgcgccggaccgccgccggctcctgctgcacggcgcgctgttcgcgctctgcctgctgacggtgttttcggtgctggactaccggattctccttggcgcggtgctgcttgcgctgctgctgtttgaccggccggtcctgcgcaaggtggactacgcgctgctgggcacgttcctgtgcttcttcctgttttccgggaacctgagccggatcccggcggtgcgggatctgctgacggggctgatggaaaggagcgcgttcttcgcctcgctgctgacgagccaggtcatcagcaacgtgccggcggcgctgctgctggcgccctttacggacgacgcgcgcgcgatgatcctgggcacggacgtggggggccttggcacgctcgtggcgtcgctcgcgtcgctgatctcctataagttctacgcgcggaccgagggcgcgcgctccgggcggtacctcgggttcttcacgctgctgaacctggcgctgctcgtgccgctgatcgcgctctccctcctgctgctggccgtgggctgaatctttaggcggcgaaaaaaacgccgcctttttttgcgcccaaaaacctgcgcgggggcgttgtgtgtctaacagttgaccggtccaaaaaccacgaaaggagttgcggtccatgtcggacgaggaattcgcagagcgcgtcacggccatgacccagacgctgtaccgcgtctgctacgcgcagctttcgcaggcctgcgaccgcgaggacgccgtgcaggaggccctgcgcaagtgctggcagaagcgcggccagcttcgggacgcgcgctacctgcaaacctgggtcatccgcgtgctgctcaacgaatgccacaacatccagcgccgcgccgcgcgcctgcagccctgcgccacgctccccgagcgcgcagccgcgccccagcccatggggaccacgcgcgtgggcgaggcgctgctggagctcgaggaaaagctgcgcatgcccctggttctgcactacatggagggatattccgtggcggacgtcgccgcggtgctgcgcatcccgcagggcaccgtcaagacccgcctgcgccggggacgcgaggcgctcaaggccctgctgaccccacccataggaggtgtgtcccgtgatcccggatgaacttcgccatgccttccccgagccggacgagcggttccaggcgtgcgtccgccgcacgctggacgccctggcccaagaggacgcacaaaaggagagattgcccatgaaacgcacccatctgcgcgtcggcgtgctcgttgccgtcgccgtgcttctgctttccaccatcggtgtcgcggccgcgagcctgcggtacggcgttttcgacttcctgcgcggcgcggacggcagccctgcggcgctgcccgaggcctcggccctcgtgcagacggaggtgccgcagaccgcggttccgcaggccggcgccccggccgcggagaccgccttctccctgcgcgaggcggtctatgacggcggcgccgtgcacatggtcgtcgaggcccggcccaccagcgaggaagtgctgctcatcggcccggactgcctgctgacggaccccgtctccgacctcggcatttccagcgaggagagcatcgccgaatacgccgccgccaacggcaagaccgagatccgcagcgtgcagatcgtcgacaccggcgcggccacgggcggcgagggcgtcgtgcagtccctggaataccggctggagggcgacggcacgctcgtcttcatcgccagcggctccgtcgcggacggcgcggcgaccctgcccgtggacctcgtctgcatcacctacccggtcctggccgacggcaactacgacgtggaaaacggcacgcagaccgacctcaccttctccctggagcgcacggacgcgggccaggactcccgcaccttctccacgccggccgcgttcgccggctgcggcgtgacggtggagcgcgtgacgctcaccgcctcgcccatgggaatctactacaccctggagtgcgccgtgacggacgaaacggcctttgccgccgcgcaggaggggctgttcttccgcttcctggacgcggacggcgaggagctcccccttgcgcccgccatcggctcccaggtgagcgccccggaggacggccgcttcacccaggagggcgcgctcgccgcgagcgaatcgctgccggacgccctgacgatccaggcctatgacgccatgaccaaggaggtctacgacacgcagaccctgcgctgatcgcccagcgcagaacgagcgccccgcgcgggggagaaccgcgcggggcgctcgtctttttatccgtccgcgtacatggcgcggaactctgtgggcgtcatgccctccaggcgcttgaagttgtagcagaagtagctgctgttctcgatgccgacgcgctggccgatctcggaaacgcggtattccgacttgaccagcaggcgcttggagatctggatgcggcgccggaggatgtactggaagggccgctccccgatgcagtccttgaacacgcggcagaagtgctgcggcgtcaggttcatcaggcccgcaagctcctccagcgtgaggacgtcggcgatgtgcgcctcgatgtagtccagcacgggcttgagcttgtgcgcgcgctggttctgctggctcgtctgctcctttcgggtcatgtagaactccaccaggatgcggtacacataggagctggcgcgcagctggccgaagaacggatccgcgtgcagctcggtgaagatgttcttaaacagcgcgtcaaagcgcgtggggtcgggaaggtccaccacgcaggccctctgcaggtccaggctgcggagcgtctccgcaaggcagatgccgtcaaagcagagccagttcgtctgccagtccggggtgaggggccagtagtcgtgcggaacgcccttgggcaggtagaagcaggtgcccgggtggatgtcgtaggtatggccgtccaccgtcaggcggccttcgccctgcgcgccgtagatgacctgcgtgttgaccgcgccctcgtcgcgcttgcgccgcgcctgcttctgcgcggcgcccacggcgtggatgacaaagggcaggtccatgtttttgtggttggggaacagcgcctcggacttcacgccgcgtctcctcctctccgggcctcttttcccttcatgatagcgcgccggcgcggaatttgcaagcgtgtgggctcagtggtccccaaaaaggggctcttccaccttctcctgccgcttcatctccgcaaggacggagaaggtcagcgggatggtcaggatcagcgagcagacgtcggccacggcctggctcatctgcacgccgagcaggcccaggacctgcggcaggatcaggatcgccgggatgaagaagatgccgctgcgcgccgcggcggtgacggaggccttcagcggcttgccgatggtctgcagcatcatgttcgagaccacgacaaaggccgtgaagggatacgcgatgcactgcagccggagcgacagcgcgccgatctcgatgacctgcgggtcctcccgccggaagatggcgatgatctccggcgcaaaggcgatgcccacggccgagcacaccaccagcacgcagaagcccacgatcaccgtgaaccaaaaggcctggcgcacgcgcttgtactcccttgcgccgtagttaaagccgcacaccggctggaagccctggccaaagccgatgaccgcggagttggcgaactgcagcacgcgcgtcacgatggacatgcccgcaatcgccgcgtcgccgtagaggccggcggcaaagttcaggcagatgctggcgaccgagcccaggccctggcggaacagcgagggcagcccgccgcgcaggatctccttataccgcgacaggctcggcgcaaactcccgcaggtggatggcgatgttgccgccccgcgtgcagccgcgcagcagcaggaaaaagctgacgatctggctcaggatcgtggccagcgccgcgccgcccacgcccatgtccagcacgaagatgaagatggggtccaggccgatgttgatcaccgcgcccgcgcccatgccgatcatgccgaaaaacgcgctgccctggaagcggagctggttgttcagcacgagcgaggaggccatgaacggcgtgccgatcaggatgtagagggcgtagtcccgcgcatagggcgcgatggtcggcgtggcgcccaggatctggaccagcgggtccagaaagagcagccccagcaccccgaagaccgcgcccgcgatgaaggcggagacaaagcccgtggtcgccatcttgcgcgcgtgctcgacgtccccatgcccgagcgcgcgggagatgtagttgcccgacccgtggccaaacgtaaagcccagggcctggatgatgctcatcagggggaacacgacgccgaccgccgcggtcgcctccgtgctgatccgccccacaaaatacgtgtccgccatgttgtaaaacgaggagatcagcatggaaacgatggcgggaagcgccatcgtcaggatgagccgcgggatcggctcctgcgtcaaatactgtcgcttttcttccggattggaaaaggttctcattgcactgccccctgcatctttctgcgtaatcgtttacagtatacaatagctttccgcaaaacgcaactttgttccgcaatgcggatcagcttctgccaagcccttccaaatctttcgtcaagaaaactttttattgcggaaattatttttgcgtgatacaatttattccataaaatgaatgacaaaggaagtcctgcccatgtttttttcccgcagcgacggacgccgcattcggtcccttccagccatgcagaagatcatgccctacatcatgcgcacgcgcacagggtcggtcaacttcttccgcgaggcgctggactgcgctccgctggaggcctatatcgccgcccacaacggcgcggacgcccaaagccgtctcggcgtcatgcacatcctcatcgcagcgctggtgcgcaccatcgccctgcggccgcagttgaaccgctttgtcgtgcatagccgcatctacgcccggcgcggcatttcggtgagctttgtggttcaccgctccctgcgcgtggaggacggcggcaccacgatcaagctggaattcaccggcacggaggatctcccgaccatcgcccgcgccgtcaacgcggcggtgctgcgcgagacggcccccgccgccgcgcgcaacgccacggacagcctggccgacggcttcatgcgcctgccggacctgctcatccgcccgctgatcggctttgtgatgcggctggaccactggaacctgctgcccgaggcggtgctcaaggccagccccttccacaccacggtgtttctgacgaacctgaagtccctgggcatcgactccattttccaccacctctacgaattcggcaccaacggcatttttatggccatgggcaaggaggccctgcacaccgtttcccgcccggacggcagcgccgccgcgcgccgggagatccacctggacttcgccctggacggccgcttctgcgacgggctgtactttgcccgttccatgcgcctgttccgcaagtttctgcgcgaccctgcgctgctggagacccggctggagcgcacggaagaggacctgccctaggggccggacggcaaaggggagaggggcttgacgcccctctcccctttgccgtccctttttttcgcgcctagattgcgtagaggacggcgcgcagcatgattccgcacaccagcgcgatgagcgcgcccacgacgagcatggagatcatgccgcccacgcccacggtcttgcgcatcacgattccgcagacgatggcggcaaggcccatcagcgtccccagggcaaacaaaaccagcagcaggttcacggtctttcctcctcctctcggcacatcaccagggccgcggccagcagcaggcccgccgggacgagcgccgcgcgcaggtgcaggatctgcgtcagcagcccgcccaggcccgcgcccagcatgaagcagccgatcacggcaaagtattgcaggcccacgcgcaggtcttcccggtcgcgcccgcgggcgtagcgccagaggcgctcggtcccgctgcgcaggttgcccgtgcacatggtggtcgcgtagagattcccctcgaaggcgcggaaggtgttgacctgcatggcgcaggcaaaggagatgcccgcgttgaccaggttgttccacgcctccggcaggaaggcggcggccacgagcacgagggcctccacgccgagcacggcctgccgccagttcacggggtgcagcgcccgcttgcgcgccttgaggaactccgaaagcacgatccccagcacaaaggcgcacaccggcacgaggtagcgcagcgcctgggggtcggcctcaaaggcgcgcagtcccagcaggaccaggttcccggtctgcgcattggcaaagacgcggccgcgcgcgacgtaggtataggcgtccaggaatccgcccgtggcggccagcagcagccccatctgcagggagtccgccggccggcacccggcgcagccgtccctcgcgcgcatcaatccagcgccgcaaaggcggcggagcggaacttccgcgtgacgtcgatggtgccggtatccgtcttctgcagcatgagcaggagcaccaggtcgtcctccgggctgatgcagaagtaggtgcccagccagccgtcccagccgaactcgcccgcgctccccaggctcggggcctgtccctcctccaggagcacgcgcatgaagttgccgtagccgtggccatgcagcgactcccacgtgcaggtcgcgcgctgggcgggcgtgagctggttctgccgcatgtagcgcaccgtgcgcggggaaaggatgcgcgcgccgtccagctcgccgccgcgcgcgagcatccatgcaaagcgcgcgtagtcgtccagcgtggacacgagccccgcgccgccggactggaaggcgggctcccggtcgtacaggggcaggatgcacaggtgcgcgcccgtccagcgcacgagctccgcgccctgctggcggtagaccgcggcaaagcggccgcgcttttcctcgggcaggaagaagcccgtgtcctgcatctttaggggcgcgaagatctcctcccgcaaaaagtcgccgaagcgcttgccggatacgacctccaccaccgcgcccaggacgtcggccgaggcgccgtactgccagcggctgcccggcgcaaaggccagggggacccggcccatgcggttggcgaagtccacggtgcccgtctcctcgccgcgggcctggccggcctgcacctcggaccacagggcctgcatccgcgtctcggcatagccctgcgcgccgccgtagaccacgccgctggtcatgcccagcaggtccttgatcgtcgccgggatctccacccgccttagctgcgcgccgtcccagtacacctggtccgcaaagcccggcaggtacttctgcaccgggtcgagcaggtcgatctgcccgcgctcgagcaggatcatggccgcgcaggccgtgaccggcttgctcatggagaacatgcggaagatggtgtcccgggtcatgggccggccggcctcgcggtcggcatacccggcctggccgtagtagatctcctggccatgctggttcagcatggcgacgcagccggcgatctcgccgctggcgaccgcttcctgcaaaacgccgtccaggcgcgcttttctcctcggttccatgttcttacaaacccccttttcgcctaagagtatagcacagaccttcccggcgcgctactcctgcgcgccggggacgagcatcatgccgcccttcatgggcgaggcggccaggtgcgtgaacaccccgagcgcgccctcggcatagcgggccgggcgcggggtccagcgggcgcggcgctcggcaaggacgcgctcgacctcctccggcgcgcagggctcgccgtggattccgacgatttccagcttgcgcgcttcgacgtcgatggagatgaggtccccctcctccaccagggcgatgggcccgccctgcgcggcctcgggcgagacgtggccgatggccgggcccttggacgcgccggagaagcggccgtccgtgatgagcgcgatggaggcggcaagctccgggtccgaggagatggcctccgtggtgtagaacatctcgggcatgccgctgcccttgggcccctcgtagcggatgaagaccgcgtcgcccgggcggatcttgtgggtgaggatggcggagatggcgtcctcctcgcagtcaaagggccgggcgcgcagcagcgcgcggtgcatctccttgggcacggcgctgtgcttgatgaccgcgccctcgggcgcgaggtttccgcgcaacaccgcgatggtgccgtttttgccgatgggcgcgtcgaagctacggatgatgtccgtgcgcgcccgccccgtcttggccaggtaggcgtcgcacttctcgtagtagtcgctcttgcgcaggtcctccaggttctcgcccagggtcttgcccgtgacggtcctggcgtccaggtgcagcatggacttgatctcctccatgacgcggggcacgccgccggcatagtagaagtattccgcggggaagcggccggccgggcggatgtccagcaggtagtgcgcgccgcggtgcatgcggtcgaaggtgtccgcgtccaggtccacgccgaactcgtgcgcgatggcgggcacgtgcatgagcgcgtttgtggagccggagatggccgcgtggaccatgatcgcgttctcaaagctctcccgggtcaccatgtcgcgcgggcgcaggtcgtgctcggcgaggaagagggcctgctccccggcgcggcgcgccgcggccttgaggtccgggttcagcgcgggcagcagcgccgtgcccggcagcatcaggcccagggcctcggccaggatctgcatggtcgaggccgtgcccatgaaggagcacgccccgcaggaggggcaggcgtggtgcttatagtaggtaaactcctcctcggtgatctcgccgcgggcgcacatggcggaatacatgccgatctgctcgagggtgagcaggttgggccccgcgctcatgacgccgccggtgaccatgacggtgggcaggtttgtgcggccgatggccatcaggtgcgcgggcacggccttgtcgcagctggccaggaacacgccggcgtcaaaggtcgtggcgcgctcgtggatctcgatgaggttgcagatcgcgtcgcgcgaggccagggaatagttgatgccgtcgtggccctgggccatgccgtcgcagatgtcggtggcaaagtagcgcgcggcgcggccgccggcggcgcttacaccctggcaggcgaggttgaccagctccagcaggtgcgcggagccggggtggctgtcgccgaaggtggattcgacgaggatctgcggtttttccaggtcctccacggtccaccccatgccgatgcgcagggggtccatctccggcgccagcttgcggactgactgacttctcattcgcattgctccttcctgtgaacccgaagttcttgttaacaacgcgtgatcgctcttgcatcttagcacaaaatgtcgcacaataaaagggatcttataaaatccgcaaagggtgggggaagtccatgttattttccaaggaagagctgcgccgcctgatcgtgccgctgatgatcgagcagatcctcgccgtgaccatcggcatggcggataccatgatggttgcaaacgtgggcgaggccgcggtatcgggcgtgtcgctcgtggacagcatcaacatcctcctgatcaacatcttttccgccatggcgacgggcggcgcggtcgttgcctcgcagtacatcggccggcaggaccggcagagcgcatgttccgccgcaaagcagctcatctacagcagcgccttcattgcgctcctgctcgggctcctcgcgctcgtgggcggcgagcacctgcttaggctcgtgttcggctccgtggacgcggacgtcatggcctatgcggagacgtatttctggctctcggcgctgtcctatcccttccttgccgtctacaatgcgggcgcggcgctgttccgctccatgtcgaactcctccatctcgatgaagacctcgatcctgatgaacatcatcaacatcggcggcaacgcgctgctgatctatggatttgacatgggcgtggccggcgcgggcacggcgacgctcgtctcccgcgcgacgggcgcggtcgtcatgatgtggctgctgcgcaaccgccacaacctcatctacgtcgagcatctcttccgctaccgcctggactggcagatggtcaagcgcatcctgcgcgtgggcgtgcccaacggcctggagaacggcatgttccaggtgggcaaggtgctggtctcctcgctgatcgccatgttcggcacgacggccatcaccgccaacgccatcgccaacaacctggcctcctttgagtgcattccgggcaacgcgctgggccttgcgatgatcacggtcatcggccgctgcgtcggcgccggcgactacgagcaggccaagtactacgccaagaagctcatgaagctgacctacatcttcatggcgggcatcggcgtgctgctcatggcgctgtgcgtgcccatcacctggctctacaacccctcgcaggagacgttcgacctggcgatctggctgggcatctaccacagcttgtgcgccatggccatctggccggcggcctttgccctgcccaacatcctgcgcgcatcgggcgacgtgcgctttacgatgctcacgtccgtgatctccatgtggctgtgccgcatcctcttctcctatgttctggccctgggcttccacctggagctcaagggcgtgtggatcgccatgacgctggactggctggtgcgcgcgatcttcttcgtgtggcgctacttctccggccgctggcagaacaagcaggtcctcagctaattgcccccacgggttgaaaaatgccctcgaaccaaagcggttcgggggcatttttccattctttcgccctatgcggacaaaccccgtgcgtccctgcgaaaggcacggtccctcgcccttggctgtagccagccgccggcaagggggcggggcgaacgtccgcgttcgcacacaggcgcggcgctgccgtcggaaagggtgaaacgacggcggcccttgcgcacatcggcatggcttttccgcgccggaacgcgccgcgcccctgcacagtctccctctgcgcgcggggacggtatttcagtcacatcctttgtgctaattccaatgtagcagacggaaacgcatttgtcaaatggtccttgggagttttcacaataaatttccactttgtcgaaattcggcgcccgcgcggcgcgctcagcgcttggggccggggcgcgggctgcgccgctccttggccacgcgctcgctcttgggatcgaaggagaggatctcgcactcgatgcggccgttgtagacgcggcggcgcttggtgcagcgccggccgaagtccttctcaaagtcgcggcgggaggagatggccgtcagcgtccagtcctcgctccggcgcagcagcgcgccgagctccgcgcaaacctggcgcgcctccgcctcgtccccgaggcgctcgccgtaggggggattcgtcacgatcgcgccgcgcggcacggggacctgcgcctcgcgcaggtccttgcgctccaggcgcacaaagccgttgaggcccgcctgcgcgcggtgcgccgcggccaggcgcagcacgcgctcgtccttgtccgagccaaagacctcgaccgtgcgcgtccgctttgccgcctcgaagcgctcgcgcgcctcgctgcgcagcgcctccatgcccgccttgtccgcgcagccccacttttccatgtcaaaggggcggttcaggcccggcgcgcggtccagcgcgatcatggccgcctcgatgggcagcgtgccggagccgcagagcgggtcgtaaaacggcagggcggtccgccagggcgagacgagcagcatggccgcggcgagcgtctcccgcaggggcgcggcggcgttgagcgtgcggtagccccgccgcgcgagccccgcgccgctggtgtccagcgtcacggcgacctcgttttcgtggatgtggacgtcgatgtggtagcgcgcgccgtcctcgggcagccaattcaaatgataggcggccttgagccgctcgacgatcgcttttttcgagatggactggacgtccggcacggacatcaggcgcgagcgcgcgcacttgccggtgacgtagacctcggcgtccttggggaggatgtcctcccacgccgcggcgcgcatgccctcgaacaggtcgtcaaacgtctcggcgcggaagcgcgcggcgtagagcagcacgcggtccgccgtgcgcagccagaggttggcgcggaaggcgtccagcagcgtgccggaaaaggccgcgccgcccaggaaccccttggcctcgtagcccaggcgcttgagctcgttggcgaccacgccctccagaccgaaggcggccgtcgcgcccagggaaaaggtgttgctcatcgtctctcctcctgcgccccgcggggcgcgtcctgcctcgttcggttgatgttgacgccgttgaccaccagctcaaaccggcagccaaggaagtttgccgcctcctcgcacatctgcatgcgggtcagatagatctccatgaagtccatgaccgaggagctctcgtccatggagagggcaaagcggatgatgcggcgcacggggtcgacctccacggcgttctgcgcgatggcgaaattgacgcggtcgtggatgtcgtccgggttgtaggaggcgcggcgcacgcgggtgcggtgcgcgtcggacttgtccgcgatgatgagcgcggccgagaccgcggagaccaccttgccgttctgctcctcgtggttgcccacggccccgacgatggtgacgacctcgtccatgggcatgcccatctcctgcaggatcggaaagagcagggccccgccggtgatgccgtggttcacgcggttgacggcgttgcccacgtcgtggacccagccggcgatggcggccagctcgcacatgcgctccggatagtggagctgctccaggatgctgcgcgccgtgtggctgacaaagcccacgtggcgcgggccgtgctccgtgtacccgatgacctcgagcatccggttggccgcgtcgatgagcacggcgagcttctcgttctgttttacgtcctgcacggtaatgcgcttctcctgcatcgcggtctccttccctccggcattctcttttctcagccgagctgcttcatggattcgtagtaggggtcgccctcgaaggagcgctcctcgccgatctcgccgcccagcgcgcgcacggcgtttgcgatctccacatagtccaggtagttgatggccgggtcctccagggcctgcatcatgcggggcagggcctgcgcgtcgccgaacttggcgatgtaggaggcgatgagcgcggtgttcttggaggtatccatgagcccgagcagcaggggcagcacgcgcttctcctccggatagtcgcacaggatgtccgcgatgcactcccgcgcgctggggcttgccgtctcataggccttgagcagcggctcgatcacgcggccgcccatgttcttgagggattcggcgccgttttccgccagctcgtccatctcctgcccggaggcgagccaggagatgtacaggtccatgggctccacgcgctccatctcgcgcagaaggccgatggccgtcatgcggacctcgccggcggcctccttgcgcgcggcgatgtccagcaggtgcggcacgctcgcttcgcccatctcggtgatgcgctcgagcagctggtcgggcacgggcaccttcttcttcacatagtcgcacagccacttgcacaggaacttcgcgtcgtcaaactgtgcaaagtagttgcccggcgtgcggccgctgagccagtcgcacggctcgttgagccagcgcaggtagacctccgggatgtcggcctccatggcgtcgacgttcttgtagcgggccatgttctccttgctccactggcgaacatagctctcaaagtgcttgtcaaagtccacgcagttcatgtctcttcctctcctttttgaccttcctccatccggatctggtattcggcctccatgagcttgccgcggcgcatctgcatggtgcgcagcgtggttccggcctcgtccgccagggcgcgccagtccacgctctttccgttccgctcccgatagaagccgtccagcgcgagcacccaggccttttcgttccggatcttggggtaatgcccatccaggtatagaatataggctgcccacatcccggcggcaaattccaccgcctggccctcgttgtagcgctgggccatgcggttgatggtgtcccgcatgatccgcaagtacggcttgggcagtccggcgtcaaaggtataggtccggctgcgcacgaggacgagctttccgtcctgcagggagtagaagggctcctgtgcgtgcagcctgcgcagcgcgtcgagcgcctttttcttgtagtaggcgttgtgcgtgggcgagagcaggacctcgcgcagcatccgctccgcggccgggccgccggccctgcccagcaggcggatggcgcggctcatctggtcgtcgctgccggtcagggccgcgcgcacgagcgcgccggcgtccgcgtcctgcagggcctttgccgcgtcctcgggctccatgcgctgcaggcggtcgacctgcgcgtcgacctcgcgctccacctcgtccgggaagtcgaaggtatagggcaggcgcttgggcgcctcttccccgcgcagggccgcggccgcggtgcgcgcgccgctctgggcgagcaggctgtccggatcggtctgggcgagcttttcgaaggtgcgcaggctctcctgcaccctgccctggttgtactggcaaacgccgcagaggtagagcatggacgggtcgtaagggctcgtgaggaagatcttcttgagcgcctggctgagctcctggtccaggtccaggtccgccagggccaggcagtatttgaagagctcgtcgacctcctcgatgcggtccaggcgcagcttgcgcaccgcctcgacggcctcctcccgcttcccctcggagagcaggaacatggactcgttgcagcggccgtgcacgtccagcgggctttcctgcaggacgatctccaggttctcccaggcgcggtccatgtcccccacgcaggaataggccacggccaggttgttgcgcacataggtcatgctggggtccttttggagggcgcgctccaggcagtcgatggcgtggtccaggtccccggcgtccagggcggccttgccgtccatggagagctcgtccagctcccggtccagctccgtctcatagtcgcactcggcgatgtagttcagcgcctcgtccacctggtcgatgtactcgccctccggctccacgtgctcgtaggtccggagcatggtctcggcctggtcgtaatcgcccatggccagaaaattgctccccatggcaaagagcgcctcggcgggcgtcctgccctgatggagcatgagctgaatttccaggttgctgcgctcgtacaggcccatccgggcataggtgttggccaaatccatccggtaggtgagatttcccggttccatggcgatggcctttcgcaaatgcttgagcgccgcgggaaagtcctccttgtcgatggacttgatggcgcgccgatgataaaaacccgactccggctgaatggaaagcactcttctgtcagccatctcatttcccccctcccgcttcggggctggcgttctccccgaattccgccgcgcggcggacagtttggatatagtatatcacgtccgcgccgcctgtgccactatcccccgcccgttttcgcaaaaatcaaagaaggggaccgcagcgcgcgggtgcgggctgcggtccctctttttcccccatggggctcacccgatgcggtcatcctgctggatgtgcgcgcggatgcgctgaaaggtctcctcgctgatgacgtgctcgatgcggcaggcgtccgcgtccgcggtcttcaggtccaggcccagcacctgcatgaggaactgcgtgatgcacaggtgccgctcgtagatgccctccgcgcggcggcgcccctcctcggtcagcgtgatctgccccgagcgcgcgatctcgacaaagccctgctcctttaagatccgcatggcccggctgatggacgcctttgtatagttcagcgcgccggccacatccaccgaccgcacaaacccattctgccgctgcaaaagcaggatcgtctccaagtagttctctccggactcgtgaatgcccatgcgcgcccccctttctgcttcttgcaacagtataccacaaacgcgccgcccaaggcaaatcgggcggcgctcttcctcacagttccttttcgtagcagagccagtgctcgccgtaggcgtcggtttccccggccaggcggaagcggagcgggcgataggccgcccgcgcgcgcaggttgttcgggcccacgaggtagcgcgcgccgcggtacccgcgcgccttcatctccgccaggaccctggagatggcctcgcgggccaggccccggccctgaaacgcccggtccacgcccacgcgctcgatcatcaccgcgggctgcagcgctgcatcccagacggcgtttccctccatctcctcgtcgcgcacggccgagaccgccgcggcgatgcgcccgtcctcctccaggacgaagaggccgtgttcggccaggtcgtcccggatgcaggtctcgtccgggtactcctcgttccaggtcacgccctcctgcgtcagcagcgacttgtagagccgcaggatctccgccgcgtccgcggccgtcgcctcccggaagcgcatcacaccgcctccgcggcaaagggcggcagggggatgccgtttgcctggtacacattgccctcgacccagttggtcaggtcgtagcgcgcggcggcgggcgcttcgacccccggcgcggtcaggcgcacggtcgggcccgcgatctccgcctgcgcccagcgccagacgccgtccgcgccgcggagctggaagccccggacctccggcccgcgcgcagagagcgccgtcccaaagcgcagcgccagggcgttcccctcgcgcgaggcgctctgcggcgcacagagtgcgacgtcgaggtcctggccgtaggcgccatgcaggatctggtcggccaggcggttgccgacggtctccttgtcgatggggtggacgttgtcgcgctcgcctgcgtcggtcacgaccgcaagggccgcgtgcgcgtcgcgcgcgcagaccgcggcctgggccaggcggatcttcccccagttctcgccgtcggggtcgtcgctgccaaagccgggcagctgcaccacgccgaagaagaggtcctccgcgcggaagtcgcggcgccactcggccatcagggccgtcagcagcgcgccgtagagctcggggtgcgtgccggagtcctcctcgccctggtaccacagcgcgccgcgcagcgaatagggcgcgacgtgggcgagcatcgtctcgtgcaggccgcaggggcggcggtaggcgtccgggcccatgggcggcggccaggggaagacgatgtcctttgtcgcctcgcgataggcggccatgtcgtccttggagagggtcacgcgggccatgcgggcgttgtagtcctcgatggcggcggcgtagtcggccttctcctgcgcgtactgctccggtgtcttgccggcgacggcgcggtcgtagtcctcgaagtagacccgcagcgcggggttggcctccagcgccgcccggctcacccagcaggcggccgaggtgccgccccagttgcagcccacgatgcccaccggcacgcccagggccgcgcgcaggcgcttggccacgtggtaggccacggcggagaactgcccggccgtctcgggcgaggaggtcacccagcccgcggggacctgggcctccgcctcggcgcgccccgcctcggaggcggtcttgaccgcgtggtagtagcgcaggtccgggtccagggacttggggatctccgcgccgccgctcttggcgttctccaggatcagctccatgttgctctggccgccggcgagccagacctcgcccagcgccacgtcggagaagacggcctcctccgccccgcagcggacgcgcagctcgagcggcccgcgggcgtccatcgccggcaggaagagcagccacctgccgcccgcgcacgccgcgcgcgcccggcggcccaggagctccgcctccacggtctcgccgtccggcccctggccaaagacggcgatgggccggtttctctgcaggaccatgtggtccgaaaagattctcgcacaggaaaagcgcattgcaacttccctctttctctcgaatttagtccggcatccccgggccggggtccggcatccccgggccggccagcgcgacgatggtgtgcgcgtagatgcgcgcggcctcgaacatctcgggcagatactgcttttcgtccgggccgtgggcgccgccgctcttgttgccgggcaggccggggccaaaggcgacggcgttcttcatgctgcgggcgtaggtgccgccgcccatggagaagggctcgtcgtcgcggccggtcatctccttgtagacgcgcatgagggtggtcaccagccaggagtccttggccacgtagagcgccggggagacgtgcgtgctgcgcgcggtcaggccatagggcgcgcaggccgcctgcacgcgggcgagcacgtcggcaaagtccgcggcgacgggctggcggatgtcgagctggagggcgatgcccgcctcgtccgcgcgcacgacgcccaggttcaccgtcagcgccccggagggctcgtcctccatctggatgcccaggcccttgccgtcccagtcggcgacgccgagcttctcgcggacaaagcgcagcgcgggctcggccgcgccgaggtccatgcaggacaggatctccgccatcagtgcgatggcgttgcgcccgcccgcggggaaggcgccgtgcgcggccacgccctcgacctcgatgtcgattttgccgtccgcgcaggcgatcttgcaggggacctccagctggcgcgccctttcccgcagggcttccgcctgttccggcgcgccctgcacgcaggcgcggcagcggttgggcacgatgttgaccgcctggccggccgcaagggagatcaggggcgttgcgccgccgaacgcgccgcggatctccatgcggtggatgcccttttccgcgtagcagaccgggaacccggagtccggcgagaagccgtagtccggcatgcccacgtgctgcatgtagtgggccatgtctgcgctgcccttctcctcgttgcagccgaggatcagcagcacgcggtcgcgcagggggatgcccgcctcccggatggcgcgcagcgcgaagaggcaggagacgcagctgcacttgttgtcgttcgcgccgcggccgtagaggaagccgtcgcggatgaccccctcgtagggcgggacggtccagtcgctgccctcgggcacgacgtccaggtgcgcgaggattccgagggtcttgccctccggcgtgccgccaaaggccacgtgcccggcgtagttttcgtcgttgtaggtttcaaagccgaagctctccgcctttttcagggcgtagtccagggcgcgggcgcaggcctcgccaaagggcttgcccggcaggggctcgccgtccacgctggggatgcgcaccaggccgcgcagggtttcggtcatttcctcctcataggttttgaggatttcgtccaatttctgcattttgtccatatcggccgcctccaaattggcttttcccctattatacaatcgttgttatgtgtatgtaaatggaggatgcaacatttttcctgcggaaggattttttctgcccggcgtagaactagaacaaactgggcacgtgccgtgcagcgcgtgtatccctttgcgcgaagagaagcgcaaatcctgaattctttgggggttgcgggatgacaccggaagaactcaagaaaatcgcgcgcgacgaccgcgcgtatcgatatgcctgtcagcttctatcggacgggcggatcaagaacctgcgcgtggagggggagcacagcttttccgccacggtggaggacccgccctgctcctacaccacgtccgtcgccttttcgggcggagagctgaccgcctgctcctgcacctgcggcgtgccggtggccagccgccgcgtctgcgcgcacgtgggcgcgctctgcctggagctg

SEQ ID NO: 3178 - DNA, 1918 bp, Unknown
  16S sequences of unknown bacteria
tcttattattgttcaattttcaaggtcctgcgtcagcctctctcgctgacagctttgttattatagctcattcaccacagattgtcaagcaattttttgaaaaaaatcaaaaaaatcatgtttttctttaaaaaaagcgcaaaaatcggccaaagttcacttgttttagccgatttttcgcatttttgcctattttattcgtttaaagccttatattcgtcaagattaaatacacttccgcctatatgccggaacattctatgggagattgatataaccgttctgttccgagatgctctttgcagtgtacgcaaaaattcttcttctatcttagcatccagattagcggttatctcatccaaaagcaatatttgcgggtcggcggctattgctctggcaatggacaaaagctgccactgtccctgagagaataaattaggggtacaaattgtgtcatagccgttttcaaaggacattataacatcgtgcaagccgacagtttgtgccgcttttatgacttcttcatctgttatgccttcgtcactcattttaatctgctgtgctacggatcccataacaggcttaaaattctgttcaacataaccaaaagtttttcttcttacaccatcggcaatatctccggccttaacgccgaaaatatacacattgcccttgttaggccggtaaaggcctgtaagcaatttaaatattgtcgatttacctgcgcctgttctgcccgtaagagtaagtgtttcacccttattgattgtaaaatgaagattggtaagtatatttttgccgtcctcgtaggcaaagtcgacattttcaaacttaacggcaggcatactgtaatcaaactcggtttcggtaggctgtattctttctttttgattaaagaactcgtcaattctttcaacacctgcaaatgcagattgaatagtctgtatttccatacctatattttcgataggcccgaaaatttgtgtaatatatgcaaccaaagcaacagaagtacccacattcataccaaaaaacttcaagacttccacattgccgctggccgaaaaaagatataccaatcccactataacagcgtttgtaataagaataacaggcgaataaacagagtcatagaaatttgttctgtctaccgcacgataactttcgtctatatatcggtcatacttttcggtcatatagccctctttgcccaaattatgtaccgttctgatattttttatagtttccggcacatggtttgtaacctttgctatggcaattctgttatctatttgcgcctttaacatccgcttttgcaccttgcgtgtaaagatatagataagaggtaaagcagctaataaaacgtaagcaaggcctttactctttacaaatattacggcaaaaatacttattgtcctgaaaacatcggcgaccatgcttataatgccggaagtgaataagctttccacggtatcaacatcgtttaccaaacgggatactaccgcacccggttcctgttttacaaaagcgtcactttcaaggtttgaaagtttaagactcatatccgttcttatggcatgggttattttctggccgaaaaccgtcagtaaactttctcttgcggattcaaaaatacctgtgacagccacaaacaggatatatgaaaatatcaatttaaactcaacgggatttccgtctgtaagggcattgactatcttttccaaaacaagaggcggtataagcccgatcacaacagagcctacaacgcaaagtacaatacttaaacttataagtatgtacgactttgccgtatcaaaaataatggagaaaacccttttattcattgtattattcattttcgttgtctcctttcgtttcggttaagaacagtcggcgataccgcggattttcttccata

SEQ ID NO: 3179 - DNA, 12142 bp, Unknown
  16S sequences of unknown bacteria
gcgctaaacagtgtgaaaaatacgaaaaatgaccggttttgcaatgaataaaacttgcatattttcaggaatttgatataattaaaaattgctaaacagcggcgcagtatcctagtcagtttcaaccgtttaccaggaagggcctaaaaatcctttgaagggcatatcgatgaagtccctggtgtttgcttcttacgcccagtttggggtggatgctgggggttaaggtttgggggcggcttgcaacggcatgcaagttcgaccctcttaccgtggagacctgttcttgtgatgagccaaggtaaaacctgcctgcaggcttgtgacttgttacgaagcagggttaaacctgcaatgtggtgcagctggggcggcttcgctccaaagtcgctatgtgcagagtagcctgccttgagtgggcgtggtgaatgcgggaactacgcatgcgttccccggccagggaagtgcatcgcgatcgcctgctgaaaccacggctgcaaaagaggctaagaaatgggttgactgctgtggaaaacacctaggctgtcgattcccggacatcagaaggattgcagtgcggactaagtggcagtcgggtcgcagtgtcggcaacgcgctgacgtggagctgaaagggaaaccgccaagcggaaacgcgcggcgctccatggggaaagcctacccgtacctaagccgtaagatttacttctggtgctgccgtcctgtttagcattttatttgttttgacagatgtgggaggtttctctagtggacagccaaaaagcgggcagaggaaagaatcagaccggcgagaagggaaagaaaaagcgggattactggataccaaagatctttttgatgtccatcaccatttcggctgtgttcagcttggtatcctccaatgtgctcaatggtgcgggatatattatcgcctttttgctgctggccgcgtttatcctgatcggcattgtgtttgatatcatcggcgtttcggtcacggtggcggaagagcgcccgttccattccatggcggctcacggcgaaaagagcgcctcctgcgcgatgcagctaatccgcaacgccgaaaaagtcagcagtgtgtgtaacgatgtggtgggcgatatttccggtattgtcagcggttccaccgcggcggtgattgtaacgaagctctgcacctcttttgacttggattctatggtgatgtctcttgtgatttcggcgctagtttccggattgaccattggcggcaaggcgatcggcaaaaaaattgctattaacaacagtacgcaggtagtacattcagtatcccgcgtgatccatatggtcaaaagaaaataaaagcaggcgattctcttttgtgaaacgcagaagggttctaatatgaaacatactattttgaaaatgattgcttctccggatgacgtgaagaaactttcatcggaggaatgcaaacagctatgtgaagaactgcgcgcttttttgctggattcggtatctgaaaccggaggacatctggcgtcgaatcttggcgcggtggaactgaccgtggcgatccatcgcgtgtttgatacggcgaaggatcgccttgtttttgatgtgggtcatcagtgctatgtgcataaggccctgacggggcggcaagcgctgttttccatgctgcgcagttttggaggaatgtctgggttccccaagccccatgaaagtgtccatgatgcttttgttgcagggcatgcgtccaactcagtgtcggtggcgctggggatggcgcgggccagaaccttgcagggcgccgattaccgtgtgcttgcgctgattggggacggtgccctgacaggcggtctggcctacgaagggctaaacaatgccggcgcctcgcaggaaccgctgatcatcttgctgaacgacaatggcatgtccatcgggcagaacgtgggcggcgtggcttcgcatttggcgcgcatacgcacacggcccggatattatcagttcaaaaaatgttatcacaacatgatgcaccatcttcccggtggcagggccgtgtatcacggcgtccaccgggtaaagaccagtgtcaaaaaagcgctgtggccctgcagcttttttgaggacatgggttttcagtacctggggcctgtagatgggcatgatctggatcagttgtgccatgtgctcaattgggccaaggaacttcgcgcgccggtggtggtgcatgtgaatacggtgaaagggaaagggtattcttttgcagaggaaaaccccgatcgttttcatggggtcgcgccctttaatccgcagaccgggatggttttaaagccttccggggaaaatttcagtaaggttgccggaaaaacgctgtgcgatttggcacggcaggacgcgcgcatctgcaccatcacggcggccatggaatctggtacggggctggatctttttgcaaaagattacccggagcgcttttttgatgtgggcatcgccgaggggcatgcggtggctatggcggccggtatggcggcccagggcatggtgccggtgtttgccgtttattccagttttctgcagcgcggattcgatatgttgcttcacgatgtggggttgatgcagctccatgtggtgtttgcagtagaccgcgccggactggtgggcgaagacggtgaaacgcatcatggcgtttttgatgtaggatatctcagccagctcccagggatccggatttattgcccggccagttttgcggagatgcgcgccatgttggagcgcgctgtgctggaagattccgggcctgtggctgtgcggtatgcgcgcggcggagagggcgcatacaaaggtctttcctgcggtgcttccgaatgctgccgggaaggaaaggattttacactggtatcctatggtgtgctgttcaatgaactgctcacggcggcggatctgctggaggaaaaaggaatttcggcagaaatcataaagctcaacaccattgttccgctggatgtggatgccgttgcggcttcggtggaaaaaaccgggggattcctggttttggaagactgcgtggagaacggcagcgtagggcagcgcctgacggcggaactggcgaagcaaaacgctttgccgcgtaccattcttttgaaaaatctcggcaatgcctatacggcgcagggcagcgtttcgctgctgcgtgaagctaaggcgctggatggcgcaagcgttgccgctgctgtagaggaggccttggggaatggcgaaaaagcgacttgacgtgcttgtcacggaacgcggcctggcggaaagccgccaaaaggctcaggcgctgattatggccggagaggtattttccggtgaccggaaactggataaagccggtatgagtgtggaggataccatcccgctggaagtgcgcggcaatacgctgcgctatgtgggacgaggcggtctcaagctggaaaaggctatggaagtgtttcccatcgatcttaacggctgcacagccgctgatatcggtgcttccaccggtggctttactgactgtatgttgcaaaacggagcgaaaaaggtttattcggtggatgtgggctacggcgaactggcctggaaactgcgcagcgatgaacgggtcatagtgcttgagcgtactaatgcgcggtacctgagtcgtgcacaggtagcggatccgctggattttgcatcggtggacgtttcgtttatttctctgaaactgatttttccggcccttcatgatctgttgcgcgaaagagggcaggtagtgagcctgatcaagccgcagtttgaagccggccgggagtttgttgggaaaaaagggatcgtgcgcgatccaaaagtgcaccggatggtgttggaacagtatctggagcatgcagaagctgccgatttttcggttctggatctgacgtattcccccattacgggacaggagggcaatattgaatatcttggctttctggagaagggggcaggccgtggccgcagactggatctgcaagcggtgatcgatgcgtcccaccgcgcatttaggggcgaggggtgaggaaaatgaaaaagatcgtgttatgcccgaatccctaccgggatcatggactgcgcatgacacagaaagtacgcgaaattttggcagaagagggcattgaaagcgtgatcagccttcccttccagccggagggagatgttttaccgaaggaattgacttacctcccggtaaaaacggcaatcaagggtgcagatctgatgattgcgttcggcggcgacgggagcatcctgcatttggccaaaaccgctgcggtgaaccatttgccgattttgggcattaatttgggaaatctgggctatattgcagagctggagagtacagatatcgggttgctgcgcaagctgaaaagcgggaaggtaaagcgcgaagcgaggatgatgttggatgtgcgggtgtttcgtgcggaaaaacaggtctattccaacattgttttgaatgatgctgtgattacgaaaggtgctgtggcccgagtgatccatctgcaaatgtatctcaatcaaaaggagttcattcggatcggtggagacggcatgattttcgccacgccgaccggctctacagcttattcgctctccgccggcggcccgattgtggatccggcggcgcagaatatcctgctcactcccatctgtgcgcacacgctgaccacatcttcgtatgtgcttggcccggatcaggtgattgaagtgcattctgcaggaaacggaaacaagacggtctacctgtccgcggacgggggaaaggcctttttgctgcgggagggagaccgcatggttgtgcgccgcgcgaaatatgaaacggaactgatcaaactgaaagatcggagcttttatgaaacgctgtgccggaaaatggcgaatcgggagatgagtaaataaatgaaagcaaagcgtcaggaaaaaattctggagattattgcctccgagtcgattgaaacgcaggagcagctgctggcggcgctgcgcagtgccggcatgaacgtgacgcaggccacgatttcgcgggacatcaaggagctgcatctgattaaagaacaaaccgggcgcggcagttatcattatgccgtttcggtgcataaggaaaccttcagcaacgccggccggctgcgcacgatctttcgggaaagtgtcagcagctttgactgtgcgcagaatcttgtggttttaaaaacgctgcctggcttggcgtctgcagcctgcatggcgctggacaatatgcacatcagcgttttggtaggctctttggccggagatgacacagtgcttctggtgatgcgagacaacgaaagcgctttggcattctgtgaggatatccggaaaatgatcgagtgaacaaccagcctctgacgcggaacgatacaggaaaaaggacggtgctgtgcgatgctgctattgctgcatattgagaatattgctgtgatcgaacgggcggatattacgtttcagcccggctttaacgcgctgacaggcgagactggcgcgggaaagtctatcgtgattgacgccatgggagcggtgctggggcagcgcgtctcccgcgatctggtgcggacgggggaacagcgtgcttcggtcagcgccatgttctcagatgtggattcgtcgctggaagtgctgcaggggcagggaattgcgcccgatgaggaaggaatgctcctgctgcagcgggatatccaggccgatggaaaatccgtatgccgtatcaacggccgtccctgtaccgctgctcagctgcggcaggtcgggacggcgctgctcaatatccatggccagcacgatggacaacagttgttggatgaaacacagcatatccgttatctggacagctttggcaaggtggacgcaccgctccatgcctatcaggaagcctatagcgtcatgcgggcgctgggcagggatattgagcggatgcagatggacgatgctgaacgcagccgccggatcgataccctggagcgggagattgaggaattggagcgggcagaactgaaagaaggcgaggaagagcgcctgctggagcgccggaacctgctgcgcaacggcgaacgcttcagcgcggcaatggagggagccaactattgcctgaacggcagtgaaaacagcgacggggcggtatcacaggttacagaggctgaaaacgccctctcaggagtgcgtcagcttggggatgtattttctgctctgctgcaccgtcttgctgaagtgcgtcatgagctttatgatatcgccgaaaccgtacgggatatgaaagagcaatttgatttctcaccggcggagttggatgagattgaagggcgattggatgaaatctatcggctgaaaaagaaatatggtgccaccgtggcggatatgctggcttacttggaacgtgcccgtgcggaattggacgaaattcaatatgccgacgatacgctgctgcggcttcaaaagaaatatcatgctgcaggtgatgtggcaaagcaggctgccgaccggcttacagaaacgcggaaacaggctgccggcgatttgcagagaaggattttggcagaactgcgggatctggatatgaataaggtgcgctttgagatcgtcgtggaaccgaaagcgcttgaaggggatgggcaggatcaagtacgtttcctgatgtcggccaacgtgggcgaggagttgcggcccattcataaaattgcctccggcggcgaactggcccgcatcatgctcggattgaaaaatgtgttggcagaaacggatcacgtgatgacgctggtgtttgatgaagtggataccggagtgtctgggcgggcagcccagaaagtggcggaaaaaatggctgcagtgtcacggcgtaagcaggtgctgtgcgtgacgcatctgccgcagttggcggcgatggccgatgcgcatttcctggtggaaaaaggagaagagggcggcagaacgtttaccagaatcacctgcctttcccgcgtgcagcgtcagaaagaattggctcgtattaccggcggcgcacagattacggacacattgctgcgcagcgcagaggaaatgttggaggctgccgagcagttccgcgcccggctgcattgaagaaaaagagtcccggctgcctctatgggcaaccgggatttgacattctttttttcttttccatatttttcccttgctttttatggggctttctgctaccataaagcggaatgaggatggaggcgaaagcagatgagtcgaaagtccggaaaaggaaacacatttttggctatggtgctccgtttgttttcactgttccatttgaggttgcaatcgcttttatgttcggttcataaagcggttgctttttttagggctgcagatactgtgcggcttctggaaccataaaagggggagttttattaatgaaacagcaaacaactacacaacagcctatttatgacgcccgcacgctggggcggccgaaaatggcgattctgggactgcagcatatgtttgctatgttcggcgcaacgatccttgtgccaattctgaccgggatctatttttcggaaaatggtgcctcttatggcctgtctattcaggttacgctgctgtttgccggccttggcacactgtttttccatttgtgcagtaaatttcagatccctgcatttttgggatcatcctttgcatttctgggtggttttcaaacgattgcaacactggataccggtatttttgccggcatgcccatgagtgagcgcctgccctatgcctgcggcggcattgtggtggcgggtctcatgtacctggtattggcggccattatcaaaacggtgggcgtgcaccgcgtgatgcgctttctgccgccggtggtcaccggcccgattatcatctgtatcggcctgacgctggcgccgtccgccgtttccaacgcatccagcaactggtttttggcgattgtggcgctggccgtaatcatcattttcaatatttggggcaagggaatgtttaaaatcattccgattcttttgggtgttctgatttcttatggcgtcgcgctggcgatgcatttcatggggatgacgaatccagatggtacggctattctgaattttactgaagtggcggcggccagttgggtggggcttccgccggtgcagctgtgcaaatttgatctgactgctattctggtcatggccccgattgcactggccacaatgatggagcacatcggtgatatgtctgcgatttccgctacggtggggaagaattacctggccaatcccgggctgcaccgcacgctggtcggcgatggcatcgccacggcgatggctgcgctgttcggcgggcctgccaatacgacgtatggcgaaaataccggcgtgctggtgctttccaaggtttacgatcctcgcgtcatccgcttggctgcggtctatgcaattgcgctcagctttattccgaaatttgccgatgtgattggttccatgcccagcgctattatcggcggtgtcagctttatgctctacggtatgatttctgccattggtgtgcgcaatgtggtagagagcaaggtggatttcaccaaatcccgcaatctgatcattgcagcggtaattttggtgtgcggcctgggcttttcttccggcctgacctttgtggtggcaggtacgtccatcacactgacaggactggccgtggccgcgattgcgggcatcgtgctcaacgctattctgcccggcaacgattatgtgttcggtgcagatgatgagggaaatggatccggaaatatgggaacttatggcgaaggtgcggggaaaaaggattgattttctccctgtgcactgaaatgataaggcggcgggcatcaagcccgccgccttatcgtttttgtcagggtaccgctgcgttccggggcaaacgtcagtttcggtcaatggtggttcggttgatgatctcgtcctgcacctctttgcacagctctacaaagaaagcggaataaccagccacgcgaacgatcagatcgcggtgttcttccggttttttctgggctgcacgcagttctgcgttgtctacacagttgaactgcatctgcgcgttgcccaggagcgaggcggtggaaaggagggcgatcacggcatttcggccttcctccgtggcgataaattgaggcgagagtttaaaattgtgcgccataccgaggctcatgttttccacattgattttggatacggatttgatgatcgccgtggggccgttccgatccattccctggcttggactcatgccgtcggacagaggcgcatatgccgcgcgtccatcgggcgtggcgccgaccatttcgcccagaggcgtattgaaggattgggacagggttccgtggatctgataggcgtacagcgatggatagcaattcattttgtgctcggtgtaatccacgatatccttggcgatccaatcgacataatcgttgtcgtttccatatttcggggcagcgatgcagtcctggcgcagcgcttcgtacccggcccagtttgcgtccatggcagccttcagctcggcgagggtgtattttttcgtatcatataccaggtattttactgcggccatgctgtcggcataagtgcccaggccggcaaaaatcgtaccgggtccggcatacagcactgcgccgccgtccattacatcccggcccttttccatacagccgtcgacaaacagggacataaaaggcgtggggctcacgtcccggaaaaccttttcaatgatgacggtgccgcggcagtttacttcgatcagatagtccagctgccgttttacggcggcttcaaagtcttcataggttttgaaagaggaagtgtccccgctgtccagccacaccgccgtgcagcgccatatcgatgcaaatgggccactgggtgaagccgccggaggtccactggtgtacgcggccgctccgctgttcctctacgcaacccatcaggcaataatcacaggcgtcttcataggagtagcctttgcgcagcatcatcttgatatgagcatcgtcaaagtggcaggcgggcataccggcgcctgctgcaattacgtccacgattttgttcaggtactttctgggggacaaattgtgaatgcggcaggccagcgtaggctggtacagcttcatctggcgcacagcgtccatgatgaggtaagtcagttcgttcacgccgtcgccgccgtggcgcttgatgccgctggcacacatgttgatgaaaggcatatagccggcaaaatattttgcggtggcgcttggggtgtaccagatcacttcggaataaagcaggagaatagttcaaaagcgtcctgtgctgtgatacggccgcactcgatatcacgctggaaataaggatacaggtattgatcgacacggcccagagaggtgctgcactggttggtttccagagactggagggattggatcgtccagatggactgtagtgctttcatgaacgtttccgggggattggcatgcacctttgcatttacttcggcgattttgaataattctgcctttcggctcgggtcgctttctgaagttgccagcgatgcggcatgagcggccagccggctggaataagtgatgattccctgacagacaacgcttttcggatgggataatcctccgcctggggatccagctcccgcagatgctattctgcctctgccagaatagcgagaacgccctttttgagcaaaatgatatcaaaaccggggctggtgtcgccgccgctggtcatatgataagtgagatcggtgatggcggcgcctacgccgtagtcccacaaaccggcctttttcagttctgcgtcgcatgcttcggacgaggatttccctttccagaatggaaacagttcattgcgtattacccgtttatccgcttcgctgatataataggggtcctgcgcgcgggtagcgatggtatccagttccgattccagccagtcccaggaaatatccggggaaaatgcgccggcgcgcggttttccgcagggatgtccgacgatcagctcccccggctggatcagcatgggcgccgtttcgcacgcgcggcgaaaactttttgcaatgcgcagatttgctggaaggtttgggtattttccggctatttccgtaaatgccacagcccggtgaatggtaatgctcggcacggttttcagatagcgttctttcaaagaatgtaatcggtcggtgagataaaatgcatgggtttccataaagacttcctccatgtgggttgagttcagcttggtgccggtggttttttcttataaaggaccatatgcagaatgtattgcataatctgtatgaaaatcgaaagggatgacgtttttgggaacagaaaaacaaaagttttttatcttttttgcatttttttgatgtacaggatagttgacaaagcgcggcggagtgtggtatagtggcacccatcagcgatgatgaggaagagtagcagagtctccgcctgtaaagagaacttccgtttggtgaaaggaagagagacgcactttgtgaatacgcctctgagccgccgcctgaaccgacaagcgcagtagggctggccgggatgcgcccgataacgcgcaggctgtgtgatggcacagcatgagaccgatatgcgtgagtatatgggtaaaccagaggtggtaccgcgtttgtgaacgccctctgtctgcatgaagcggacgggggtgtttttcttttgagcggaaaagggggaagaaatatgtcggtgcgctgcagtggaacgatgtttgtatttctggcagcagttctgtacagtacagccggactttgcatgaagttgatcccgtggagtgggatggctcttaacggcggacgcagcatcattgcgttgggagtgttcggtgcgtatttgctgataacacgccataaaccaaagctgaatcgctgggtattgctgggggcggctgcggtatgcggcacaaatgtgctttttgcgctggccaataaaatgactacggcagccaatgccatcgtgctgcagtatacagctccgatctttgtgattctgctctcttttgtgttgttgaaaaagaagccgggtcgcttggatctggtggcctgcgcggtggtttttctcggtg

SEQ ID NO: 3180 - DNA, 4738 bp, Unknown
  16S sequences of unknown bacteria
gtgcgcacgcggcgttcatatgaagctcttgacgaaatcggcaattttccccgcggcgtccgggttgatttcgcggcgctggcattcgatcattttctgctgcctttcggggcttctcgagagttcgagggcggccttggcggcttcgaattcgtcctttgtgtttatcgacattccgcgcgcctcgaagaattcggcgttcgcggtctcgcagccgggaatcgcgccgacgtgaataagcggtatattggcgaccgcggcttcggtgctcgacagaccgcccgccttcgagagaaggatgtcggcggcgttgaaccatacgttgacctctttcgtgaacggcacggtggcgattctgtcgttcgcggcgtactcgttttcgagctttgcgcgcaggtcgtcgttgtgaccggtcatgacatagaccttcgagtcgctcccgagcacgcgcatgagctccgagcatatcccggtgacgtttccgccgccgactccgccgctcatcacgacgaagattttcttgttctggtcgagcccgagtttttcccgcgcttccgccttcgggatgtgccgcgagaatttcggcgcgacggggattccggtcggtctgacggtttcctcgggaattccggcggcgacaaggtctttcgtcagcgcctcgtgcggcgtgaaaaagcagtcgagccggcagtcgtcgaagaacggaactatcgtgtaatcggtcagcaccccgaaggacggaatctcccgtccgagctcgtaccgtatagcggtgcaggcttccatcccaaagagatgcgtcgagagaatcgcgtcaaagccgttcttcctggcatagttataaatcggctccgcgagaacggcgttggtcttgtaaatcggggatttcagtctcgagttgtcgacgatctcgcccgccttgtatatgacgccgaagacgccgggcgcctttttgattatattattgtaggtagcgttcacgatttctgtcgcgcggtcggagcggaaggagaccgggtcgcgctgttcgtactcaattccgcgtgaatcaaacgccgcgcgcacagccgccgccgcgctgttgtgcccctcgccggtggagcagctgagaatcaggactttcatggtataccatacctttcattgtttgtattctaattatagcacaaaccgtgacataaaatcaatagtcacagaaatacaaatgtatttttttcagacagtaatcggcatatgcacaaaaaacatacatagctgccgcattgactgttttattacgggcgaaaataaggtataatataagcacgaaaggaattgatagaaatgataaatgacaacgatagctttgttcacaccggcatgcagcggaccgcgaaatacgcgtacatcggcgtctcgatagcgtcgatagcgctcgggattatttttctcgtgtttccaagattctcgctcgacatgatcacggtcatctgcggcgcgctgataacccttttcggcgcggtgaagatcgtcggttatttctcgaaggacctctaccgtctggcgttccagcacgacctcgttttcggcataattctcgccgtgatcggaataataacgatgatacgtccggctcgcgcgacagatttcatctgtgtggtgataggcacggcggttctcgccgacggcgttctgaagctccgcaccgccatctcgtcgaaaaagttcggaatccgctactggtggctcatcctgataagcgccgccgccgcgtccatcctcggcgtcttgctggtaataagaccctccggcagcgccgaagtcctgacaatgctcctcggctgctccctgatagccgaaggaatcctgagtctctgcacagcgctcgccgctgtcagaattatcaagcatcagagaccggatgtaattgagggccaggggagacccctggactgaccaggggccagcccctggacccgaatgtcaatgttcgctcacgggtcggatgaagactctgccacatcaaacatacatcgtcgtgctacatcacccacaaaaagcaccagaaaccgtccacctgcggttcccggtgtttttttacacgatccaccatattttgttcaatttgattatttacaactccacccgattgtgatataatattcctatattccaccggaaaggaagattcatatgatctataccgaggatgagatatatagcttcgtcgaacaggaggatgttaagttcatccggctcgccttttgcgaccttaaagggcatatcaaaaacgtatcgataatgccatccgagctgcgccgcgcgtttgaggacgggatttccttcgacggctccgcgatccgcgggttcgcgggggaggaaaagagcgaccttctgctcttccctatcgcctcgacgcttaacgtcctgtcgtggcggccctctcacggaaaggtcgtccggatgttctgcgagatccgccgctctgacggctcgccgttcccctacgactcccgcgctatcctcaaaaacatagtgaaggaaaccgaaaagcgcggcgtccacgtcttcttcggctctgagttcgagttttacctcttcaaaaccgatgaggacggctatccgacttccgtcccgttcgaccgcggcggctacatggacgtcgcgcccgaggacaagggcgagaacatccgccgcgagatctgcctgacccttatcgacatgggcatccgccccgaatcctcgcaccacgaggagggaccgggacagaacgagatagatttccgctacagcgacccgataacggcggcggacaactcccagaatttcgtcacggtcgtgaaggcggcggcaatgcacaacggtctctttgccgacttctccccgaagcccctccccggcgaggctggcagcggaatgcacgtcaacatctcggtgagatgcgacgacaacaccgaccgcacgccgcagttcatggcgggcgtcatggcgcacatccgcgagataacgctgttcctcaacaatacaaccggctcctaccgccgtctcggcgagatgaaggcgccgaaatatgtcacgtggtcggcggagaaccgctcacagctcatccgcataccggcggcgagcggggatttcaggcgttttgagctgcgttcgcccgacccgctggcgaacccgtatctcgcgttcgcgatgatcatcgcggcgggcatggacggcattgacagggacatgaagtgtcccgacccggtcgacatgaatcttttcacggcggacgagtcggtgacgagcggtcttgcgcggctcccggagacgcttgaggaagcgtatgagtgcgcggcggagagtgagctcgtgaagcgcgttctgcccggaaagctgtcgaaaacgcttgcctgacaggtgtcacatatgctaagcactatgatgaacacgggaatgtcccgcacggtgccgaaggcgaagcgtcgtgtgatgatagtctccgcgagtgacaagatattcgattttgccgccgaccttctcccgccgggcgagttcgtcttcgaggaaccggcgaggagcgcgggcgaggcgaagcgcactctcatacaggcgagagtcgatatactgataataaacactcccctgccggatgatttcggcacagagctcgcgacagagctgtcggacagtacgatggggatacttctcctcgtgaagaacgatcttgtcgactcgacggcgtataaggtcgaggatttcggcgtcctgacgctcgccaagccgtgcggcaagcagagcttttatcaggcggtgaagctgctgtcggcgacgagcgcgaagcttgagagacttgacgagaagaaccgcacgctcgaggaaaagatggcggacatccgcatggtgaaccgcgcgaagtggctgctgatcgacaatctcggcatgaacgagaaggacgcgcatcactatatagaaaagcgcgcgatggactcgcgtcagacgcgccgcgaggtagcggaaggaattatacgtacctacgataaataacggacaatggcgtccggacgggacagaaaaactctgccctttgtccgggcgcttaaatatttaatttttataaagctttagaaaaggaggggggcgggggaggaaaaacctttctcgaaaggtttttcctcccccgcgaacaaacaattatgatacacgaggaatgtggcgtattcggcatttacgccggacgcaatcaaaatgtagcggcgacagtctattacggactatacgctctccagcaccgcgggcaggagagctgcggcatcgttgtcgacaaggacggcgtgttcacgtcgcataaggatatcgggcttgtcaacgaggtgttcgatcatgagacactggcgtcgctcggcgagggctcgatagctgtcgggcatgtcaggtacggcacgaccggcggcggctcgagggcgaactgtcagccgatagaggtcagacacatcaagggcacgatggcggtggcgcacaacggcaacctgacaaacgcggcggagctgcgccgggagcttgagttgaagggctcgatcttccatacgacgagcgacaccgagataatagcttacgaggtgacgcgggagcggctgactcatccgtcgatcgaggaggcggtcagcgcggcgatggatcggcttgacggttcttattcgctgattatcatgtcgccgatgaagctgatagcgctgcgcgacccgcgcgggatgagaccgctctgctacggaatccg

SEQ ID NO: 3181 - DNA, 14108 bp, Unknown
  16S sequences of unknown bacteria
aaaatgattccgactttatttgcgccgtgcgcggcgcaaactctgcgaggcttttgggggcaaaatgacaagcccgtacggaatctccgtacgggcttgcctcagaaaagaaagaaagagaaaagaatggaatgttttttagagagagaaattagagaatacaggctggccgtcggcttattcgtagatatttccacgacatcagccagcctgcgttgtttgctttctttatggtcctatcttaccataggcgccgggcgaaattgtgaataaattgtatcgaaggataaaacagtttttgaatatttccccagcgcggcgctttttctcaatcttctgccgaaaattgtattacagcttgaccgtccagcccatgtcatcggcgacggtgccagtctgcatgccatagagggtattatacagcttctgagcaacagggccgaccttaccgtcggcaacctggacatcggtgcccttgtagttcagccagccgatgggcgagatgaccgcggcggtgccggaggcgaatatctcctgcagcgtgccatttttagaggcttccacgatctcgtcgatggacagcttgcgctcggagacattgacgccccacttgcgcagcagcgccaggacagagttgcgggtaatgccgggcaggatcgtgccagaggtcagcggagccgtgataacctcgtctgcaatgcggaagaaagcattggaggtgccgatctcttcgacatacttgttctctgcggcatccagccacagaacgtccttgcaatcgtacttcatcgcatccaaagacgcgcgcatcgcgccgccgtagttgccgccgcacttggcaaagccggtgccgccgcgggctgcgcggatgtactcatcctgcacgtagatccgggtcgtggtcaggccgccgtcattggccgcgtagtaggagccgacggggctgaggataatcataaacttgtagtgctcggcaggcaggacagaaaaggagacctcgtcgccgaagataaacgggcggatatacagtgccgtgccgggtgcggaggggacccagtccatatcctcatgaatcaatgcgcggaccgccgccaggaacaggtcaccaggcagctccgggatgcacatccgctcattcgtccgggccatccgcgcgatgttcatatcggggcggaacagctggatagagccatccgggcagcgataggccttcataccctcgaacatcatctgggcatagtgcaggaccgcgctggcgggctcgatcaggaagggggcgtgggggacgatgcggccgtcatgccagccctggccttcatcataatccatgacaaacatgtggtcggtgaagtacttggcaaagcccagctttgtctcatccgcaggacgaggcttgggattggtcgttctggtcacagggaaattgtaagtcattgctgttacctcatttctatcgttttttggaaattatacttgatacagctccggttttctgtcccggaacacattgatacggttacggatatcctgcaagatggcaagatcacaggctgcgctgacggtctcctccctgccgcctgcgcggcagaggacctggccccacgggtcgatgatggcggaattaccgccatactgggtctcgcccgccgcaccgcaggaattgcacacggcgacgaacatctgattttcaatcgcccgggcctgggccaagcaattcaggtggccaatgcgcacatccggccattgagccacgacgaacagcacatccagcccccgcagcgccaagctccgggtcaactccgggaagcggatatcatagcaggtgataatgccgcaggagacgccgtcgagcgggaagctgcacaggcggtcgccgcaggcaaatgccgcatcctcgtgcatgggcgtgaagagatgcgtcttatcatagctggcaatgcagcaaccctggcggtcaaaaatatagctggtgttatagacccggctcccgcggcgatttgccacgctgccggccaccagattcacccccaactcccctgccagcgcgcccagctccgctttgacccggcggccatcgtcatcggcaagatttgccagatcctgcgccgggaagaagccggtattccaggtctccggcaagacaagcacgtccggtttctccggcacggcagccgcctggcgcagcagcgccgcggcgtgggcaaaattctcctctggctcacccaggcgcatatccatctgtacacagctgatcctcatcgcgtgctccttttcttatgcctgcgcccccagcaggagggcttttttgttcagctccagcaggtcctgatggcgggcggagacgaccttgtgcagggcagcatccacattccccgcccccagggcggcgacctcctgcataaccttgccggtcatgatcatattggccagagtggagatctcatggtcattggcgagattcgtcgccggcagataataggcctcgacatcctgacggcgtaccttgcggccgaccatcgccgaatccacaaagatcttgccgccgggaacgacggcgtcctcatatttatctaacgacggggcgttcatgacaaccagcacatcgggccggtcgacgatcggcgagccgatgggcgcatcgctgacgatgacgctgcaatttgccgtgccgccgcgcatttccggcccgtaggacggcagccagctaacctgctttccggcaagcaggcccttgtacgccaggaattttccagcaaacaggatgccctgcccgccaaacccggcaaagaggatctgacatgtcttcattttgccgcctcctctgcgtaaatatctttatacacccccagggggtaataggggatcatcttttcctcgacccattgcatggcttggtccggcgtcatgccccagttggtcgggcaggtggaaaggacctcgatcagggagaagcccttgccctcgacctggttgcggaacgccttttcaatggcctttttggcctggttgatatgcttgacgctattgaccgccacccgctccaaatacgcggcgccgtcgacctgggagagcatttcgcagaccttgacggggtagccaaccgtcgcgacatcgcggccatagggagaggtctgggtgacctgaccaggcagcgtcgtcggagccatctggccgccggtcatgccgtaaatggcattgttgacgaagatcacggtgatattttcccggcgcgccgcggcatggaccgtctccgccgtgccgatggcggccaagtcgccgtcgccctggtaggtaaagacgatattctccgggcaggcccgcttgacgccggttgcgacggcaggcgctctgccgtggggagcctggacgcagtcgcaggtaaaatagtcataggccatgaccgaacagccgacggaggcgatgccaatggtgcgaccctcgatgcccagggcgtcaatggcctcggccaccaggcggtgaatgatcccgtgggtgcagccggggcagtagtgcagcggcgcatcggtcagggccttcggtttttcaaatacaatgctcatgcttttgcgcctcctatctttgcaatctcgcaaattttcgccagcacctgctccggtgcggggatcatgccgccgacccggttgcacaggtagaccggacggctgcagccgatggccaactgaacatcctccagcatctggcccatgttcatctccacactgaggaaggcattgcagtgcttggccgcctcgcaaagcggagccttcgggaagggccagagggtgatgggccggatcatgccaaccttgatgccctgggctctggccgcggcgatggcattctttgccacccgggccgtgatgccgaaggagacgatgcaaagcgtcgcgtcctccatacaataggattcatacattgcctcagccgcctcgacctggcggtatttttcaaagcgttcaaaattcttctgctccagctgctccggcttcaagcacagggagttgatgatattatgggtccgctgcattttcgtgccggtggcagcccaactgcggtcaaagtcccgtggcgcaacctccggcagctccaccggctccatcatctggcccatcgtcccgtcagctaggatcatggcgatcattcggtactggtccgccagatcaaagcccttgaccgtcaggctggccatctcctggaccgacgcaggggccaggacgatcttgcgcatatcgccgtggctgccgcccttgacggcctggaaataatccgactgggagggctggatcccgcccaggcccgggccgccgcgctggacattgacgaccagcgccgggaggtcgcacgccgcgatataagacaggccctcgctcttcagcgagatgccggggctggagctggaggtcatggcccgcttcccagctgccgctgcacccaggaccatattgaccgccgccagctcactctctgcctgcaggaacacgccgccgatcttcggcatacgctttgccatataggccgcgacctctgtctgcggggtgatgggatagccaaaataatgacggcagccggcgcggatggccgcttccgcaatggcttcgttgcccttcatcaatactttttccgccattatgctcacctctctaccgtaatgacgcagtcgggacacatcgtcgcgcagaatgcgcagccgacgcaggcgctcgcgtctgtcacatgcgcggggtggtggccctttgcattgagctttgtcttatccaattctacaatatgcttgggacaggcgctgacacacaggccgcagcccttgcagacgtctgtcaaaaatgttactgttgccatttttccgcctcctaaataatctttttctgcagccgcaggggcatcagcggttctatgcgcccccgcagggcatcgtacagtgattcctttaccgtcgtaaagcgcaggggcaggcccgtcagtgcggagacttcctctgcaaaacccgtcatccgcaggacatgctccggcgtcgtctcctcgccgagattggcgttgttcaccagccctgtgaagggcagatggcacgcctgctcaatctcgcgcagaatctccaccgcagccgccggcgttctcgtcagcgggcggtaggggttgaagaccaggagcatctcataatcatgctcctgcaagatgccccctgcgaaacggcccagggcgtaagcgcctcggtcgtcgccgccgatatcgaccacgacactcgtctgcgtatcgtcgaggatcgcatataacgactggggcagggccggcatgtccaggttggtgttggcgtagtcggaacagatcagcgagaccccagccgcttgcaattcccgctcgctgtccttcgtgcgaaagtaggggttgacggtatccaggtccgcaatcgtcacccgctgcacctcgcggcgcagggccagggcgtaatttaccgcaatattcgtctttccgctgccgtagtgcccggcaaacagggtgacccgtgcatggtccatggtatcgcctccgcttttgcagcaaacaacaaaaaactcgtctcaaagatatgatctttgagacgagtcattcccattggaatctacccgcggtaccactcaaattgcacgccgtgacagcgcaccgctctcaggctccagtaagccctgcgcactaacgtagcgatcacgggagagttctacttgcaacgcttgctttcttccctccggctcggaagctaccagcatcggcttccatgcgccgtggcttgcaccaaccgccacttctctgtgcaccggaataccgcgccctcttcgtcaacgcctttttcctatcaattttgtggtaactctatcatatcttttggggaatgtcaagtattttctcgcagtagctgcttacagcttgttgcggatgattttgccgctgatggtcttgggcagttccgtgcggaattccacaatgcgcgggtatttgtacggcgcggtgtgggtcttgacatactgctggatttcttttttcaattcgtccgtgccgtccgtgccctgcaccaggacgatgctggccttgacgacctgcccgcgtaccggatccggcgccgcagagacgccgcactccaaaacatagggcaactccatgatgacattttcgatctcgaacggcccgatgcggtagcctgaggacttgatgacatcgtccgcgcggccgacataccagaagtagccgtcctcatcccgccaagccaggtcgccggtgtggtacatgccgtcgtgccaggcggcctttgtcttctcttcgtcgagataatagcccaggaacaggccgcagggcacgccctcgtccgtccggacgacgatctcgccgttttcgccgtcggccaccgggttgccgtcggcgtccaccaaatccaggtgatagccgggggtcggcttgcccatggagccgggcttgagggcgccgccggtgagattggccagggtcagtgtcgtctccgtctggccgaagccctcggcgatgcgcaggcccgtcgctttttcaaactgatagaagacctccgggttcagtgcctcgcccgccgtcgtcgcgtgctcgatggaggaaagatcgtactgggagatatcctgcttgatgagcatccggtacatcgtcggaggcgcgcagaaggtcgtgatatgatacttggcaaacatcggcagaatctcttctgcgtggaagcggtcaaagtcatagacgaagaccgcgctctcgcacatccactggccgtagagcttgccccacagggccttgccccagccggtctcagagatcgtgaagtgcaggccgtcgcgatgcgcccagtgccagtagcgggccgtgacataatggcctaggggatatttatagctgtgcatggcgatcttcggatagccggtggtgccggaggtgaagaacatcagcatcgggtcatcgccgcagggcgcgtcgtcggcgcggagatagcggcggctgaataggccatattctgcgtcaaaatcgtgccagccgtcgcggctgccgccgaccaggatttttgttttgagcgttttgctgttggccgccgccagatctacctggtgcgcggtgtcgccgtcgcccgtgcaaacgatggcgctgacgccggccgcatcgaaacggtacgcaaagtcgtgctgcaccaattggttcgtcgccggaatggcgatggcgccgatcttatgcagtgccaggatagcaaaccagaattgatagtgccgcttgagcaccagcataacccgatcgccccggcggatgcccagagaggtgaagtaattagccgtctggttcgatgcgtccttaatatcccgaaacgtaaaacggcgctcttgcttctggttatccacatggagcatcgccagccggtcgccctgctggcgggcgatctggtcgacgatatcgaaagcgaagttgaagcggtcggcgttgcggaagtgcagctcgaccggtgtccccttctcgtcctcgtcggcatagacaaattcgttgcagatcaggtttgtatcctgggtctctttcgtctggggcagaatgtaatccgccttttccggcgcgctgctctccataacaaaggccaggaagaggcagtcctccccgtcgacggcgatcataccgtggggcgtggagctcttgtagaagatgctgtctccctcatgcaggacctcggtatgattgcccacttggaccttcaaggcgcccttgatgaccaggtcaaactcctgcccggcatgggtcgaggtatggatgggctgatgctgctgggcttccgagtatttataggtaacccaatagggcgcgcccagcttctggcggaacatcggcgccagattctgaatcatgatgccgtcctcctccgccgtgacggggccttggccccgccgggtgacggtatagctggagagcttcgcactgtggccctcaagcaggtcggtcagctcgacaccgaaggccagggcacacttatgaataaaggaaaagggcaagtcgcacgcgccctcctcgtagcgcaggtatacatccaccggcacatccgtccgctcggccatctgggcgctggtgtagccgataatctctcgcatctcccggatccggcgggcaagctcgtgcaatttattgtcgactgctgtctggttcatgttggttctcctttgctgcattgtattccgcataaaaaaagcgccccaacgcatctgcatgatgcattgagacggaatgaaatccgcggtaccactcaatttgcacaccctgacggcatgccactcatcggctcctacaagccttgcgcattaacgtagcgtacacgagaaggatctacaggctgccggagcagtgttcgagcttccaactcagaagggataggtcctggaagctactgcctaccggttcacaccaaacaccggctctctgggagcgccttaacttcgaccgtcttcgtcatcgtttttctcttatgaacttggcattattttaacgccgccgtcccgctttgtcaagcgccgcgggatcggaatattacacaaaaactgccgccgcttcccccaaattttctgccgtattttgtgttttcccgcgtatcgtgcactcgcgcggcagtgcatgaggccttgcactgccgcgcaggcaggtattatttggcaggcttaaagctgtccttcagcagaacgctgcggttaaagacagggtgggccgccgtgctgtcgcggttatccaggcagaaataaccgacgcgcataaactggaacgacggcgcagtccggtttgcgcggccctcacctagggcgtcaaacgcctgcagctggggcagcagcccagcctcgatcttgcagccccgcaggacctgcagggacgcagggtcaatataatccaggaaattcttttccgggccgtccgggtccggatcggtgaagagattgccgtacaggcggacctcggcgtccaacgcggcggcagcatcgacccagtggattgtcgcacccttgaccttccggccgtcggcggggttgccgccccgggagtccgggtcgtactcgcagagaatctccgtcacattgccgtctttgtccttcctgcaaccggtgcaggtgacgagatatgcgcccttgagccggacctcattgcccgggtacatgcgcttatacttcggggccgggacctccataaagtcctccgcctcgacccagagctcccgggaaaaggtaatctcatggctcccctgctccggatgcagcgggttgttttctaccgtaaaggtctcctgctggcccgccgggtagttcgtgacggtcagcttgaccgggtgcagcacagccatggtccgctcagctgtctcgttcagatcctcccgtaggcagtattccaggaaggcatactccaccgtggaggccgccttggcaacgccgatgcgctccgtaaaattccggatggacgccggcgtgtagccccgacggcgcaggccacacagggtcggcatccggggatcgtcccacccagagacgtattgctcctccaccaggcgacgcagcttgcgcttggacatgacggtatagttgatccccaggcgggcaaattcgatctgccggggatggctcggcaggtccagatgctccacaacccagttatatagaggccggtgggcctcaaattccaggctgcacagggagtgggtgatcccctccaaggcgtcctggatggggtgggcaaagtcgtacatggggtaaatgcaccaggcgtcgccctggcggtgatggtggatattacggatacgataaatgacggggtcgcgcatattaaaattgccggaggccaggtcgatcttcgcccgcagggtccgcgtcccctccgggaattccccggcgcgcatccgggcgaaaagatcgaggttctcctccacagaacggtcccgatacggtgagacggcggggatgccgatctggccgcggttttccttaaactcctccggtgtcaggtcgcagacataggctaggccctttttgatgaggtccaccgcaaaggcgtagtcctgctcaaaatagtccgacccgtagaaaaagcggtcgccccaatcgaagcccagccagtggatatcgttctggatggcgtcgacatattcgacgtcctccttggcggggttggtgtcgtccatgcgcaggttgcacttgccgccgaatttctccgccgtgccgaaatcaatgcacagagccttgcagtggccgatgtgcagatagccgttgggctccggcggaaagcgggtgtggaccgtcatcccggcaaattggccgccgggggcaatatcctccgcaataaaggcatgaatgaaattcatgggttcgtttttcgtcagctcttccgccatacctggccctcctgtatcctagcatgattgcattgattttcattattatataccagaaaaaagcaaaacgcaacacgcgctttgctttcgcgtgtcacgttttttccagctttaccgtcccgatgcgctggcccaggtgcaccggtgtctcccgaccctgacaggaagcgcgcagcagcgccgcatccagtgtgatgcggccgggttccagcaataggatcactgtgctgccgccgtattggaacaggcccttttcctcgccccgggcaaacgcccccgtctgctttcggttcacgatccgccccaccagcatcgcgccgacctccagctgaaccgcgtggcccaaatgcaccgcctccagaacggtatacgcacggcagttctggcaaaagaccggcccccgggccagcgccaccgggcggaccgtatgcaggacccccggcaggaagccatagtccgcgatcactccgttatccgggaaacaatagcggtgatagtgccgcaccgccaggcgaaacaccagacaccagccaccagaaaacggcgcggccagcgcctgactacccagcagctgcgccagggtataccggctctgcttggcagggataaccacaccctgctccaccgggtaggcactgagcagcccatcgcacggggcgatcagcgccgccgggttctggtcgaccgggcgcagctccgaccgaatgcggcggcagaagaagtcattaaagcttgcatagcgtgcaggcacatagtcgcccaggtcgattccctgccgccggacgaatgacctgataagcagccgggaggcaggcctgtccagcagcgcaccggcaagcttggaaaaccagcggctgcacaggggccgcagcagcgcccggcccagcgccgtcccgtagagaaagcgcagcgcggcgctctcccggctctgcttcacaatcgcagcagctttccggccagggccagcgcaaattccagtgcaccgatcccaatcatcagtaaaatcccccgcagaccgggcttttggatccggaattttgccaaaaagccgaaccctaccagcagcgccgtgccaaaatagatgagggagatatccgccgtcgtgatatactgcagcagcaggataaacggaaaaatcaggcacgctgacgtcaccggcaggccggtgtaaaatgtccggtggtgcccctcgcggctctggtacacctcctcggctacattaaaaaatgccagccggatcagggccgccagaatatacagcaccagcaccgcatacaaaagcccaatcagcccaatgcgcggccagatgctggacgcagcgcgcagactggcaatcaccggcgaatagcgcatgagtgcgataccgatgcacgcaggcaggacgccgaaggcgacgaggtccgtcagcgagtcgatctggatgccgaattggcgctccagctccgtccggtccttcttgcggcgggcaacgcggccgtcgaatgcgtcaaacaggccgcacagcagcaaaaacagcgaccccagcaccggatgccccggccaactcagggagacaaagattcccgttacggcagaatccagggaaaaataggtcaaaacgaccgtataatcatagacaccaaccataaaaagaccttcccgccgctcacagcgcgtggcggctttccgctgccgggcttttgtgcagcagatagtccgcaaatgtcaaaatcccgcagaagataatgcaaatatagaatgagattgagcggctgagcagctccaggctcgccgccgcctgggccgtcagaacgacctggaagccgcgcagcatcaggtagtccgccacgcccatagccccggggatggggatgaagttcgagcccagcacggcatagccctggatggcccagagccgcagcgccgcagcgggcggcgcgccagctgccaacgccgtgcaggcggtcactgcaatgtgtgccgtccgctgggcgagattaagtagaaatacccgcaggagcatccgccgctcgccctgcagggccagcacgcactggccgtattcatccatccgccgctgcagcttctggcgctttctctccgcatggcgcaacagatgcagcgccgtcaaaagccgcagtacgccaaagcagatgcgctccagcagccgctggtttttgatgagcaggacgtaaaaccccgtcaacgcaatctggatcagcagcccgatggcgaccatcaggcgcatcggcagatcaaacgcaagaaacacgcccgggaagcataccaggatcaaaatgccgatgacgacgatggccaaggtatacatcgccaaatttgccagcagcgccgcggtggacgccatgccagagataccatcgcgcatcataaaaaatgcgcaggcaggctggccgccggtggcagagggggtgatggcggagaagtagatatctgacgccgcataagccaagccccggcccatccggatgcgggggccaaaggggcggcatgccgtggcgacggcagcggcctcggaaaagatataaaggaacatgcagccggccgcagcggccagccagcccggctttgcgccccgcagcattttcataaaatcatgccaggaaaacgcccggttctgcgagacgatgacccagaccgtcagcgcagcgatggccagcgccagcagggtcagaaggttccgtgtcctagggcgcataggttctttctgcgcggcctcctgccgcatgttgtttgcgttttgttctcggttcaagctgtgcctcctgctgtggggcgcgcggtgcgccggttcaaaaattcaaagaaacggcctgtacgccattttttggccaaatactgcccggcctccgccgcgagaatcccagcggggatatccaccaatacgtgctgcttcacgagaacgacggagcagcagacaagcagcgtaaacacaagcgacacccatcggtaccacgggccgatgcgctttagcagccaggcaccccgcaggcagacccagctggccaggcagtggagggagggaaaaagattcaccggcgcatccgcccgatagatcagccgggtcagccagctgaaagcatcccgtcccgggacctccggccggaccatcgtcgtcggcacagccaaaaacagcaccaggcagatggctttcgcgaggatctcccccgacaggatccgactgcccacggcctcgctctcccgggcgatgagcacatacccgatcccccactggccatacgccagaatatacaccacgataaatgccgggacaaatggcacccgcgcatccagcggcagagccatttgcacatgcaatctcgcagcggtcaggcaggaggtgaggtaatatgtcacaaaattcatcaccagaacgctgagcagcggcagcacggcataacgggggataagacgtcttttgttttctttcaattttgtcatgtttcttaattcttcttaaaatttggaaatttttcttcggaaatcacgtattttttcggtattatagcacattttttaccatttttcaagtcatttgctacagcagagatcgggcgcggatttgggcagagaaaaccccctacgacgctgcagcgtcgtaggggggccgaacgggggcgcaggcccccgcccgtaggaaaaagaaaggtttagaatgagactacgctaattttgcgtcaattacttgacgatcttcgtcgcaaaccgctggaggatggctgctgcctgggcgcgg

SEQ ID NO: 3182 - DNA, 7012 bp, Unknown
  16S sequences of unknown bacteria
aaattatgcgcgcagcagggtgcaagccccttcaaatgtgagcccagcgaagcggtaagtgagagtcaaaatctctgattttgttactcgaacttatacagcgttgtcgcatttgagagcgtgtcaaaaatacttttttgacacgctcaagagggagcagcatgggtctccatgctgctccctcttttgccgggctctctgctgcgtggcggctcaggtgcggtgcagcagaccgacgctaatctctgccagagtgccagctgcttccatggcgcaagcaggctgggcagccaggtcggccagactgaccatgccgacgagccgccgcccctgggccaccggcaggcggcgtacctgctcccgggccatcagctggactgcgatgggcaaggggtcctccggtgcgacggtgataagccgccgggtcatgacagcctggaccggtgtttgccccgggtcctggcccgcggcgacgcaccgcaggacgatgtctcgatctgtcaccatgccgcgcagctggccaccgctgcaaaccggcagcgcgccgatgttgtgctgtgccagcacccgggcggcagcagccaccggctccgccggcgcgatggcgattggctggccgctcataatgtctttgacctgcatatcggttcctcctgttttcaatgtatgtgcaaagccagtataacccggaaatgcgctgcctaaacggccttgtcatttccccggcgggcatggtataataaggctactgtgctaagcgcgccgcccaaagcggcggcggaaaaataaaggagcaacgcagaatgaacgagacaatgcacgaaaaactgacccaggccatcgcaacgatgacacagacgccgacgaacgaaaacctgtttgccgtgctgcagcagctgggtgatatgctggaggcaggcgctggcgtcctggtcccggcggaccggatgccggacgaaccggaccaggaggaagatcggatccagtaccggatgctgcagggcagcgatgggacgcctttgcttgtctgcttcacagcccaggcggagctggagcgcggcgcggcgacgacagcggtggagctgccgctggagcagttgctcggtacggcgctctccaacgagcaggtcggcggcgtggttattaacccctggggcaagcctttccggctgaaccggcagctgctggagatgctgcagcagatgtgcagcgaggcccagaacgaggggcagctgtgcacggccgaccatgtgccggatgattttatcgtccagctgcgggaggcgggcgtgctgctgacggatattcgcagcattgccatcgccgggctgctgcgccagggggagggcagcttcctgctgctggtggagtgcgagccggaggcggaccagcagacggtgttcacccgcctgcctgcccatttgaagccgacggtcctgccggtggatgtcgcgccgctggaaggcgagctgcccgaatgcgcccgagtcatctaccggaagctgtagaaaaggcaaactaggttgacaattccttcgcgcaaaaagcgccgtgcataggcatttgtgcgtgccttcgaaacaaatcagcgtttttctcaataattcctgaaaagcctatggaatatgacgccgttcgacagcattttcagacgtcatctgctaatattgtgccgtaaattagaaagagaacacaatatttagtagttggaggatgaaagatgcgagacacaattcgacagatccagatgtattattactggcagagaatcttacatttacggaaaaaaggcaatcgccgcttgcagcaaggcgcaccgatgcaggatccaaagctgcagctttggtccaaccagttgacaaatctgggcatgacagtccatcggctggagacctgtgcctacgcgccgcattgacaaacaccgcagggaattttataatgaagctatcatatgaccgccgcgatctttgcggcaaaaggagattttatcatgaccaatgcagagcagcagctcgttgaattttgccaggcgctgatccgtacgcccagcctttctggccaggaggagcaggtcgcccggcttattcaaaagacgatgctgcaggagggctttgatgaagcggtgatcgaccgctatggcagtgtgctgggctgcatccgcggcaaccggcctgggaagaccgtcctgctggacgggcatatcgacaccgtcgatctgtccgaccgcagcctgtggcagcacgacccgtacggcgccgagctggtggatgggaaaatttacggccgcggcacttcggatatgaagggcagcgtcgcagcgatggtcatggcggcagcggggtttgcaaaggcccgcggccatgattttgccgggacggtctacgtctcctgcacggtccacgaggagtgctttgagggcgtctcttcccggaatatcaccaagctttgccacccggactgcgtgatcgtcggcgaggcgaccagcacgacactgaagatcggccagcggggccgggcggaggtcgtgctggagacgaagggcaagagctgccactcctccaatccggacgagggtgtcaacgccgtctatttgatgacagagctcatccaggagatccggaagctttccgcgccggagcatccggtcctgggcaagggcattttggagctgacggatatcgtctcttccccataccctggttcgtctgtcgtaccggagtattgccgcgccacgtttgaccgccgcctgctggtgggggagacggagcgggatgtcctgcagccgctggaggcactcatcgcacgggtgcaggcccgggtcccggccctgcaggcacgcgtttatcttgccactggcaccgcgccgtgctggacgggcgataccatcgaagcgccccgcttcttcccggcgtggctgctgccggaggatcactggctggtccagtccgtctcccagggcctgcgggaggcgggcattgaagcgccgatctcccactacgacttctgcaccaacggcagccacttctgcggcgaggcccagatcccaacggtcggcttcggcccttcgctggagacgttgggccatgtcatcgacgaatatatcgaagtggcgcagctgacaaaatcctaccacggctttatcagcatcctggagaagttaacgggactggagaaaccgtgcgcatgagctgcctccgcagggcggcctgtctgctgctggcactgagcatcctggcgctactgctgggctgcggcagtgagtcggcgtatacgcaaaaggagatttttgccatggataccgtcatgtccttccgcatctacggcaaggcgggcggcgacgcggcggatacctgcacggcaatcatccagcaattagagcgggagctttccgcgacagacccggcgtccgatttggcgcggctcaatgccgccggggaaggggcgctgccggaggacgctgcgcagctgctggcggacaccttggccctgtcccaacggactggcggcgcgctggacccgacagtctaccccctggtttgcctctggggcttcccagcgcaggcatatcgcgtcccgacggacgaggagatcgcagcgaccctagcgctggtcggcccacagcatgtccggcaatcgggcacgcaggtgcagctggatgacggcacacagctggacctgggcgccgtcgccaagggctatgccgggcagcggtgtgccgatgcgctggaggaccagggcgtcgcggcaatcctgaccctcggcggcaatgtgcagaccatcggccggaagccggacgggacggactggcaggtcggcatcgccgacccggacgccccggagacgtctcttgctgtactgcagctgcgagggacgaattccatcgtcacctccggcggctatcagcgctattttacggaaaacggccagcgctaccatcatattttagatcctgccaccggtcgcccggcagacagtggcctggcttctgtaaccatcgtggcaaaggacggccttttggccgacgccctctcgacggcgctgtttgtcatgggcctggacgaggcggcagctttttggcaggagagcgacgattttgaagcagttctgattgacgcccagggccaggtctatgtgacctccggcctggaggacgccatcaccggctgtgactatacggtgatcgaccgatgaaaacaaagcattggatccttctttttgcggcgctgttttgcctgtgcactgcgctgactgcggtgattttttggccccaagcagcgtctgcacaggcagagatttatctcgacggggcgctggtgcgcacagtaaatctctctaagtccgagacatttacgctggacacagagcgtggctgcaatacaatcacggtgcgagacggcagcctggccgtgacagacgccgattgtccggatggctattgcgtccagcagggctggcgcgacagcggcccggacctaatctgcctgccccaccatctcgtcatccggttctccacccccacggagacagacgccatcgccgggcagcgttagtggggcagctggcgcgtgaccgggagcgcacaatggagctgtatggtaaagccgtgccggggaagaaatgctccccggcacggctttgctgtatgatggaacggcagcctactacgccagacgccggtacacagagaagagtggcgccagaccgacgattttcctgtcaaaacgcaagacgtatttcatataatgcataaaaaattttacgataaacattaaaaatagcttgacagcgcaggagtgatcgtgtataatgcaagcataacgataatcgttaaatattttatgttttgcatgtggaggtcttctgatgaacgcaaatgctatcaaaaaagtcaatcattttggcaaggcgggaaagattgtaatgacgatcctgctgattgccgcaatccttgttacacttgtaagcggcgtggctacgatttatactgcgacacttcctaaggatgccgtgaaggtcaccgtcacgaatcacgccgagtttaagattgacgaaggcagcttccctgccatatggtcgtccttgtgcagcacgtctcctatgcggcagaccaagacccgtctgcacgcctgaaggatgatggcggcaaggtccttcctccggagggcacggagctccagacggaattggatttcttccgtcagtcgtattcctcggcgacgatccgttccgagaagaacgagaaaattattgacgcaaactctgcgccggaagaatatgtatcctctgatttggtactgctgctggtttttgcaacgctgtttgctgcatctgtcgctgctgcactgctgatgctgcaaaagcttttcaaggtgcttgctgggtgcacgtcgccgttttgcgtcgagtttgtttccagactgcggacgtttggttattccctgcttcctgtcgcggtgtttgcaagtgtgggagaaacccttgccgttcgctttctgtctgcgggaagggatactgcggtttccgtccagtggggcgtattgattacctttgctgtaacgatgtgccttgtgacggtgttccgctacggcgttcagctccagaaggagtcagacgagacgctgtaaggaggcgctgcgatgggacatattgtattgcggcttgaccgggtcatggcagaccggaaaatgagcctgaacgagctgtcggaaaaagttggcgtggcgaatgtaaatttatccaagatgaaaaacgggcatatcagcgcgatacgcttttcaaccctcgcggcgatctgcgaggtgttacagtgccaaccgggagacattttggaatacagccaggaggagaacgcagactgaggcattaacagggccgtgctaaggctccggctgacaaaacggataacaacgcccaaacgccaccggggaataaccctccggtggtgtttgtgctgacaggtaagtccaaagaagtatttatttgtactgcaaagttttgaatgacacattgcacagggggcaagtcaatacgtcatgatcggttaattcttgttgtggataggataactgttctttgcaatttggacaaatgatatcaatatatggaatatttgagaatacatcgtcgttaacaacttctttgggagcattagttttagctggtgctgtttgctttttgctggaatggctcagcttgctttttgcagcgataatcgcactgttttcaaccaattctccaaagccataaagaataaataaactaatccatgagaataaggaaccaacaactgcaatccatatgccaaccagaaccaatggctgttgctttgttaaaattaggggaagtccgctaattatgcacgaaataatgcccaaccaacagactattttcgcaagagatttgattttaccaccgatattattaaacataccaatgcccccccttatcgtttatttatctcagttttaacatgtgtatgacattgttttgctcccaccagaaaaataattttctctttcatagtgcttttcctccataaaaaagtgtgtagttccaagcggagctacacactgaaaaacgcatagctccatttgctgccacacaaattcattcctacgccgtaagcgcacagaagtagagcatgcatttttgccaaagtgaaatgcacgctaacagcatagaaattatgaatttgtgtggcagaattatcatagcacaatcattagaagaattcaagcatatccactggtcacgtttgcctgtaccgatttattggcaataagggctttatactttcttatgagattccaccaatatgggatgaacagcttgcgtatgagaatggatgaaactccgatgccccatggttgaaatccggggtcaaaaaagctataaaaccgggcagttgtgcaaatagagaaataaaaaatctctaaattccgaagaatttagagattttggtgcgcgaggcgggacttgaacccgcacgtccggagtggacactagaacctga

SEQ ID NO: 3183 - DNA, 8038 bp, Unknown
  16S sequences of unknown bacteria
agaaagcgaagagcaggtgcttggatgtgtgtccggattcctgccgatcattgcagtattcaaattcttatgcatgaaatagatcattaccagatgaaaggagctgtcgtaagatgtgattacggcagctccttttttctgtgttatttttccggacacaaaaattccaggccggacaacctggaatctttgcgttgaaatgtatataactactaaggggatagagaaaagcaaaacgaaaaaaaagacagtaccgggcttcggtgctatctccattgataacttttcgttttaggcttccaggagttttcctcctgttgagtcctattatacgttttaagacttgaaagtcaacgttttttcaaatttccatatttcttttatcaactctgattttcgccaaaaaaattttagatttctgtgcaaaaaaggagccctcctgcaactggaagggccttaaaaagggaggatgccgagtgctgctcactcggcatattatgaaaaagttttatttaaagtatttaactagctgtctttcttttgatgattttattatatgcaacaatcgtgaaggaatcatgataagttcgttaaccttttttgaaagataaatgaacaaattatgaacagactaaaaccttctccaactcctctaccacaatccgcaatgccttaatccgggcatattttttgtctgtggattccagaatatgccacggagcatagactgtgctggtcttctggatcatctcattgactgcggtctcgtactgatcccacttgtctcggtttctccagtcttcgtccgtgatcttccactgtttttccggcgtattctggcgatctgtaaagcgggcaagctgcgtttccttatcaatctgcacccagaatttgatcagcacagcaccccaatcctgcaattctttttcgaattcgttgatctcgttgtacgcacgcatccagtcattttcactgcagaatccctccagccgttccaccatcacccgaccgtaccaggtacggtcaaagattgcaatatgcccggtcttaggaagtcttgtccagaatctccacagataatgtcttgccttctcatgaggctccggactggcaattggatgcacttcatatccacgcggatccaaagcaccggtgattctcttgatatttcctcccttgcctgctgcatcccagccttcataggcgatgatcacgggaactttcttgcgatacagacggttatgcagttctcccagccgtgcctgcagccgatccagttcttccttataagtattgtcatccagttccttatcaagcgggatctctgaaagcttcggcatctgcgtcataggaaatacattctgaagaagcggcaccgccagtgcctgattgctcagtgcaatgtcgatcccctgagtcagatattccagcacctgcagctctgtccattttctggactccgcatcgatcatataccagggtgctgatgacagactggtgtctttcataaatgataaataagcttcctgacattttttataatgtttatgctgccatacatcccgtttgctgatccgccaggaagtatctgcttttttctccaggacttccatccgtttttcctgctctttttctgaaatatgcaggaagaatttcatgaccagatatccgttatctgtaagctgacgttcaaatctgcgaacactttcgatccggtctgcatatgtcttttctgtcagatcaccagagagcttctcctgcacagtctcatccatccagcctgaatcaaaaaatgcgaactttccagcttccggaagtctcttaaaataccggtagagaaatggctttctcttttcctcttcggtcttcttttccaatgactccacattaaaaaaacggggatctatgttctggatcacacggccaatgcagtttccttttcctgcagttccccatccttccatcaacaccagaaccggaagcttcttctctttgagcagcatctgctgacgagccagcttctcccgcgccgtctgcagacgatctttcagttcttccgttccaggacattctgtcggttcccacattttcattttaatacccccttactcttttattctttcacgttgatctattttccatacctgatcttttttcgctttttccaaacagtaagaatctcaacggtttcacacaatcaatgatatagatcaatgcccctgtaatcacactcatagccacaaatgctgctgccgcatataaaagcccttctacgctccagaacgcatatgcagtcttgtccggattcaacacggtcgcaaactgataatgaatcacatagatctccagtgtataagcaccaagctttgaaagctttctcttaagctcacaggttttccagtccagtaccatacggatcagccagaaacagcccagaaacgaagcagccgtctgcacttccagcatcccaattccggtcacagtcaccagatcaagcatcacgaccatcaccagaaatacaacagcgcaaagtcctgcgatccaccgctgcatggaagccggtgcatatgtttccacaaattcccggtgtcttcccacaaaatatgctaccgtataataaggcagataaatgatcagaatagaaggacttaaaaatgtgactccggcaagataagacactaatatcacacaacagcctgtcagccagacagcccagaaggcaatctctttttccgtaactgcctcaagaagctgtgccgtataacacagtacggtaaataaaaataatgccatcagaaaccataatccatagtccagctgaaacaggactgtacgtaatgcctggggcacatatgtcatatgctgcaccaccagccaggagaagaacggaagcagataagccactgcccgtctgccgatcttttttctatattgctccagattggtaatcttctttcctgttcctgccagatacccgctgatcaggaaaaacattggcatctgaatggattttattacatcataaaggtacggatctgtcatatgattgtgtacctgcacatggccgaacatgaccagcaggatcgcaattcctttcagacaatccagggattcatttctctctttcatacaatctccatttacatatcattctgtttttagtttagcacaccaattgtcacggggcaaggaatgtgttacactgtaaccgcttgttgagaccatactttcaagaaatggagattacctatgataaactttttacggcgtaccccgttatatcctgtgctggccggtatctatccccgcctccacaatttctatatctggctggtgtggcagatctgctatctgctgcccgtggatcagcacaagattgtattcagcaatttcaacggcggtggatttggcgacaatgcccgctacattgctgaggaatgcatccgcagaaagattccttataagctttactgggtctgcagtaatcctgcacttcctttcccaaaggagctgaaccttgttcctccgaacacagcagcttttgtataccatatggcaactgccggctgctgggtagataccaccagaaagctttactattttaagaagaaaaagaatcagacctacatccacacctggcacgcaggtcctggtctcaaaaagatcgaacgtgatgccggaagcggacttacagataaatatgtccgctatgcgcagcgtgattccaaagccatcgaccttctgttatccaactgccgcttctggacccagtgcttccgcagctgcttctggtatgacggtccgatcatggagaaaggtcttccaaaaaatgatctgtattttcaggatcaggagccactccgccgcatgatccgggaatattatggtcttcccatggatgcaaagatcgtgctctatgtgccgacctggagagaaaacaggaaattacatgtgtatcatcttgattttgaaaagtgtctggaagccttcaccacacgcttcggcggtgactggtatatgctggtccgcatgcatcccaacgtaaatgcagcggattttgatattcattatacagaccgtatcctgaatgcatctccctatcccaactcccaggagcttctggctgccggtgatgtggtcatcaccgactactcttcctgtggctttgattatatccagctgaatcgtccttctttcctgtatgcagaggattacgaccagatgaagcgtgacaaaggttactacctggaattatccgacctgcctacaccggttgcatttaacaatgctcagatgctcaaaaatattctggactattcagaggaagaatatgaacagaaacgagaagtgttcatgcagaaaatgcaatattatgatgatggccatgcctcagaggctgttgtcgattatattctggaacatacgaaataagaaatgctgtcagtggagctttcatttatccggctgacagcatttttatatattgcctgttatttacatataatggatctgatctttgtatttttcaaataaggttctgttgaactcatctccgccatctacattggcactgtgaaataccggcggttcaacacccatctctagcagatattcgacggttcgaatctccagcatatttacaatggcacatcctaccacgctggaagtcggtgcgattttctgcttcattccctgaagcagcatactagaatcctcataatcaccacaattatcaatcaccacatcgcacacctcatacaactttttcctactagaatgacggctggtaacctgtgtactgtactccatattggtaattgctgtggtatagattcccatctctgatgccttgatcgccatctcaatagctgctgtatttcgtccagagacagaatgcagcagaagcatatctcctttttccacatcactattattaaggatcacagttggatacccctccagccgctccatggccgacgtctgtgtcaccggtcttgtattcagcataaattccgacgggagaatcgcattgactacggccagtcctccagtccgatagaacatctcctgtgccagaattcctgcgtgggaagctccgaaaatatatacagaatgacccgccgcgatggtctctgctatttttttcgcacttttttcaatggaatcccactgtgtcgtcttcaccttttccagaatctcgcctatgtgcgcaagataatcataacatttgctactcatactattcctccatttttctatctatgagatactgcaatacctcctgggctgttgtcagcttatccagttcttttctcatctgcggatcgctcatcagattcatgatccccaatacctgctgaagccttggattacgttcttcactggcaagacatatgacccaaagcaccgggtcattggaagcatgtccaaaacaaactggctcccttagttttaccaatgacaatccaaacctgtttacaccattctccgggcttgcatgtaccagtgctactccaggacagaacacacaataggcgccatatttttctaccgcttctttcattccctgaatgtactccgctgtgatgactccctgcttctcaagcagtcctcccgccgcatctatggcactctgccagtccctgcatgcagcatccgtggaaatgttctgcagttccagaacaaatgcaccctctgactctgcggtatgttcggcaatcccgttatttttatgtttccatttctgttttctcaaattcaaaaatattttctgcaacgcaagaatatcgttgtcttccaacatgggagataccttgatccacgctattccctgcaaattcaacgtaactgttgagactaccagatcaaaatcacacaaatccatggtctcctccagcttatgcctggatgtgattgcgacgatccggatattgaaattatttttcaactgttccgctagaaaacaggcagtaccgatccccgtatgacacacaacgaccactcccggcttctgataactctgataataccgttctgcaatcgcaaccacatggaacaggataaatgtcagatcatcctcagaacaggaatatccaattccatgctccagcatataaatattccgcttcaccgcctcgtaatacaccgggtatgctttctgcatgggttcccgatattcattttgaaaatgaattccttcccggtgcgccttcgcaatatctttcaaatgcttttccagctgatcagcagcctgcatatcttcacataacggaagggacagttctttcccaacctgtgtgagaaacccggtcacagccacatgcatctgcatatcgcgagcccggtctgcggctccatccttataaaaacggcattcatacaatgcatgtgcaagaaacagttcttcctgttctgtatatggaaaatgaaaaattgcatgcatcctggaccataatcgttccgccatctcaaacaccggatacattcctgtaaagggctgctctttatccatccgatcaaccagatgcccatgtttcatcctcgctagcgaaattactatggtaaactgaacctcttcaaagcaggaatccgagacattcagtttctgatttcgttcttcttccaggagaagcatcctcacttctcttcgataaatctccagaccatattcatcccgcagatatttccagtaaatattttcctgttcttcgcccatataggcactttccagagtgccctgaaccagtcttaccaggagcgaacgacgttcattttcatgaatgtccagactatatcctttgttcataagagatccgaaagatatcccctgccgctccagataacggcgaaccttctccatatccttgaggatcgttccgcgacttaccttgaatttttctgcaagatcattgagtgtgcagtaagtgtcgctcatcaaaagtgttatcagtatcatcacaaaccgctccgtgggagccaatcgatacaggtaaaactcatgatcaacagatgctctggatagcatccaaagttcctctgctgttccagtcacacagattcctccttctgactgctgcaggagcgcttcttttccattctgattcataaaatcccggatcgttgtcatataattacgtatcgttctggtactaacatgcaggtattccgccaacgcttcacaggtaaaatactgtccgggagaattcagcagaatcttcagcatctcacttgtctgcttgttcatgtacatcaccttcctaaagtgcgtaaatgttctatttcatcatatgtgcagtttaaagttttctgacattcctgtaaatagtatcttgtttccagaaaaatggaaacaagctgaactgtgcgaaacatgctatgaatgctagaataattctacaagtagtagcgcccacaggcacagaaaggaggtcagttatatggtgagtatgctcgaagaatcgcatgtacagatccatgttcacgcagacgactgggaagatgccatccgaaaggccggaaatgttcttgttactgctggaagtattgatacttcctacattgagcacatgatccagtccgtaaaaacacttggaccttacattgtaatcatgcctggctttgcactggctcacgcagccccctgcgaagctgtgaaaaagagtgacattgcgctgatcacgttggatcatcctattgacttcggttcagaaaatggacccgtatctgtcattctctgtcttgcatgcacagacagttcttcccatctggatcgactttcccagattgcggaactgctgatgcaggaacataagattgagcagatcgcttctgcacagactccagatgatgtggttcgtctgtttcagactgcataatgctcaggaatcgctttctgcctgttacacacggcattatgaaaaaggaaaggaggaaaagatatggttaggattcagacagtttgtggatttggatgcggctcttccctgtttctaaaaatgaaagtggaagaagtcctcaaagagcacaacttggaagcaga

SEQ ID NO: 3184 - DNA, 32759 bp, Unknown
  16S sequences of unknown bacteria
gcctattttcaatttagaaacgcattatttatcgtcctactaaagtatagccctccggcgcaagctcaattgccgtcaccgtctcaccgaaggtggatgcccatgcgtcaaaatgctgaagtccgcttctttgaagtgtttcatactgcaaataccgctgaatggtataaagctctaccatagagttactgataggcgttcctgtggcaaatacaattcccttgccccctgtcagttcatccaagtatctgcatttcataaataagtcgcttgatttctgcgcttccgtctgggcgatgccgcccacattccgcattttggtatagagaaacaggttcttgtaataatgactttcatcaataaaaatccggtctactccaagctcctcaaaagtcaccacatcgtcttttctgctttggttattcaatttttcaagctttaccttcagctgtttcttgcttttctcaagcgcctttatggaaaaccgttcgcctctgttttgcttcagctcaccgattcctatcatgatttcgtcaagctgtttttccttgcacctgcgagaacttcaaagtatgcgtcgaaattatcctccgctccgttttccgcagcacataagaccgcctgcgtcaggctgtctttttccgttagttccccatatacgacttccagcgtttcaatgacttctgtttcataccgtaaatccatgttccaaatgagaacttctatgggcatcctgccttcatgggtatcggaaatatcaaagtagtgctttagtctttgcggtccgtttacacggtcatcaaagacagcaatgccctttgcccctttgttcacccatctgtgaaaccggtcattccacttttcgatttcgagcaccgctgtggcgtcgggcctttgcgcatagataagaagctgctcatcaaagcgcagtttgaaattaaatccggctgttttcagaaaaccccgccacgcttccttatcccctgcgacctgccttgaaacttcttcataaactgcggaaatgagctggtatttacttgccatttgcttcacctgcctttcctcttttctggcaataaaaaatcaagcaagtatttttacctgcctgattatgtactgaaaatctcccttccgcaaaagctggaaacatctatatcctaaagtgtctatattttcagcacctcattactatattatattgcttggaataaaacagttatcactgtcaatcggtatgacttcctcacacatacaaacaataccgccgctcccacgtttgagagatgtcttatcaatcactgaatactttttaatttctctcctgtttggacttgcagatttttttatctcaatcggatgaattgtatcattctcttcaataaatagatcaatttctttcgcattggaatctctataataagaaaggtttgcttttgactttgaataagcataggtcttcacaaattccatcaccacatagttttcataataatgaccgcttgcggcaccgttcatcagcgtttccggtgacagccacattgacaggtatgcacaaagtgccgtatcgcagaaatagagctttggcattttcacaagccgtttcagttcattattctcgtaaggcttcaggagatatacaataccgagtccttccaatatatttagccaaacctttgcagtaggttctgatatatccgatgcttcagctaatgtggcatagttgacctgctgagataccagagccgcacatgcacttaagaattttgaaaatttcacggtgtcacttacgccgccgacttctgttgcgtcacgtatgagataggtttctacataagaattaaaatattcttctcttatttctctgtcaacctcctgaacatccggcattccgcccttccaaatatgctcatagacagttacaatattgtttttttgaaaaagtttctgcctttgaagcagtccctgtaaagataaattgaggtcatcgtctattaaaacgtcttgtttttctctctgtgaaagactgtataaattcaatataccgattctgcctgccagggtttctctgacctgcttcatcatctggtattgctgcgaacctgtaatccaaaactgccctttctcgtcgctttcatcacacattatctttatttgttcaaaaagcccgggcgctttctgaatttcatcgatcagtatcggtggttgataagtttgaaaaaataataccgggtccgtttgagcaagctctcttgccatacgattatcgagagatacataagttctgtttgttccttccgccaagtgcttcagcattgttgtttttccaacctgccttgctccggttaccaatattgccttaaaatgagaattcatcttaagaaattttctctccaattctcgttttatatatttcataatggcgcctccttttttatgatattctaaaatttattttattttatcataaaaattgcacagaatcaattcttacgcttagtataagccattatttatcaggatattcttaaattaattttatttattcatatttctaattgaacaccacatctaaacagtacttttcacaaaaaaatgttcataatatatacacagcaatcattccaacaattctacctttacttgccgtgaaatattaattaaaaatcaaacaagcacttccctctccgattatgtaagggggatgtaactattcctcataaagaagaaatgcttctgctgtgattctgattccaaatgccactccgcaacgataagccgctgtatcttccacccctcccatcagcaggtaaagttccataaactcctcaaacagctcctcctgctcttttgaaaatgtctttctaagtgcttcttccaggcggttcttcttctctcgatgcactttatagtcctcatcgtttatgatcactttctccgctcccggtattccctcacgataaaggttctttatgattgatttgtctttcatcttcatgatgcctgcctttccttgttttgttctatcatatctatgaaaaagcagcctttccactatgtaaaagcccggctttcctctgcaaggccggactgctctgtttacctggtctcatctgtgaagctttctgatgctcccgcaagaaaagtaatgaccttattctttttcaccgcctctatcagctccagcattttatccagctcctcttttgaatgaagccctgtacttctcatgtcttccaggctgaagttcataatcgacttctccgttacatatcccttttcaaacagtttgttcatcaccctcatggtcgttttgtctatggccatctgctttttcacctcgtttctcttccagttcctttaaaatctctttcatacaaaatccgcaaaaccttgtttttttatcgtaatatgggcaggaatcactgcatttttttctacccatcccgatcaccttctttacgcatcagatggcttccgtagtcggtaaaggcataccagtttgtccggtcaaatttattccggttaaagcagcctttgatgatgacctttttctctaccagacgctgaacagcatcctgaatcatgttaccgcttaggaaagggaaaaagcctgtcatcataagcacggaacatctgcaccatttcctgccgtccctctcatagtctctgccgtcatagctgcccttttctatgttgtcccagataaactgtgcaatgattgcggcgtgaatgccaaaacgcactgccatagttcctttgaatttacacatcaagccctcctgtttccaaaaaaagagagtgacattgctgccactctcacatcttcttttattcgttttcttctgtactgccgtcgctcttttccgcctttaatctggttctgattttcattgcggtaatgcctgcgcccgctgcgagaagaagcacaacccacaggatgacattggaatcatccccggtcttcggtgtgtctgtaaatactggcggggtttcctctttctcttcttccggttttactttcacggtctgcccttcatcgtcaatatcttcatggactgctacctgaatatcggaatctgcgtaaaagaccttttcaaagactacgatttcttttccggaaagcccttcagcgtcaaaagtaaaggtgacttctaccgtcccgctatcattttctgctgtaaattccatctcggaagtaatctcttcaccaccgactttaagcggttttccgatttccttatccatcaggatcccctttaacagatacgcttttcccggcaccaggtttttatattccaccgtatctttgatggtaacttcccctttgttctccagctctttatctctgtcactgtcatcagaagcagtcgttccgatttccgggaagtgaatagtctgtccttgattctcaagatctgcgtgaacggcaatctccttatctcctctgtacaacgtttcaaagactacgatatcctttccggaaagctcgctgctgtcaaaagtaaattccaccgctacatcaccgtttattgtctcagcggtaaattcttttgtcacggtcacttccttctcaccgtttttcaaaggttttccggtctccttatccatgatggttccaaccagcttataggttttacctgcctttaatccttcgtagtgaaccgtatctacaatggtcacttccttgccgatgatgctgtaagcggtttccgtatctttatcctttgcggttgttccgatttccggataatatacggtctgtccgtcatcttcaatatccgcgtgaaccgcaagcttcacatcgtcttggtaaagttcttcaaagaccacgactgcctttcctttcagcagagcgctgtccaccttaaattccacttctacggtgccttccgcttttttcgccgtaaaagtcttctctaccgtcacaggttttccgtcgttttcaatcggctttccagtttctttattcatcaaagtaccgataagcagatagtcttcgccctttttcagccccttatattccaccgtatctacgatggcaactgtttcctctgcctttccaagctgtgaatcgctcgcctcgtcttttgccgttgttttgatttcgatatagtcatcggtcatagttccaagaggcactgtcacagcgtccttatatacgcttactttgactttcatcagggtcatgccttcattggcttcacatctcagttcctcaatctcataatcatcgtagattaaagcacccttctcattgtttggctctgcttcaccaaaccagatgccgtcctcggaagtctttcccgcattggtattctgagtatggggattccaggaagctgcggtacttgcgtatccgttggcgtctgtcacgataatatggctttcgccggttgtgagggaagtgattttaaaaggaatgccggcaagtctgtttaagtccccgtccgatacctttacaaaatccagatcgccacgctttacctgttccggtgcaatgggagcatgataggtttttacactttccgccgtgccttctgaaggaatccatacggttaaagattcctcaaagggaagatatccttccggagcctttgtttcggtaatgactacttttccaagtggaagacatacggtcgttccatcgttttgatagtaaaaatcatctcctgaaacaaaatgggcgtcatcaaaacggattctgccttcagcgtccgttttgaaaatccaggttctgtccggttgctttgccgctcttggctctgaatttactgcgtaaaattccaccttgaattcagcgccttccagtgcagctttaccctggggctcatatttctttgtttcagtatcaatcttttcaagaacaagatccatcggattgttctgcggcacttctttcaccttaatgcttgtcgtctgttctgtgactacatgcacatcatagcttgtaacatcaatggcatatcctgcggaagccttcacttcctttacgggatagctgccctcttccagctttcctgatttggcatagccattctcatcggttgtcaatgtggtaatcagcttgccgtcctgatagacaccgtactttgcgcccttcagtgtataattgggattgccatctgaaacagaagcattgctactgcttttgtttaactcaagccatcccataggctccatgtaccaggaaccgacaatgtcctgataagagccgcttttgatgatgaatgctttgtaggcatccggcggcgcaggcagcttcttcagttcgtttaccacttcttttgtcttttcgatatactttgccgttgccccggtgaaagcgtctcctgacattttgtagccgtcgtgaatatatgaaacgagaaggtgtcccacaacataggcctcattttcagaccagccgctgaagcactttcccttcatcactttgtcatacccatatccgccgggcatatagtaaagggcttttctgtatgccgaatcctttgccaaaagctcgtaagtgtgactgccctcatccggcgaggcttttgtcgggtctgcgcagtacgccacattttttgtgctgccgtccacatacataaagttggtccagtggcttccgtattccagcacatctcccttcttgtagtttaccgttccgcttgcagcgtaagcctcctgtgcgctaaacggcaagcatcccgcaatcaccgcaatacacagcagtatcgcaagaattcgtcttttgtttgcgtgaattgttttctgcatttgtgtttcctccaataaaaaaactccacaatacgtgaagtatctctatccgcctgctttcgttttacctccctgtttcaaattcatgccgcctgcggatccggcagctatgtatccacctgcttcatacaggtggtccgctctctatatatacttcttctttttcagttggtcagttggtatatagagaaaggttggggtgtggggaaggaaaacacagcccgcataaaacctactcctcctgctaccgctcctgttccttttgcgttcgctgaagatacctgacatagtggtcgatggctttgaaaacaaactcctccctctgcgatgccttgatgtttttgggcagcgccttatccagctttgctgcgctgaaggaaaccttctccttttggttcggtttttcttcctgcataatggcgcagatggattcctctgtcagcttgttttcctgaagcagctttcgcattctgagggtctgtgcgtgagacggtgtgcactgctccatttcgatggtatcaaacagtgcctcttgcagctcctttggaaaatatgaaatctcaacggcaggtcttaatgcgatttggttcttatccaccagttccagcaggtcgggaatcagttctgttaatcggatatatcgtctgatattatcttgactttcacctacttcatatccgagaatttcccgtgaagtttttccagcatacttctgtgccaatggcacagaagttaaatctgacctttccccctgtctcttcatagcctccagcctcattttatatgaaaacgccttttcacttggcagtatggtggttctctgcaaattgctgtccaccatataaataatggaagcgtctctgtccatttccacaacttccgcacgaagggtatcaagccctgcaatctcgcaggctcgttttcttctgtgtccggaaagaagttcatacctgccgtcttccttttttctaagcgtagcaggagtaataacgccgtactctttgatgctttccgcaaggtttaacatatcctcatcgtccagcactttaaaaggatggtcggggaagttatcaatttcatcaatcgggatatcgtaaatcttttttagcttcgcttcgtctctttcttcctgggtggtaaaatactcatctaacctgggaagttcgaactcgatcttttcttttttcgccatctctgattacctcctttgttagattttcgtatgctttcgccaccgttccgttcttatcataggaaaaaatgctttcccctctggcgcttacctctgccgctttcacccctacaggaatctttgtctgataaaccttcatcagatttccatactgctgcctgagtgtctgctgaatgtctttggcaagatttgtccgggaatctaccagtgtcattacgattccgtctatcttaagattcgggttgatgtttcgtttcacccttccaatggtctgcgcaagctgggtcataccctttgcgggaagatactgctcctgcaccggaatgatgacgctgtcggcagcagatagcgcgtttatggtaagcataccaagagaaggcatacagtcaatcagaatgtattcatagtccttcttaatatccttcaggtaattacgaagcgtcagttccctgctcatggcgtttacaaggttcatctccatagaagacagttccagattcgcgggaatcaagtcaacgccctccttatggcgcaggacgccctcccctttttgaatttcttcctcccggattacctttctcatcagatccgccaaggtggtattcagatgatccccgtctttccacccaagacaggtagttaaatctccctacgggtctgcgtcaatgagcagaacttttttcccttcttttgcaagtcctatccctaagttgactgtggttgtggtctttcccacgcctcccttttgattacagatagccactattttcgaatccttcatcgtcctcgtcctcctcaaactcttcatcttcctcatacctttcctcgacagaagccacaaagccgtttagaatcacttcctttgtctcctcggactgacaggcaaatgcttcgatcttgattcttgcgtggtaatcacagagagccgccagtatatacatcagatcaatggcctcatccagttcatcttcctgataaagctctctgatcttcatcagcgacaacagatacatttcaggatcctccagcatatctgcgtaaacatggtctaccgcataaaagacctcgcttccaatcagttcaacgccgtgcagaaaatgactttcttcctgtccttcatttgcagcctcaatcaccagttcaattctttttacattcttcattttgcgtcctcctattttaaaaaaagacaaagtcggttccgccattccctttcagcggtagactttgtcgataatccggaaatatcgtaaacgatattttcctgcataataaaaaaagccacttcgtgattgaaatggctatgtaaaacggatcgttcttctatatgagaaggcggataccaggtattcagttatatgctaaggactttaatcagaagttcgtctaccgggtctgtgtatcttccctgcctgattaaatcgttttttagttctatgagactttggactactatttttttctcttctgcgttaagataaagataaagttttttcttgaacatattgccgacctcctttttcttatagtaaaacaacttgataagttatgctaatgtgcaattccaatcaagctattttattaaatgcctgcaacgcagtgataccaatggtattgatgtgttatttgggggataatttcagccagttgggggaagtcgcagtatcccccaaaaagaaatactacgcaaacttcacttgatttttcggaagaacgaggcgaagtttaaaacggcaattgggggatggatttcccccaagttttccccaaaaaatcccccaaatccatggtcaaaatacgccattttacgctattttacgaacaaatagtcaccttgcttttagacaataaaaaacccttgaagtgcctgataaatgggcattttccaagggttttaaagtcatattcgattaggaattactttcccatctgcttagcaacttcttctgcaaagttttcttctttcttttcgataccttcgcctacttcgaaacgtactaccttagcaattgaaaggtctttgcttacagattcaagatatttagcaactgtctgcttaccgtcttctgctcttacataagtctggtcaagcaggcagatttccttgagctgctttgaaacacgaccctcaacaagtccgaggaagatcttgtttgctgagatgttttctttgtcagcaacagcaaggtcagcaagcttagtctttgcttcctgtgaaaggaagtttggcagatagttgaaattaaagctcttgtcagctctcttttcttctaagattgcaacatcttctgcatcccatacaccgtcaacagccttgtctaataaagcgtttaagattggctttggaagtgtgaacggatcgtttaatgcgctttcaagtgtgatttccttgattttagcaagctcgtcagctgagatatcgtttctgcttacatactgcgggttcatagctgcaacctgcattgcgatgtttgttaaagcttcttttacagcatcgttagcttcgccgctgcctacaacgataacgccgattcttccgccgccgtgaatgtatgaagtaacaacatcacctgatgctttttcgattcttctgattgacatgttttcgccgatcttagcaatcttagcagttaaaacgtcctgtactgtagaatcttcgaagctcattgccttgaatgcttcgatatcattgctttctgctgttaatgcaagctttgcaaggttttctacgaattcaacgaattcttcgttctttgaaacgaagtctgtttctgagtttacttcaacgatagcagcagtcttgctgtcatctgagaatgcaattcttactaagccctctgcagcaattctgccggctttcttagcagcctttgcaagtcctttttcttttaaataatcaacagcagcctctatgttgccgtcaacttcgactaatgcttttttgcagtccatcatacctgcgcctgtcatttcacgcagttcttttaccatttgtgctgttacagccattgttgtttcctccctgaaaattattcttctgttgcttcttcagcagtctctgctactgcttcttctgcagcggcttcgtcttctgcagtcgcatcttcgccctggttagcttcgatgatagcgtcagccatcttacctgcgattaattttactgctctgattgcatcgtcgtttgcagggattatatagtcaacatcatcagggtcacagtttgtatcaacgataccaacaacaggaatacctaaaattcttgcttctttaactgcaatcttttcttttttagggtctacgatgaacattgcgccaggcatacccttcatttccttgataccgcctaagaatctttcaagtttttctgcttctgctcttaacttgataacttctttcttagcaagcttttcgaaagttccgtcctcttccatcttctgaatgtcatagagtctcttgattcttgctgaaattgtcttgtagtttgtaagcatgccgccgagccatctctggtttacgtagtacatgccgcatctcttagcttcgtcttcgatagctgcctgagcctgctttttagttcctacgaaaagaaccggcttgcctgtagctccaacttctttcataaagtcataagcttcatcgattttcttaactgtcttctgtaagtcgatgatgtagattccgtttctttctgtgaagatgtaaggtgccattttagggttccatcttcttgtctggtgtccaaagtgtacacctgcttctagtaattgtttcattgaaattactgccattttaatttcctcctggtttttccttccgtcataattgctcccagagcaaactccattttaacaacgctgtgcgctggagcacctgtcatccgggccatatgacgtgctattttaatcagtctgcaaatcacaacagaccaacatatactatactataaaaaattcccgaatgcaagcgaaaacttgtacattcggggttatatccgtttttaattttaatccgtcaccggtcttctctgaaatacggaagtcccagactttcaggcggctgatcctctcttctcttgcgcacgcttgtaaatatcagtaccacaatagttacaaggtaaggaagcatcttgtaaagctccttggctgccattcccacgcccggtatgaacaggtgcaggatatacagtccgccgaaaatgatggagccgaatatagcaatgtttggcttccacagcgtgaaaataaccagcgcgattgccagccagcctctgtcgccgaatgcgtcgtttgaccatacgccgcttgcgtagtccataacatagaacagtccgccaaggcctgcaatcatacagccgatgcatattgagcagtatttgtatctgttgacgttgataccggcagcatctgctgtggcagggttttcacccaccgcgcgaagctgaagtcccactcttgtctttttaaggacatatgctgtcacaattgctattgcaactgccagatatgtgaggaagccgtaggaaagaaatatcttgccaaaccaccccagactgcctgcaaacggcagatgagcgctgaagaatttgcttgttgccgaaagagcgattgacggaacctctccacctgtcagcttaatcagtgagcctccgaagaagttaccgaagcccacaccgaatgttgtcatcgcaagacctacaacgttctggtttgctctgagggttactgtcagcacgctgaataaaagccccatcagaagcgagcctaaaaggcaggatatcatcggtatgaatatggcaaggaaagggttaagttcgccgctgcatccctgctcatagaggaaagagccgattactccgcatatgccgcctacatacattacgcccggaatacccaggttaaggcttcccgctttttcggaaatcgtttcacctgtacagccgaacagaagcggcataccctgcattactgcacgaggtataaatgcaaccaaatcaaacatttacgcttcctcctttcctgaattttttcttatatgaactttgtaatttataaagaattcacagcctataatgaagaacaggattattcctgtgagtatgtccgaaaacgattcgttgagaccgaagctggttgaaatttctcccgctccctgtcctaagaatactatcagcaggcttgcaaatatcatagctgccacattaaactgcgcaagccatgaaaccattatgccgaggaagcctctgcctcccgcaagggttgttgtgatagtgtggtctatgcctgaaaccatcatccagcctgtaaatccgcatatagcccctgacagaagtatggttctcattataactttatccaccttgatgcctacatagcttgctgttctctggctttcgcccacaacggaaatctcatagccgtgcttactgtatttgagatatacatacattcccgcagttataattgcaacgaatatgataacaagcagatagctgtttgttcctattgacggcagccagcctgcgtttgttgactggtttataatgccgaccttgccggatcctttcggaacctcccacagaattatgaagtatgccacaagctgtattgccacatagttcatcatcagtgtgaaaagcgtttcgttggtattccatttagccttgaaaaatgccggtataactgcccatattgcaccgcatatgattgcagccgcaagacatatgattataaggagtccgcttggaattgaatctcccatataaatcatgcagagagcagtagcccatgctcccataagtatctgtccctcgcctccgaggttccagaatttcatcttgaatgccggtgtcagcgccagcgctactgaaagcagtaccgcaagctccttgagcagtagcagcatttttctctctgttcccactgcgccgtatatcatagttccgaatacgctgaacggatcaagtcccgtaagcagcatagtaacaattgcgcttacgattaacgccgcaactatggctcctattctgattgcccatgtcttagccagcggcagctccttgcgcttggttatatggagaagcggctctttattaagtttactcattgtcggcacctcctccaaactttgtcatcatcatacctatctcattcttgtctgcagttctgccgtcaactataccgctgaccctgcctccgcacagaaccataatacggtcactgagctccataagcacgtcaaggtcctcgccgacgtaaataactgcaacgccttttttcttctgctggttgagcaaatcatatattgtatatgaggaatttatatcaagccctcttacgatgtatgccgaaagcagcactgtcggcgccgatgcgatttctctgcctaccagcactttctggacgttaccgcctgaaagcttcctgacaggagttgaaaggctcgatgtgcttacttcaagctcatcaactactttttccgcaagctttctaggtgtttttctgtcggtaaacattgatttgcccttacggaaagacctgagcatcatattgtctgtaaggtccatattgcctacaagacccatgccaagtctgtcttccggaacaaacgaaagcgcaacgcccattgccgcaatctgaagcgggtctctgcctataagctcctcgtcctggccgtcatcgtttatgtatttaatagttccgttttccaccggctgaagtcccgctatggcttccagcagctctttctggccgcagcctgagatacctgcaataccgaggatttctccggagtttgccgtaaatgaaacgtcgtccaatttaataactccgtcctggcttcttactgtaaggttttcaactttgatacgtgttttaggattaacaggctccggcctgtcgatgttaaggctgacagctcgtccaaccatcatatttgtcatttcctgttcgtttgtttcggctgttatcatttcgcctacaaactcgcccttgcgaagtaccgccacgcggtctgatatgtcaagtacctcgtgaagcttatgtgtaattattactactgtcttgccgtcctccttcatatttctaagcactgcaaacagcctgtctgtttcctgtggtgtaagtaccgctgtaggctcgtcaagtatgagtatgtccgctcctctgtaaagcacttttactatttcgacagtctgcttctgtgatactgacatattgtatatcttctgctgcggatctatatcaaatccgtaagtatcacatatctcttttattttttcggaggctttctttaagtccagtttgccttcctctttaagtcccagaattatattctctgcagccgtaaatacgtcaaccagcttaaaatgctgatgtatcattcctatgccgtagtcaaaggcctcttttggcgaatgtatggccgcaggctctccgttgatgtaaatctcccctccgtcaggatagtatatgcccgacagcatattcataagggtggttttgccgcttccgttttcacccagcagtgacagtatctcgccccgataaatgtcaaggtttactttgttgtttgcttttactgtaccaaatacttttgtgatgtccctcagggacacagccacttctctgttggccaagttaatcaacacctttctttaattaatgtttcctaaagcgtatcatctgtttgtatttctgttttgtattccacagaaaaatccatacctgtaccggttatgtgcttttctctgcaatacgttcacttgtaccagcacgaaaaccccggctaaaaccggggcttttgctggtaaatgtattcttagaattttgtgtccagaagcttgattccgtcaatctgaagatcgaagtacggagctgatctgaattttgattcctggaatgcgccgttttcgattacttctgtatcttttacatagtcagcgtctgtgtctacgtcagccttgtatgagtctacttccttaccgtcaactgtgaatgttgtgatatcgaatacctgaagttctcctgcttcaagcttctttgtaatctctgcaattttgtctgcagttccttctgctgccacttcttcgttaacgtcagttaaaacaactgatcctgtttcaaggttgcctgtccagtcagcttcgatagcttcaccgccctgtgctgctttgattgcatatacatagtaaggtgtccagtcaattcttgatgaaacgatgaatgtgttagggcaagcatcctgtgtgcttccgttgtatgatacgttaggaactcctgccttttcgcaggctgtaggtgctcccattgagtccgcgtgctgtgaaacgagtacgcaaccgtcatttataagtttgttagcagcttctttttcgagtgcttcgtcataccatgaacctgtgaaagttacttccattgtaactgattcacaaactgaacgagcgccgaggaagaatgaagtgtagcctgatactacttctgcataagtatatgcgccgacgtatcccattttagcttcgtctgctgtgattgttcctgcatcgatcatttcgttgatcttcattcctgcagctacgcctgcaagatatctgccttcatagattgaagcgaacgcattgtggtaatttgcaaggttttctgtgtgcgcttttgttcctgttgagtggcagaactgtacttcagggaagtcctttgcagcctggatcatgaagtcttcatgaccgaatgagtcagcaaatacgattccgcagcctgcatctacaagttctgctgctgcatcgtagcattcctgtccttcagggatgtttgtcttgataactgcttctactccgagttcttcacatgcagcgtttgcagcatcaataaagttcttgtcataagttgagttctcgtcatgcagacatataaatccaactttgaagtcgccgccgtttgagctgtcgtcttttgaaccgcaacctgtgaaagcaaccattccgattaccattaccagtgaaagtaataaagcgatagtctttttcattttgttctccttctgccttttaggcaaatacgtaaaaaatagttaattaaatcttgcagaaaatctgctgattaacggaaggtgatttttccatccgacatatcgtcaatcagcgcaagggactctatacgcatgccttcgctgcgcagtctgtcgccgccgccctgaaagcccttttcgatagcaatcgcagcacctgccaccctggctcctgcctgttttgcaagatcggcaagaccctcaagagcattgccgtgagcaagaaagtcgtcaacgataagaactgtgtcctccggtgtaagatatgatttgcttactacaacatcatagtcaatgccgtgtgtaaatgaggcaaccttggtacagtatgtatcgctgctgatgttctttgttctgtttttctttgcgaacagaacaggaagtcccatctgagctgccgctgccatagctatcgctatgcctgaagcttcaattgttagaattttagtgacaccgcagtctgaataaagtcttttgatttcgctgcccatttccataaggaaaggtgcgtcaatctggtggttaaggaaattgtccactttgagtatgccgccgtccttaactgtgccttcttttagaattttttcttcgagcgctttcacgtgccacctccgttttgttttctgccggaataaataaaacaggtccaaagaacctgtttgccaatatacgcatcatcctgtcaaaaatgaaaggacagaagttaatgcaaccaatagtcgtgacttatcggcgtcacggtagaaacttttgggccttatatccaaaactatattggcaaatattcttttattgaaaccacttacagcatatcaaatgtttcgatgcttgtcaatcgaacatatcaaaaaccgcaacaaaatcaatgtttttatttcagtacattagtcagagcggttgttatattccctgctaactaaaaacagcggagagatttactcccccgcaaaaatcatcgcacggttaatttttatttaccgacaagtcagaaccgtcactcgttatcatttgcgataatattctttgacattgcctgtaaaaacacctgcaactggcacttacaggtgttttccgaccaaatgttaaaaccatatatcaagcaattttccacttaccctctccattctgatcgcagaaattcggcgctgatgtatattggcttaattcccctttaactgtttgacatcatatccgaatacaatgtcaaatatacttttaattttacagcttcatcgtaagtccgactctctgcttgtcatagtctatggatattatcttcaccttgacagtatcccccaccgaaacagcgtccataggatgcctgatgaacttatcgcttatctgcgatatgtgcacaagaccgtcatttttaacacctatatcaacaaacgcgccgaaatcgactacgtttctgacagtccccgtaagctccatgtcgaccttgaggtcctcaaagcttctgacatcatttctgaatattactgccggagcctcgtctcttgggtctctgcccggttttttgatttcatcaataatatccttgagtgtcggtgttcctatccctatatcctccgccagtttttctatgctcctgccaagtcctgcattgaggtttttgagtgcgtcaaagcctttagctctgcctgtcacagcagggtatgcggcgcatattctctcctctatgtccttggctccgccctttgatatttcttccttatctatgtgaagcttatccagcatagcctctgccgcctcgtatgactcagggtgtacagaggttgcatcaagaggattgtccccctttgaaattctgcaaaagcctgcgcactgggtaaacgccttaggtcccagctttgaaaccttgagaagctgttttctgtccgtaaaggctccgttttcctctctgtaggcaacaatgttctttgcaatacccatattgatgcctgcaatatatgaaagcagtgacggtgaggcagtattcaggtcaacaccaactctgtttacgcagtcctctacaacatttccgagagcagtttcaagcattccctgatttatatcgtgctgatactgtcccactcctatgtgcttaggcgatatttttacaagctctgcaagaggatcctgcagtcttctgcccagtgacatagcgcctcttgtggttacatcaaggtcaggatattcctctgccgcaagcttagatgccgaatataccgatgcgcctgcttcgtttacaatagtgtactggatatcataactgtttttcctgaggaactgtgcaaccacctcttcagtttctcttgaggcagtaccgtttcctattacaatcacatttattctgtatttttctatcagcttggcaagaacagcctctgtccccttcacatcgtttttaggctgtgtagggtatatagttgtatatgccagcagcttacctgtctgattgagtaccgcaaccttacagcctgttctgtagcccgggtctatggctataattcttgctccgtttacaggcggcaccataagcagtttttctgtgttcttcgcaaatacctttacagcctcctcctctgctctttctgtaagcatatttcttgcttctctttcaacagacggagctataaggcgcttgtaggcatctgctatggttgcttccagaagctctgtaaatatactgttttcgctggttacaaccatatcccttatcattttgaggaccttgtccacatcaagctccactttgaccttgagcttttcttccttttcgcctctgtttatggcaaggactctgtggtttggtattttggatacggcttcgctgtattcgtagtatgtttcatatactgatttttcttccgggtctgtcgcagtcgaggttataacggctgatgagaatgtatactctcttactgccgctgtgatttccggatcgtctgaaatcatttcagctatgatgtcacaggctcccgctatggccttgtcctctgactcaacgcctttttcctcattaacaaagtctgcggcaagctcctctacgctgcctgtttcctgctcctgcttccagaaaatcatggcaagaggctctaagcctttttctttggccttggaagctcttgttgcttttttctgtttgaaaggcttgtacaggtcctcaattctctgcaacacctctgcctttaaaatctcttccttaagttcatcggtaagcttgccctgctcgtctatgaggcggattacctcctccttgcgctcctcaagacctctgagatatgcaagtcttgtgtcaagctctcttagtatgtcatcggaaagtccgcctgttgcttccttacggtatcttgcaataaacggtattgtgttgccctcgtctataagttgtacggttttttcaacctgtgatgctttgagtttaaactctgccgccagcctctcaattatattcatactgttaatggtcctttcgtttttgctctctctattttacagagtaaccttgctgtaatcaaccatttatttttcataatgcttaatcagcgcctgcatgcccgctctgccaagtccctcatcagacagctgctggtaattctcaatcaccctgcccagcacatcaagctcaaggcctcccagctttaccgaatcgtatgccagcttcatatcctttatgaaaaagtccacaaaaaagcccggctccaaatcatctttgcatattctctcgccgtaggactcaagcagcgcattctgcccagcacctgccgctgcgcctttcataaacacctccgggtcaagtccctgttctctgacatatgcaagagcctcgcacacacccgacattatcgacgcctgcattatctggtttgcaagcttggcgtgctgccccgcgcctgacgggccgtaataggttatgttgctgcccattgccctgaatatatccatgcacgcctcgcagtcctcacgcttaccgccgacaagtattgataaggttcctgcctttgctcctctgtcaccgcctgtaacaggcgcatcaagcacatgaaatcccagaggtgaagctgtctccgaaattctcatatccagctgcgggcttgtggttgtcatatctataaggtaggcgcccttttcagctgagtctattatctttccctcaccgaagtacacagcttcaacatcagcaggatagcctactattgtaattacggcatcacagcctttcacgcattctctgatgttttcaaagaacttggcgccctctgcaataacatctttgaccttctctttatttctggcataaatgcgcacttcaaagcccgccttcatcagattgcgaaccattgatttacccataattcccacacctataaatcctattgttttcatatcttcctctcctcgctattgataaagagccgcataagtcaacacctatgcagcccgttcgtttcgtttaattgccctgtttaagcttttcatttataaagtaatcgagatccccgtccatcactgcatcaacattggcggtttcagctcctgtcctgtgatccttgaccatagtgtacggctggaaaacatatgagcgtatctgcgctccccacgttatcatggagaaatcgcccttaagctccttgaggtcttccttctgctgctcctctgccagctctatcagcttggatttgagaattttcatagctgtttctctgttttgtatctggcttctctcattctggcaggtaaccacaatgtttgtaggcagatgcgtaattctgatagccgagtcggtagtgtttacatgctgaccgcctgcaccgcttgatctgtaggtatcaactctgatgtcctcaggatcaatttcaatattgatgtcgtcatctatttcaggcattacctcaagtgaagcaaacgaagtctgtcttttgcctgcggcattgaaaggtgatattctgacaagcctgtgaacaccctgctcgtttttgagatagccataagcattctcaccctctgcaatcagcgttgcagatttgatgcctgcctctgtatcgtcctgcagatctatcagccttaccttgtatccctttttttcacaccatctggtatacatacgaagcagcattgatgcccagtccattgcgtcaactccgcctgtccctgcgtgaattgaaagtatcgcattgtttctgtcgtatttaccgttcagcagaagctcaagtctgaggctttcaatctcagcctcaagactgtcataatcagaaataaccgatgcggcaagctccgcatcatcttccgactccgccagctctatggtaagctcaatatcctctatgcccgataccaatctttgatatgacgcgagctttttctcgagagttttctgttctctcagcagcctctgggccgcgctctggtcgctccagaaatccggtttctccgctatgaagttaagttcgtcaagtctttctttgagccctgccgggtcaaagagagtcaccgacctctcccagtttttcggacagtttaggcagattctgttttatctgttctaattccagcattgtattttctccttactgttcttgtattttttatctgagccctatgcggcaagtgcctatattatagatatttacacatcggctcatttttataaataatatatcaaatattattttatgtcaatctctgcccaatttaatgattttatcaacgggaatatacagccttaatttttgtcagttttatgtgtctgtgctgcttctgcaatccggactttaccgtctcttttcataaaaattactgctattgcacacacaatcagttccgtaaccggaaacgcaagccatatccctgtaatctgcaggagacggttcagcagccacattaacggaaccagcaaaacaccctgcctgagaagctgaatgaccatacttgatccaatcctgtctgttgcctgctcataggtcgcaatcattgtagaaaacccgccaatcacaaagctcgtcgccataatacgcattgcagaagttccaaatgatcgcatttcttccgatgccgagaaaagggacaatatttcattcggaaagcataatacaagaaaagttccaaacagcatcataattactgcaatacccgttccggttttatatgtctgccgcagccgatctgctttttttgctctgtagttgaatcgcataatcggaagacagccctgtataagaccgtttacggtcataacgattaattgctgcaccttaaaatatgctccgaaaaaagccaccgccgtatcggaatagtttactaaaaatatatttgtaaagttcaccataaaagcacctagtgcattcattataaatgagggcagtccataggaaataagttttttgagcatttgcggctcaaaagaatatccttttatcattggtctgattttttgtttcgtaaaaaacagctgtaccagtgctatcagcattgacagtgtatatcctaaaactgttgcgagtgcagcaccgactattcccatttcgggaaaaggtccaatgccaaaaataagcagcggatcaaaaacaaagttaaaaactacacctgcaatctgaaaccacatgggcgcaagcatattccctgttgcctgcagcattttctgaattgcgatatgcaccatattaggtatctgcataaaggcgcatacactcatatatgatattccatattcaaatatctcgctgttctgagtaaatgcagtataataggttttcataatcaaaagcgccgctgtatttaccgctacccctaccagtacagaaagcagaagtccgaggcttgccgccgaatcggctttttcctgcctgttctgtcctaaatatcctgcaatcaggacatttacaccaacgccaatccagacagatagtgcgttcatcaaagtagtaataggaaatgaaagtgaaactgcagccaatgcctcttcattgatttttgcaacaaacatactgtctacaaggttatatgaatactgtaaaaacatagaaaacagcggcggcgcagacattgacaaaatcagtttgttaatcggcttatatgccattttattttctgtttgcgtttcttttgccatattaattctccaatcaagtatcttttaagaataaaaatcgccatacactcttaacgagtgtatggcgaaaaatgaagtcagtctttcagaaaaatccataccgattttggaatttcattataatattcaaaagcctgaaagtcaacgggtaataattctactgcgagctcggttttctccgatgcttctccgatgttactccgatgcctttactgctatgaatcagaaaactactgttcctgcttgttcatacagcagttcttgtattttttacccgatccgcaaggacaagggtcatttcttccgaccttttcttctgttcttctgtaggtctgaggcttcttgccctgatttctgtcaggtactgcagtctgctgcggcatatccggagctgcagccttagcaggcgctgagccgtcaaattcagccttgctttctttacctgcgccaatgacatttcttctttcggttcttgtctgctcggttacattgtagcagaatttaactgtctgctccttgatatctcctatcatcatctcaaacattgcaaagccctcctgcgcatatgcagcggcagggtcctgctgtccgagtcctctgaggccgatacctgtacgaagctgatccatagcgtcaatgtgatccatccactgattgtcaacaactcttatgagtatcattctttccagttcacgcatcttttcttcgccgatttcagcttctttttcctcatagagcttatcgaactgagccataacctgttctttaagttcttcctctgtaagagaatactgttcttcttcagtaaagtccacaggaacatatctgtcgcaaattctcttgaggcctctgttcatttcatcaagatcccagtcgccagggtgctttgacgctataactacaggatctataactccgcatacaagctcctctgtcatatttctgatatatcccttgaggttttctcccagcagtaccttgtgacgctcaccgtagatgatttcacgctgcttgttcataacgttgtcgtactggagtacgtattttcttatgccgaagttcttgccctcgacttttttctgcgcgttttcaatggatcttgtcagcatacccgactcgatagcctcgtcctctccaacgcccattctgtctactatagccttggctctttcgccgccgaacagtctcatcaggtcgtcttcaagtgagataaagaactgtgtgcagcccgggtctccctgacgtccggaacggcctcgcagctgattgtctatacgtcttgactcgtgacgctccgtacctatgatgcaaagtccgcccagctctcttaccttttcctgctctgccttacgcagatccttgaactcctcgtgaagctcatggaaaagctttcttgcctccagaagctcaggatcatctgttgtcacaaagcttgttgcaaaggcaatggtttcactgtcatagcccctctttgccatttctctcttggcttcaaactcagggtttccgccaaggataatatctgtacctctgccggccatattggttgctattgtaaccatatcatatcttccggcttctgctactatctcggcttccttgtcgtgctgctttgcgttcagtacgttgtgcttgatgcctctttttttgagaagctttgagataagctctgatttttcgatggatatagtacctacaagtacaggctggcctgtagcgtgaacctctgcaatcctatctactatagcatggatcttgcctgcctctgtagcgtatatggcatcgtccatatcgttacggataatcggcttgtttgtaggaattataactacgtccatattgtatatttctctgaattcctcttcctcagtcttagctgtaccggtcatacccgccagcttctgatacattctgaagtaattctgaattgttatagttgcaagagtcttggactctgaacggaccagcagtccttccttggcttcgatagcctgatgaagtccgttgctgtatcttcttccgaacatcagacggcctgtgaattcgtctactattacgatttcaccgtctttaacgatgtagtctatgtccctgtgcatcaggtttcttgctctcagcgccgcattgacatggtgatttatttccatattttcagggtctgagaagttgtcaagcttgaagtagttttcgcatttggcaacacctgtttcggtaagagcaacagtcttgtctttttcttctattgtaaagtctgtttcgtttaccagtgtcttggcaaatctgtcagccaccgcatacatatctgtggattttgagccctgtccggatatgatcagcggagttcttgcctcatctataagtatggagtcaacctcgtctatgatggcatagttaagaggtctctgcatcatttcctctttgtatataaccatgttgtcacgaagatagtcgaaaccgaattcgttgttggttccgtatgttatgtcggccatataggcatcttttctctgcttctgtgtgatgccgtgaataacgcagcctacgctcatgcccaggaatgtgtacagcttgcccatccactccatatcacgctttgcaaggtagtcgtttactgttacaacatgaacgcccttgccgtcaagcgcgtttaagtacgccgcaagtgtcgcaaccagagtcttaccttcaccggttttcatttctgcaattctgccctcatgcagtacaacgccgcctatgagctgaactctgaaatgcttcattccgaggcttctccatgcgccctctctgcataccgcaaaggcttcgggaagcaggtcgtctaaggtttcaccgtctgcaattctctgtctgaattcagcagtcttgcctctcagctcctcgtctgaaagcgcctgcatctgctcgtctaaggcctccaccttgtcaactatcttgcctatgcgcttaacttctttttcgttaagatctccgaagatcttctccataaatcccataatcgtctagtttcctttctttgtatatcagtcctctgttttttctaaaggttcaaccttcagatttatctccagagcctttctttcatctgccttggtaactctgaccttgaacagcttttcctcactcttgtattcaaaatagtcgcctgtttcagggagcttgtcaagctccagcacaacccagccgttgactgtaacagggtctatatagtcatcaacatcgaagaagtcaaagagcttctcaacattggcgctgcccttgactctgtagctgccgtcataaagcggcattatttcctgagaaataacggtgtcgtgctcgtcatatatctcaccgaccagctcctctaatatatcctcaagagtaactattccggcaagtccgccgtactcgtctattaccaccgccatatgcgtcttggtggtctgcatttttttgagaataaccggaagcttcatagtctccggaatgaataccaccggcgccacatactctctgatatctgcgcttgttccgtatatatagttgtggaaatccttctggttgagcacacctaatatattgtctatatcgtcatcatataccggaattcttgaaaatcccgtatctctgaaaagcttgagtatatcatccttgcaggtatcaacctcaatggctgcaacatctactcgcggagtaagtatatcccacgcctcaagtccgttaaactctatggcattctggataagctcgcttcgctcctcgtcaagaccgccctctgtttcggcctcttcaaccattgtaagcagttcctcctcggtaattccctgctccgcgtccattttgaacgcctttgcaacaagttttttccacgcgctgaacaggaagtttaaaggggtgaaaatcatcataacaaatctgatgctgccgccgaagcccattgaggtcttttcggggatttccttggcaagactcttaggtgttatctcgccgaaaatgaggataagaaccgtagtaacaactgtcgctatagtaggtcccagcgaaccgtaaagctcaacaaacagcagagtggctataaccgttataagtatatttacgatattgtttccgataagtattgttgacagcaggctgtcgtatttgtctgtaagctcaagtacgcgcttggcccgtttgtcgccgtttcccgcaaggtttttaatcctgatgcggtttaccgatgtaaacgctgtttctgttgccgaaaaatacgccgaaaacataataagaattattatcgctatgccataggctattatatgactttccattattttagattgatacctcctcgtacaaatcattgtacactctaattgtgttaattatatgtagtttaagaaaaactgccatttacctactatgaagtatacagcaaaacccccaaaaagaaaagggcaggagcgcaacttaaacaaaagttgcagcctctcccgccgttttaatactatctccttattactcttagcctattttatcggcacatagcctgcagcctccaccgcctgctgtcctttggcgctcagcacccagtctataaagtcgtctgccgcttctgactcatcctttgcaataacaaatgagaagtttcttaccagcttgtagttttcatcgcccacattctgagcgttgattttaacatcatccaccgctatatcctttacggtcttatccagcgctgtcatagaaatatatcctatgccgcttttatctcccgcaacagcttttttgacctcttccgaggagttatatacggtcgctctgtttgtaagctttttttctttagtggtgtcaaatatggagttaagtcccagcaggttcagaaattcatttcttgttccggaggactcctctctgctgtagacattgattctggtgttttcaccgcccacatcgctccagtttacaatctggccggaaaaaatcttttttgcctgcgaaaccgtaaggttctctatattgcagtttttgtttgcaataacggcaatgccgtccatggcaaagacctcaacgtcatcaacaagtgatttctcttcatctgtaacggctctggacacaagtcctatatccgccttgccggagcgtacggcgtcaatggcgcttcccgaatcctcatctgtaatcttaaattccaaatccggatacttgtccttgtattcctctgtgaagtcattgccaagcgctttgacaagtcctgccgcagatgacgagcctgtgattacaatgctgtcagtacctgccgcgcctgtatctcctttgttttcatcgttgtccccgcaagcagtcattactgaaacgaccgccagaataagacaaaaggcaaaagccctttttaatatgtttctcatacatatctcctttcgctttttgcctttattattaccctatcacaggaaaattatacaaagctacgtgctgtttgtatatgtattcctgtttgattttaatcccgttttatcgtgtattctatattcacataaggctctctgtccttgtcctgaagtgatatgattattctctcgctgtcaggcatatatcttgccggaataataatatcgccgtattttgccggatgcttgtaggcaatcctgcatcttgatgctttgaaattctccggcagataatcctccgccacatcgagatatctggcattgttcatatgcctgttgacatctatgtgatatctgtgaaccggtatttcatcaaatatttcaggctcaaggtctttcggcagtgatatttttctcggaagatactccattccctcgtatttctggcccagaggatatatggccagcagatctttcggtattgcttcgggtttgcctgtttgcctgtttactgtggctccgccgccgtagcaggctataaggggctgtccgtcctcgtcatacattatggtgtttcgcataccgtatgtactcttcatctggaacacctctgttccaattgtaactttctgtccgtatccgacatctctgataaagtcaagctgtctgaaaagaagaaacgtcaccgcattgcatcttctgtaaaattcctgtgttaccggacagcagtcaagctgaaagccgcagcagtcctgaaacaaatcgacaaccgcgcttattttaatatttccgtctgcgcctatatggctgtttcctacggttctttctattgtgtacatacaaaacccccaaaatatattcctctttccttatattatatacctattgtcaaacacaaggcgaaatgcagtttaccctgccttaaaggcagggtaatatatgctttaattctatctgcaacatctcactccaacaggcaaagcctgttgctgtccgttttatcagcaaaccgctatcgctctttggataaaaaggcaacgcacttcgtaaatggggttaggtcttttcgccgtagctttcgaccaatcgcgctatgcgctcttggaaaagcctgacgtttgacctaccaacagttcacttcgttcactgggttaggtcataaaaaaagaagctctcctaagaaagcttctatatgtatctctaccttattttgtgtaatcgtagaaaccaacgcctgtttttctgccaagcttgttagctcttaccatctttctgagcagtggatgagctctgtatttaggatcaccgtattcagtgtaaagtacgtccataatagcaaggcaaacatcaagaccaactaagtcacctaattcaagaggtcccattgggtgatttgcaccaagcttcatagcagcgtcaataccctcagcatcagcaacgccgtctgctaaaattccgataccttcgttaatcattggaataagaattctgtttacaacaaatcccggagcttcttctacttctacaggagtcttctttaatgctgctgtaagctctaagattgtactcttagtttcttctgaagtagcaagtcctttaatgatttcaactaatttcatagcaggaacagggttgaagaaatgcatacctataattttgtcaggtctgtttgtagctgctgcgatttctgtgattgataatgatgaagtattagtagcaatgatagcctctggctttacaagttcatcaagttccttgaacagtgcttttttagcttccatgttctctgtagctgcctcgatgataaggtctgcatccttaacgatttcgatgtcagttgagccgtgtactctgctgagtatttcgtttttctgatcctcagtaatcttttcttttttaaccattttgtcaaggttcttagttactgtagcaataccattgtctactgaagtctgtcttcttgctcttaaaactacctcgtaaccgttctgtgctaatacctggataattccagcgcccattgtgcctgtacctaatacgccgatttttttcatattgtactcctcctaaatccgattggtttatataaagaatgttaaaaattaaacattgttaaaaatttaactctaaaagaattatacctatcctgcagcaaaaagtaaagagatatttttaccaacgcaaacttgcagcgcccttaaacaaaatgtaaaagtctgcgaagaaaagacgcatctgctgtacagacagttatatatacatctgatttattgaaatcaacctgtacaaggtagtataccttattaaaaatatttaaaacaaaggagatgtttaacaatgaaaactaatacaaaaaatatgaaactggtatgccttgctctggcaatgctgatgatattaggcgcatatgcggcagcaagaggtactgtgggtatggtaggcaaaagcagcccgtcagtgcagcctatgagtgttgtgtcttgttcaatcggcaccgacagaccggcaagcaacaaagcagaggtttccggctatgcagtattaacagacgaggcaacctatgctactatgcgtacttttctccagtacaaatcaggctccagctggcacaatgtaacatcctgttctcctaaggcatttacaaatactgattataatacctatactgttgcctccggcggtacttttaagaacgtttccgctagcaaaatatatagaggtgctgtaaccattactcataaaatagacggcatcacatatacaaacaattatcgttcatcaagcttctaattaagaagcttctttcattttatcaataaaagaaaatgtttctctttccgttattgcaccgattatattaatagtactgttattagtaaatattgtagcaaccatctttttatcctcttgctttatatttattctatatccattgtaatttatatactcgtctacattctccattaatcttgtctgttcctttttttctgtataatactcctgcaatactaaaatattattatcattttttgaaaaacaatatgatatatttatcatattacagctttcttcattcaccttcacactcacaaattccatacccttgggtacatctgtaaatgtcatcatctcaggatacttttctttcagcttgtctatcttatcccactcggttgtcattgctgtttcaggcattacctcctgaccatcggcattttcatcactgattacaacacttccatcctgctcctctaccttggtcctgtcatttttatctgcttcaacaggcccaaaacagcctcccacagct

SEQ ID NO: 3185 - DNA, 5864 bp, Unknown
  16S sequences of unknown bacteria
cgttgatacgggagatgatctgtgcagcgtcttttccaagaccgttcaggataacgcgcagcggcttggtacgaaccttgtttgccttctctgcgataccgattgcaccctcagctgctgcgaaggactcatgacctgcaagaaatgcgaagcactcagtctcctcctcgagcagcatcttgccgaggttaccatggccaagacctaccttacgggtgtctgcaacggaacccgggatacagaatgcctgaagtccctcaccgatcgctgctgctgcgtcagaagcctttctgcagcccttcttgattgcaattgctgcacctgtaatgtatgcccagcatgcattctcaaagcagatcggctgaatgcctttgatctgattgtatacatcaagaccagcatcctttgtaatcttctctgcctcttcaagagaagcgataccatagctgttcagaacagcattgatctggtcaatacgtctttcatatgattcaaataaagccattttatgttacctcctcaattattcttttctcgggtcaataatcttaacagcatctgccacacggccatactgtccttttgccttttcccatgcagtgttcggatcatcacccttcttgatgaagtcagtcatctttccgagagatacgaactgataaccaatgatctgatcgtctgcatccagagcgattccggtaacatatccttctgccatctcaaggtaacgcggtcccttcttgagtgtaccgtacatcgtacctacctgagagcgaagtccctttccaaggtcctcaagtcctgcgccgactgcaagtccgtcttcggagaatgcagactggcttctgccgtaaacgatctgcaggaagagctctctcatagcagtgttgattgcatcacatacgaggtcggtattcagtgcctccagaacggtcagacccggcaggatctcagatgccatagctgcggaatgagtcattccggaacatccgatcgtctctaccagagcctcctggatgataccttcctttacattcagggaaagcttacatgcaccctgctgcggtgcacaccagcctacgccgtgtgtaaatccggaaatgtccttgatttcctttgcctgaacccattttgcttcttccgggatcggagctgcgccatggtgaacgccctgtgcaactgggcacatttcttctacttcgcgtgaataaatcattttaaaactcctttcagctgtaaatttgtttaccctgtattttctcataaatcgacagattcgtccagagctttttccaaaaatctgcaaaggttcggcaagtatctcatccggatccctctgtcaatttacagacgtatgtcattccggtacttctgataccgggctgcaaaagctcggatatccacgcgctgctgacacgcagatatcctgttctttactaattaatcgttgtatccattcggattcatggactgccatctccacgaatctgcgcacatctcgtcgatgccgtactctgctacccagccaagctcccgctttgccttctccggtgcacagtagcaggtcgcaatatcacctgcacggcgcggcttgatctcatacggaagtgtcttaccacatgccttttcaaatgcatgcagtacctgcagcacgctgtatccgtgaccggtaccaagattgtaaatgcggacctccggcgcagcttcaagcttctggactgcctttacatggcctcttgccaaatctactacatggatgtaatcgcgcacaccggtaccgtccggcgtatcataatcgtcgccgaacacgccaagcttctgaagcttgcccacagctacctgagcgatgtacggaagcagattgttcggaatgcccttcggatcctcgccgatgagtccggacttgtgcgcaccaatcggattgaaataacgaagcaatacgacattccactccgggtcagatacgtgcagatcggtcaggatctgctccagcattccctttgtctgtccgtacggattcgtaatcttgcccttcgggcattcttctgtgatcggtacaaaagccggatctccgtatacagttgcggaggagctgaaaatcagcttctttacaccatgatgccgcatgacatcacagagatttaatgtaccggtaatattgttgtgataatactccagtggcttctgcacggactctccgactgccttatatcccgcaaaatgaatgaccgaatcaatggactccttctcaaaaattgcgttcatcgcgtccttatccagcatatctacattataaaatgtcagcttcttgcccgtgatctgctctacacgctccaatgccttctcactggcattatagagattgtccattactactacttcatagccgctgttcagcagctctacgcatgtatggctgccgatatatccggcgccgccggttactaaaattgccatgccaagccctcctgtgtctatgcacttgtgcatacttaatgtctgtgcggaaactgtttccacaccacgtccattatacgaagaaagaacaggtttgtaaaggaaagagtacgaattttttctgatccggtcgaaaacgggtcgctcagacaggaaagttccgtgcactcgatttcaaattgtgttatgatgatagtcataaatacttaatacgcttacgtcatcatcatagaaggaacatgatattatgaaagcaaaaaaacaattttctgtgcttgccctgaccgcatctgtcctgctcaccggatgctccctcactcctgacacaaacgctactgtctcaaagaccggctttttccttgacacggtcgtctccctgaccctttacggcacaaaagaagaagcaccccttaatgagtgctttttacttctggaaacatatgaatccctgctcagccgtacaaaggaaggcagcgatgtctggaagattaatcacagcaatggttctcctgtcgtcgtctcggatgagactgctcagctgattcagaccgcattagactacagtgtgcgctcggatggcgcttttgatattacgatcgctcctttgcttgatctgtgggatttcaagccggaacagcatgagggaactgtgccggatgcagaccagattcaggaagctctttcccatgttgactataaaaatgtacagctggacggcacgacagtaaccctgctcgatccgcaggcatccattgatctcggcggcatagcaaagggctatatcgcagaccgtctccgcgattatctcgtttccaaaagctgcggcagcgccctaatcaacctcggcggcaatattctcacagtaggtgagaagccagacggctccgcgttccgcgtcggtatccgcaagccattctccgaatccgacaagcagctcgagactgtcgcctgcaaagaccgctctgtcgtcacctccggtacctacgagcgctattttgagcaggacggaaaacgctatcaccacattttgaaccccgctgacggctatccggttgaaaacggactggccagcgtcacgatactctcccctgcttccaccgatgccgacgccctgagcacggcctgcttcgtgctcggagcggaaaaaggactggggctgatcgaaacgcttgatggaattgaggctctgtttgtgaccgatgaactagaagagattgcatcgtcgggatttacagcgtacaccatttcatgatgataatacactcacacactcagctttttttcggccatccatccggagagtatcaacagcattaccgcgagcaccgcaagcacgccgagctgtgcccaaaaatgagcaaaatcagaagcagtaaccggaatcatccggtctgccagatcaaccaattttaccatcccccagttgagcacaaaaaacagcacaatcgcaagcggtgtcgcaagcttactctgaacgaatacggtgcgcacagcaatgatcgcggtaaaccctgccgcgatcatcccgatccagctgatgattagctgtcctatgccgagcagcgtccagtcccaggtgatatcgatctccacccactcattcagcaaacgttttaaaatctcaaaaaactgtccgaagctgctgtttgctgccagataggcagagaagcaaagaaaaaaagctccgacaaaaagtgccgccgtcaaaagaatctggcagactgcagccaaaatttttgccccgagaatcgtataggccggatacggaatcataaacagcatgtgactttcttttgtccgcagatcccgattgagcacgagcaggcattccacaccgatatacatcgaagtaaacgctcctgccaccaccagaagaaccagcgatgtcgcctgccactcctctctttccagcatcgtgccgagcatgaatatcagcgtgagcacgagcagaatacctccgatcacatatttcgaaaacatctgttttttccattcatatttaaagatctttcccattttttctcttcctttcgtaaagcggacatttgcaatctatccccgcagctctgcccgttgcttgcccactgcctagagcgtgttatatggtacagttgtttgcagtatgatgtactagtgctcagccgtaaattctacgatacaggtctacgatcgaaagcccatacctctgccgcagctcctctacactgccctgcgcctcgatctgtccgtcccgcacaaagatggctccgtcaatcatcggctcaatctcatcgaccagatgtgtagacatcacaatcgtgtgcctcggactgcaagcctctctgatcgtctgcatgacgtgatcccgggcgaccagatcaataccatttaatggctcgtcgagcagatagagctttgcgtctctcgccagagtcgcagccagcttcagcttcgccgccataccggaagaaagcgtccgcgccttgtccttcggatccagctccatccgcatgagcagcttctcaaagcgctccggactgaagtccgcgaaaaagtccgaatagtatttccctacatcacggatcttcatatacgaatagaaaaagggctctgtagacatataggtaatctcagccttgtctttatacgtcagtgcgtgtccgtcaaataaaatactcccttcccagcccttcaccagtcctgccaccatcttcatccaggtcgttttgccgcttccgttcggtccgagcagtccgtatatcttcccctgctccagattcagcgttatatcccgtaccgccagcttccgtccatagctctttttcagcccactgcattccagcaacataatccttctcctttattgtctaaatctgcttttcatattacactattttccagcaatccacaacgaaagaatctcttaacattttccattccctgtcttttttacgctggaaatccctttgctttttcgctatactggatgagaattacgaatattgcctgactgatagtaaaagcagaggaaaggaacaaaacaatccactatgattcgagaaacagccatccttccggactttccggattatcacggtttctggggcttcgatccgggaaaaagcctcttttttgacattgagacaagcgggctttccgccgcctcttcccatgtgtttctgatcgggacgatctgccgcacggaacacggctggcagctcacccagtaccttgccgagcgtacctctgaggagccggagctgctcgctgcatttttagccgatgccgctccattttcgacgctgatccatttcaatggcacgacctttgatcttccttatataaatgcgagagccagggcctgccatcttccgattctttacgatgatgcctcggattgcatattttcgattgatctctatcaaaaa

SEQ ID NO: 3186 - DNA, 14519 bp, Unknown
  16S sequences of unknown bacteria
acttgacaggttttggctgactgtgaatagtaaccaagcgttttcttttcatgaaagaaaatgaaaaaaacagtatggtttttgtggcctttatgatagaatagataagaggtgaatgagatatgatcaactggtttgaagaagctgaaaaatatagagaggcgctcatccgcgacctgaaggggctcatcgcgatcccttccctgcgctgtgatgaagagcggcgcgaaggtgcgccctttggtgagggaccgcgtcaggcgctcgattatatgctggagctgggcagcgcgtccggctttgatacgaaggacgcagagggctatgccggcgtcatctccatgggcgaaggcgagcagagcgtaggcgtgctcggacacttggatatcgttccggtcggcgaaggctggacgaaggatccctttgcctgcacggaggaagacggctatctgttcggccgcggcgtgctggatgacaagggcccggcgctggctggcttttatgcgatgaagatgctgaaggacaaccatgtcccgctgaacaagaagatcatgctcatcctgggctgcgatgaagaaagcggcatggagtgcatggattactataaggaacatggggagatcccgcagtgcgggatcgtgccggatgcggacttcccggtgacctatggcgaaaagggcggactgcatgtgctgctgaaaggaaaggcggatacgaagatcgtctccatgcatgccggcacgcgcccgaatatcgtcatcggcaaggcggagatggagatggccgagtggaacgaaacgctggcggcgcagtttgatttctatctgcgcagcaatcagctgcagggaagcgctgagcgcaagggcgatcatgtgatcctgcatatcgacggcgtgttctctcatgcggccgaaccgtataacggcgtgaatgccgcgctgcacctgctgaactttgccggctgcgcatatgatgacaaattcgcacgtgatacatatgagatgctgcatgactggcagggaaaaccgctgggcatcgaccaatacggcgcgtatatgggctttttgacgatgaacaccggcatcatctcgctggacgaagatgggtcctgcgagatcaccatcgatatccgctatccgaacgacgccgatgtcaacgccatcatggagggcttccatcgcgcatgcaagacgcgcgggtacgatctggaagcggtgatggaaagcgattctgtcccgctgttcgtggatccggactctcatctggtgaagacgctgatggatgtttaccgccgttattccggcgatgagcaatcaccggccaagacgatcggcggagggacatatgcccgcaagttcgagcagttcgtggctttcggaccggaattcccgcacagcgaaaagacgacggatgcctttgtaggcggaccgcatcagcgtgatgaaggcatcaagatcgacgacctgctgcgcgccatggcgatctacgccgcggcgctggaaacgctggctgcctagaggtgcgccgatgcgaatgagaagactgccgtgggcagaagaatatctggataaggccgaggtcgtcgtcaaggatcccgccgcgatgaaggggagatggcgcgagatcgttcaaggagaacgcgtgcacctggagatcggctgcggaaagggcgactattggaacctgatggcgcagaaacagccccaggacggctggatcgccgtcgagaagaacgtcagcgtcgccggtattgccgtgcggaagtttgacacgatgaacaacgatctgaaccggatgcggttcatctggggagacgccgaaaagctggatgagtggtttgccgaggatgagatcgacatcatccacctcaacttttccgatccctggccgaaaaaacgggcgcataagaagcggctgagctcacagagcttcatcgcccgctatgagaagatcctgaaaaaggatggctgcatccagatgaagacagacaactcctcgctgtttgagtattctgtgctgcagtttcaggagggcggatggaagctgagcgagttcagtgtcgattaccgcagagaggaacatgaggaagatgtcatcaccgagtatgaacagcgcttcctcacgctgggacagccgatctaccgcgctgtctggatcaaaaatggaggagacgaggatgaaggatctgatgaatgagctgaaggatgctgcgcagctggaagagattcgcagcagcaaggagatcagcgtggcgctgttcagcgcagcgtggtgcccggactgccggttcatcgaaccgttcatgccagagctgatccgcaaatacgcacactatcgcttttggtatatcgaccgcgatcagtggatgccgctttgtgccgagctcggcgtgatgggcatccccagcttcatcgcgtttcaggacggccatgagctgggacgcttcgtttcgaagaaccggaagacacagacgcagatcgacgattttctttcatcactgcaagaaggataaggaggaatagccatgctggaggggctgaaaagactcatctttaataccgatatcgacgatgtcagcgaagaaggggaactggaggagatccagctgccgaagaaggaaccggagcctgaagcgccgaaaccgccaaagcctgaaccccagcctcagccgcagccggagaaagcggcagaagaggagaaacaggcagagcaggaacagccgttcaccggcatcgttgccgatgatgagaaagagaaggccttgcgcgctgagcgcaaggcaaggaacgaacagcgcatgcagcggcagaaggagctgtatgcggacgccaacgcggagtttgaattcaaaccgatcctctcaccgatctacggaaataccgcagatgatgagcgcaagccgcaggatgtccatgacgctgtccatctgcccaaggcgaagacgcgcagcacgctgaacacggtgctctcaccgatgtacggcgccgcgcagccgcagaaaaagagccgggaagccgaggcacagccgcgccatgcccagcgcagccagatcagggaggagccgcaggaggaagtgctctccctggacgagatgctgatgaagggcagacgcgatgagcgcgaagagaccgtgcagatctcattgtttggcgaaagcacgccggtgcgggcagaaaaggaggacctggaaaaggtctatctgacggatgaagaagaataggaagtgacgcgcatgcattatcatttcatcgggatcaagggatctggtatggcctcgcttgcggagatcgtggcagaccgcggagatgaagtcagcggttccgatatcgaaaaatatatctttacgcaaaagccgctggaggaacgcgggatccccatctatcccttcagcgcagacaacattcatgaaggcgacacggtcatcatcggcctcgccttcgatgagagcaacccggaggtatacaaggccctgcacacgccgggcgtgaagcattactggtataatgagttcctcggggagctgctcacccattatcgttcgatctccgtggcaggcacgcatgggaagaccacgacgaccggcatgctcgcccatgtgctcgaacacatggcgccgaccggctttctgatcggtgacggccatggcgagatgccggctggcgcgcagaatttcgtgctggaatcatgcgagtatcagcgccatttcctcgcttatcgcccggattatgccatcatcaccaacatcgagcttgaccatgtggattattaccagggcatcgaggattattgttcggccttcagcgcgtttgcgcgtcaggtcaagaagggcatcgtctatttcggcgacgatccatatctgccttcgctggactatcccgttcctgcactgtcttatggcctgggcgaacaaaacgatgtgcgggccgtcaatgtggagcagggagagcatggcatgcgcttcgacatcctgtacaagggaaagccgtttggccattttgagcttcccttcgtcggcatgccgatgctgtgggacagcatcggtgtcatcgcgctgggcatcatgctcggcgctgacgccgcgctgcttcagcagggcatcgccagcttcccgggcgtaaaacgcaggtttatcctggaggaaaacggtgataatgtgtatatcgccgattatgcgcatcatcctaccgctgtccgttatctgatcgaggcagcgcggatccgctgtccgcaccgccggatcatcgccatcttcaagcctgaccgctattcgcggatcgcgtatttcctcgacgatttcgcgcatgcgctgaatgaggcggacgaggtgttcctgtgtgattttccagcgaacgccaaaaaggaagacggcgtggatgtgtgcatccaggatctggcagcgcgctgcaagaacgctgtcgtcatcgctgaggatgatgaggctgcccgcaccctcgctgagcgcggaccggcagtctatgtgttcatgagcagcaaggatatctataagctgaagaatcgcctgaaaaattttcaataaacattgtatccgctttcaaggtatgctagaatgagataggaattgaggtgttagtatgacattggacagttttgtggcattgctgagcgacacggcatggaagctcgttcctgttgctgtggtcatcctgctgatctatctgatcgtgttcgtccatcgtctgctcggtgtgctgaagaacgtgaatggcacgctgaagaccgtggatgaagatctgcagaagctggagaggccgctgcagaccgtcaatgagctgagcgaaacggtggatctcgtgcatgaggccagccgcaatgcagtgcgttctgcgctggtgacgatcatcgaaaatgcctcatccatcaaggactggatctttgccaagaagaacgagggaccgaatgaggatgcagcggtccaggaggccggacatgaacaggcgtgattcccatatgccgccggcagacgctgtacgcgagcgcatccatcctgaacagcaaggcggcaggatacgggagatcttggaagagaccgtggaaggctgcgagcgagtcgcaggcgccgtacggaacaaggcagagcagatcggcgagcacgagcaggtgcgcaggacgctggagagcgggaaggtcttcctgaatgaaagcggcaagctgatctcacagggcctgcagagcggaacagagaaaatgatggaaaacgagaagatcgcttccgtcgtgaacaaggccggtgagaagctcgactcgatcagggaagatgaaagagtgcaggaaggcatggataagctcagggatacggctgggaagaccgctgagcgcatccagcgcttcttcaataaaaaaaggtgaaagaagggagcaaaagtatgaagcgtatcacgatttatgatgtcgctaaagaagcggatgtttcgctggcgaccgtttccagagtcattaacggatcagaagtggtgagagaagatacccgcatcaaggtgcaggaagccatcgaaaagctcgggtataagcccaatgcgatcgcacagggactggccctgcagaagacgacgacgattgcgatcgtcatgccggcagccagcttcttctacaccgggcagatcatcaacggtctgctggacacggcaaagatctacaaatacaatatcatgctccactccacatctgccggcatcagcgagatgaccgatgtcatcgagaacatcatcaaatcgcatgcggatggagtggtgatcttcaacgacaagctcaacagcgaggagctcaacacgctcaatcattacaatgtgccgatcgttgtcatcggaaataagatgtccggagaggccatcggttcggtctacatcgattacgcgacgctcgcttatgagtttgcgtgcgactatatcaaggcgggaaagaccgatatctccctggtggaggacagacagaacccatccatgatcaatcagatccgcagcggcctggagcgcgccttcagcgaaaacggcatggagttcaccaagttcgtgcgcattccgaaggaataccgctcatcttatctgttcctgaccgattactataagacgcataagccggcgcaggtgatcctgacttaccgtgactcacaggcgatcgccgtgctcaacgcgtcaaaggaagcaggattcagcgtgccggatgacaccgagctcgtctgtgtgctggacagcaaatacaatgccatgcagcgtccgcagatctcagcgttcaagatcccggactatgatatgggcgcaatgtcgatgcgcctgctgaccaagatgcttcacgatgaggatgaggtcctcaacaaggagcttgagctcagctatgtctatatcccgcgtcagaccacgcgcagctaagcggcagcagccgcttttttgcttgttttggccggatgaaaaaatattgaagagcgaaatggtttatgctatactgttaaagaatttacgaggtgaaaaaaatgggaagacattttgaagtgcgtgctgcagccatgcagaagaccgccaatcagaaggcgaagatctattcacgctacagcaaggagatcctggtggcagccaagaacggtgaaccagatccggacatgaaccagacgctgaagaaggtcatcgagcgcgctaaggccaacaacgtgccggctgacgtcatcaagcgcgcgatcgaaaaagcgaagagcaatgatacagagagctattcctctgcacgctatgaaggatttggctctggcggaggatccacggtcatcatcgactgtctgaccgacaatcccaaccgtaccatcgctaacctgcgtgcatgcttcaacaaatcgcatgccaagctgggcgtaggcggatcggtatccttcaattatgagcaccttggcctgatcgtcatcgactatgatgatgaagaggcgatgatggatgcgctgatcatggcagaggtcgacctgaaggacatcgaggtcgaagacggcgtcatgacgatcactgtcgaaccttctgatctgtccaagacaaaggaagctgtcgaacagctgatcccggatgtggaattcaaggtcatggaagacacgatgctgcccaatgattatgtcgaactggaaggagaagatctggagctgttcaagcgcctggtcacgctgctcgatgacgtcgacgatgtgcagaacgtctaccacaatgtcaagaatatcaacgcatagcgatggctcccgaaaggggccttttttttcgcttttcgcgcaaggcgtaatgtggtaagataaaagaaggtgatcatatgaagaaaataatcattaccgcagcggccgtcctcatcgcggctggctgcgtcgtggcgctgtggatgagcatgcggccgaccgtgaccttcttggtcaacggggaagaagcggacctgcactgcagcatcgatgtggaatacgaaaacggcatgcgcatgcaggatctcgctgaacagatcagcgtccgcgcagaatgggacggggaagatgtcagtgaggatctcgaggcagagcagccggacgaagagatggtcgatctgggaacctatacgttcacgtatcatctgcaggcggcagagaccacgctgcaggtggatgtgcatgtcgtggatacccaggcgccctggatgcaggcagaccccgtataccatacgcgcacaggcgagccgtttgaccagagtcagctgaacgtgcaggtctatgacaattatgatgtcagcgtgcttgactcgctgacgatggatccggtggacaccgcagctgccggcacgaagcagagcacggtgcggatcaaggacagttccggcaatgagacgacctgtgagatcacggtggaagtcagcgacgatgcagaaccggcttccacaggaacgcagttcttccttcaacagaggccggatgacattacgctgatcctcaatgcgcagcatcgtctgccgcagggatgggagccggacgatctgacggcgatcgatgactccgcagacagcggacatgtgcttagagaggaagcggcagcggcctggaacgaattgttttctgcagcacaggaggacggcatcgcgatcaatgtagtgagctcgtttcggaccgaagaatatcagcgtacgctgtttgaaggatatctggctgtagatccagatgctgcctcatacagcgcttatccgcgaacgagcgagcatgagctgggactgaccgtagacattagctatgatgctcagctgcatgacgacctgcagaactcttcgctgggcgaatggctggcggaaaacggctggcgttatggctggatcgtgcgctatccgcaaggcaaggaagagctgaccggatacatctatgaaccatggcattaccgctatgtcggcactgcgctggccgctgagctgcatgaacaggatctttgcctggaagaatactatgcgcaaagacgcagcgcggccgtggaaaaagattgacaaaccgcggctatgcggataaactatacatgtatccgatgaagaagcaagactgatcgctgggagcgcagagagaagcgggttgctgagacgctttgtcccatggtcagggtgacactttggaggaatcatcaggaaatggatgatcgtgtttttcgcgttatgaaaaaagagggcatgcatattgcatgaactaaggtggcaccgcgttacagacgtccttagacagggcgtttttttatggtcaaaaggaggattctatgagctatcaagtaccgagagggacccaggatatcctgcccaaggatatctcgaaatggcatcggctggaagatctgatccggcagttctgccacgtttacgactatgaggagatccgcacgccgatctttgagcataccaatgtcttcaagcgcggaaatgattccagcgacatggtcaacaaggagatgtatacattctgcctggaaaacagctccacatcgctgaccctgcgcccggaaggaacggctggcgtcgtgcgcgccttcgtggagcacaagatgtatggacagccggatcttccgatcaaaatgtattatgtcggtccgcagtgccgtcatgagcgcccgcagaagggcaggatgcgcatcttcaaccagttcggcgtggaagtgatcggcgccaaggatccgctgctcgatgtcgagacgatcgcgctgggatggtcgttcgtgtccgcgttggggctgagcgatctcaaggtgctcatcaacacgctgggcgacgatgcctcaagagcggcttaccgccaggcgctgaaggcgcatttccaggaggagatccacacgatgtgcccggactgccagcgcagatatgagcagaacccgctgcgcatcctcgattgcaagatcgaccgggaaaaggagatcatgaagagcgcgccgaagatggaacagtatctgaatgaggaatctaaggcgtatttcgaagaagtgctgaaggggctcgatgcgctgggcatcccttatgagatcgatgaccgcctcgtccgcgggctcgattattacacgcacaccgtctttgaggtcgtctcggtcaacgaggagatgggcgcacagtctaccgtgttcgccggcggacgctatgacgggctggtcgagtatttcggcggtccgcagggcatgagcggcatcggctgggcgatgggcctggagcgattgatcctcgcttgtgaagctgagggcatcgagctgggagaggaaaatccgctggatgcctatatcctctgtctcgatccttccgccaagctgaaggcactgcagatcacgaccgagctgcgcagcaatggctatcgctgtgagatggattatctgggccgttcgttcaaggcgcagttcaagaccgtggaccgccgcggcgcccgcatcgccatcatgatcggagatcgggagatcaatgaaggaacgctctcgctcaaggagaccgatactcagaagcagcatcaggtgccgatggatgacatcgtggccgtgatggaccgcctgtttgacgaaggcggacacgaagagggagaatgtgcctgcgggcatcatcatgaatagggaggatcaacatgaaacgtacgcataacaatggagagctgcggctcgccgacgccgggaagaccgtcgttctcgaaggctgggtggccaagcgccgcaatttcggcgcgctggtgttcatcgacctgagggaccgcgcgggcatcacacagctcgtctttgacgagcagctgtccaagacgatcacggaagtgcgcaatgagtatgtgctctgcgttacgggaacggtcgtggaaagacaggacaagaatccgaagctgcctaccggcgacatcgagatcagggtggatcaggtggagatcgtgaacagcgcggagaccacgccgctcatcatcgcggatgagacggacgcgctggaggatacccgtctcaaataccgctatctggacctgcgccgtccctgcctgcagaaaaacctgatgctccgccatcaggtcacgatgagcgtgcgcaactatctgtccgcgaagggcttcctggagatcgagacgccgattctgtgcaaatccacgccggaaggcgcccgggactacctcgtgcccagccgcatcagcaaaggcgcattctacgcgctgccgcagtccccgcagatctataagcagctgctcatgatcggcgggatggaaaaatactttcagatcgcgcgctgcttccgtgacgaagatctgcgtgctgaccgtcagccggagttcacccagatcgacatcgagatgagcttcgtggacgaagaggatgtgttcgcgctcgtcgaagggctcatgcgcgaagtgttccgcaagacgaaggatatcgagcttggggaattcgtccgcatcccatatgcggaatgcatggcgcgctatggctcagataagccggatacgcgtttcggcatggagctgcattgcctcaatgacgtctttgcggacaccggattcaagatcttccgcagcgtcctggacgttaagggcgaggtggactgcatcgtcgtggaaaacgccgcggggcgttattcccgcaagcagctggatcagctgcaggaatatgcgaaggtctatggcgcaaaggcgctggccttcctgaagtacgcggagggcgcgttcagcggcagcatcgccaaggtgatcagcgacgaggagaaggaagcgctgaaaaacaagctgaacatcacggaaaacgatctcatcctgttcgtggcggatcagcggaagactgcgcagagcgcgctgggcgcactgcgtcttcgcctgggcaaggagctcgggctgatcgatgagcagcgttatgatttcgtatgggtgaccgacttcccgatgtttgaatacagcgaggaggaaggcagatatgtggcggcgcatcatccgttcaccgcacctaagccggaggatgtggacaagctgatggatgatcaggccaactgctgctcccgcgcttacgacctcgtgctcaacggctatgagctgctgagcggatccatccgtatccacgatcagcagctgcaggagaaggtgttcgaagccatcgggctcacgcagcaggaggcacaggaacgcttcggcttcttcctggaggccttccgctatgggacccctccgcatggcggcgtaggcatcgggctggagcgtctggtcatgatcttggcgggaaccgataatatccgcgatgtggtcgcattcccgaagacggccagcgcatctgatctgatgagcgaagcaccttctgaagtggatgagaaacagctgaaggagctgcacatcagcgtcacacagtaagaagacgaacagacaacaaaaaggataggcgctgaggtcctatccttttgtcgtcttgtacgcaggatcagcgctgttcgccgcttgattccagaaagtaagtcgcctccatgtcggccgtgctcagggcgaaggccagcgggaaatgctcgaaggtgtagccgatgctgcggggatcgtcatttccgctggaaagcccatatgatagcggatcgcaaagctctcatcccggctcagccgcatgaatccggtgatcatgtaaacgctcttctctccgtgtccataaggcagcgcatcgtggtattcgaatgtatccacgctctgccattctccgttgatcttgacgttgcgcttgcctggatgatagacattgatcttgcacagatcgtgaagcagggcaaccacggcgatcgtctcatcgctgatctgatcgaggccgtagacgcgcttgaccctttcccggctcagataatcgttcaggcagtcatagacattcaggctgtgatcgaccagcccgcctttgtatgcgccgtgaaagcgcgtgctggccggcgcctcaaaaaaatccgaggccggcgactgcagatattccaggagccgctgtgaccccggccgccggatatgcgcctgataaatttcgataaaacgttcctttccgctcatccgatcactccattccttaccactattttagcgtatttttccggaaattgccattttgatcaaaaaacagaatgtcaagagtatactttgaaaaaaattttgctatactaaaggtgccttgggaagttctaatttttccgacactttgagatacgggagaccggacgttgtgatttggtgtgaacgcctgctacgggcaggaatcctaaaaatttacacaggttgcccacctgtaattacagagaaaagatctcgctttccagggcactgaccgataaaaaagcgatgaggctcagtcttcatcgctttctttatgccatagtgccacttgcttctcattgtagagcatatgcacgaaattcttcttggccgccggatattcctgatacatccgctgcagcatttccttgacatcctgccgctgggtaaagccgtcattgggacaggtgcttttcacataggggatcgcattgcggcgctgggcgctcaggatatcttcctcatgcgcatagatgagcggacggatgaatgtcgtgtccgtgcggctcatgtacatcttcggcaggaaagtggcgatctttccgccatggatcatgttgaggaagagcgtctctatcgcatcatcgcagtgatggccgaaggcgaccttcgtgcagcccagctcctgcgcggcagtgatgacgctcgccttcttgaattttgagcacagcgagcactggatgctgccgctgcgcgagggattgcgcttgaggatctcatagatcgaagaggggaagtgatgcagttcgatgccatgttcctggcagaacgcatccgcttcgctgaagtccatgttcgggaagcccatctcgatatgaatgccgacggcgcggaatcgcttttcgcggaatttggaatacatgtgcagtgccgtcagcaggaccatggagtcctttccgccggatacgccgacgcccacgacatcgccttcatcgatcatgccatagtcgaggtcggccttgcgcatggcgcgcagtatgtgttgtaaatccatcgtgtcaactcactttccgcaacattatagccaaatcgcggaaaaattacaatgacgcggcaattgtgaaatgatgtgaaagcaaagggaaggcaggcggcatgaaagttttatgctataataggaaaaggtgattgaacatgaacggagtattgctcatcaataaggaagccggcatgacctctcacgatgtcgtgaaccgtctgcgccggatcctgcatatcaaacggatcggacacagcgggaccttggatcccgatgcgacaggcgtattgctcgtcctcatcggcaaggcgtgcaaggtgcttcctttccttccggatacggataaagaatatatcgcgacgatggccctggggcagcgcacgctgagcgatgatatctggggcgaggtgctggagacgaaggaagtcacgccgatcacgaattttcaggcgttgtgcgatcgtttcatcggcatacagcagcagctcccgccgatgatctccagcgtgcgcgtcaacggccgcaagctgtatgagtatgccagagcgcatgaagaggtggaacggccgctgcggacgatcgatgtctatgagatggaggcgctggacgaacaggcgctgaaattccgtgtcttctgcagcagcggcacctatgtgcgcagcctttgccgggacatggcggaagccagcggcaatcttggctgtctctcctctttggtccgctcccgcgtcggccgcttttctctggatgactgctgtacgctgcagcaggtggaagagggggattactcccttctgcccgtggagacgctgctgacccatctgccgcgggtcagctatgccccgatacaggatatctacaatgggaagagcgtgcacctggacgccgctgtccccaagggacggatctgcatgtatgatcaggaacaggccgtggcgatctatgaatacagccatggcgatgtctatcgctgtgtgcgcgggatctggtaggtgaggcctatgaagatcttgaagaagagcgtaggcgaggcat

SEQ ID NO: 3187 - DNA, 5605 bp, Unknown
  16S sequences of unknown bacteria
aaaagaaatccgattcccctgacgaagataaatgtgttcatgattcaaagcttttaatcccgacactgaaggacttcttttccaagcatcctttgatcaatccaaaaaccttcctgggtgatgctgctttcgataccgcacagctctataatagccttcttaccagtgacacttttggtaatggcaaacatttctcgaaagcttatattccgctgaatgcaagatccggacttgaaaatctggattattctatcaatgaagatggtattccgtgttgtccccatgatccttctttacaaatgaagtacgaaggcacttccaaacttcgcagtggagtaacgaaatataaatttgtctgtccaaaaatgaaatggatttatgataaaccaactcaaaaagcccatcgtcattgtttctgtgacaacccttgtacctcttctaaatgtgggcggatggtctacatctacccagaaaaggatcttcgtgcttatcccggaacgatccgtggcaccgaagaatgggatgatacctataaaatcagaactgttgtcgaaagggatatcaaccacatcaaagacaatctctgtcttgcaggacgccgaacccaaaatgagaagactctgtatgctgatctgattcttgccggtatcacccaacttattactgttgttctcgcagataagatcaatcaccacgaatatattcaaagcttaaagcctctcatagcataggacttaccaacttaataagacctatggcttatttaagtgtgcctaaaatatctcatcatttaacgtttctgcatttatcatctccatttattgtggataactgctctcatatttcaaatttgagtttcgcaattacctagtcacttacaataagtgttacactttaccgtgtaaaagtcaaccttcccaaaaaatcccggagtacattgtcatactccaggattttgtcgtcaaccggataaaagcaaccgcattcgctacataattctacaccagataactgcttcacagttgattcatttaaaactcttccccgcaggattcaatcacttttttgtaccagtaaaaagaatctttgcggattctggaaaagtctccggtcccgtcatcatttttatttacatagataagaccataacgcttcttgaattctccagtggaggcactgacaagatctgtacagccccagcaggtgtagccgatcagatctactccgtcatggattgcttccttcatctgctctatatggcggcgcatatattcaatacggtaatcatcgtgaatctttccatcctctgtcagctgatccaccgccccaagaccattttccacgatcatgatcggaatctgatagcggtcatagatctggttcagaacatagcgaagaccagttgcatcgatctgccagccccagtcggaagctttcagatatggatttttcagattgtcacttccatttccggccgttttctctccgtcctttgtcacgctgacacagctactggaataatagctgatggtgaaaaagtccaccgtacccttcttgaggatctctttatcctcctgaagaacctccagctggattccgtgctcctcaaagtatctcgctgcaaatcccggataatatcctcttacatgaacatcaccggcaatggaattgtggatctgcccaaactgctgtgcatataagacatcatccggatggcaggtatatggataaccattgtgataagcaagcatacagccaagcataaactccggattgatctcatgagccatggaaactgcaagtgcacttgctaccagctggtgatgcattgcctgataacggctctgctcacatacatccttcgggtccagcattcctgcacagaataccgcaccaaagtcctgcgtcagcatattgatctcattaaaagtcagccaatattttaccttacctttatatctctcaaataaaacctttgcaaatcgaagatagaaatcgatcatcttacggcttttccatccgccatactccagagaaagatgaaggggattctcataatgagagatcgttatcagcggctcaatgttatattttctcaactcatcgatcacattgtcgtagaacttaaggccttcctcatttggagtttcctcatccccatttgggaacactctggaccaagaaatagaaaaacgatataccttaaatcccatctctgcaaaaagagcaatatcctctttccagtgatgataaaaatcagttgcctggtgattgggataaaattcttccggtaacggtgccggcggtgtaagacgacgttccttatccacacttcctcctgtcaggatatctgcaatggacgggcctctgccatcctcatcccaaccgccttcatactggtttgcagcagttgctccgccccagagaaagttttccggcatacggttataatttttcatattttaattttctcctttttacaaacatcaggcggatctgttatctccgcctgatgtttcgttgttattcttatacaatagtcagaaatttatctcctgcatttacagctgcatcttctttttccatgcatactgctttgatataatcagaaatattggtcacaacaaccggtgtgatcagatcatatccttctttcttaatggcatccatatcgaattccacaagaagctttcctttttttaccttatctccatcagaaacatgggatttaaaatatttaccatttaaatttacagtatcaagtccgatgtggatcagaatttctgctccactttctgtcacaaacatgattccatgtttgctgtccatgatatttgccaccgtaccatctgccggtgcataaacctttccttctgatggaacgatcgctgctccgtcacctaaaaccttatcagcaaaagttttatccggaacatcggaaagtgcttttacagttcctgctaccggtgcacaaagctcgatcttatctacaagcggagcgttctgctgtgccggctgtttttctgtatctgtgttctgtacttcatcctctgtctcagcctttacatcctcaaatccgaagataagtgtaagaacaaaagcagctccaaaagataccgcgatcataatgattccataaatcagattgcttaatcccttctcgccgataaacgccgggatcgccatgatacaattctgtgcaatgtaaagagaaacctgaagaagtcctcctacgataccaccgattccggctgcgatggaagctgctacaaccggtcttttcagtttcagtgtaacaccatacagagcaggctctgtgatacccataagagcggaaacaccggctgcacttgccagctgtttcatgttgctgtccttggatcttacagctactgcaagagaagctccggactgtgcaaggttagagcatacctgagatacaaagatcagtgtatcggtaccaccggttgcaatggcattcagtccgatcggtgtcagcgcatggtgcataccggtcataacaatgaacgggaaggttgctgcaaggatacctacaataatgaaaccaagttttacggacaggaagttgatggctaccgcaagtccgttaccaataattgttccgatcggtccaactacgatcagggcgatcggtgcactgatcagaattaccagtgtcgggttcaggatcagttttaccattttcggtgtgatcttatcaaccagaatctcaatataatgtgtgatccataccatcaggataaccggaataacggaataagaataagttgcttttgtgatcggcagaccaaacagtgtgatggccgcatcaccagctgccatggttacaaaggtagggcttaagtaaacaccggcaataaacagcgccagtgactggttcacgcggaaaaccttggcagcatttgctgcgatcaggaacggcatgaagtagaaagtaacatctccgataaaactgatcacctggtaggtactgcttgtttctgataccagatgaaaagttgtcagcagggtaagtacaactttgatcataccggctgcagtcagggcagggatcatcggggtcatacatccggtgatggcatcgataacttttgaaacaacactctttgagctgtcagagttcgctgccggtgcatcatcggtaggaacgcctttgtcttccaatgccttgtaaacagcgtttacttcgtttcctgcgataacctggaactgatcttcatgccagttaacgccggagatctcagaaagctttaagatctctttctcgttgatcttcgatctgtctttcacatagaaacgaagccttgtcatgcagtggaacagacgggtgatattatcttttccgcccagcgctgcaatcagtgtgtctgcagtttttgcatagtcctttttcatttggggacctcctttaataataaatattgaaatttatattaaaggtcttgcctgaaaagatacgcacatggcacgtatttcagtaacaatccattaacacctaatttataaaacaatctcttttcacagatttttcagacgtttatggtcttctgtgatcttctggatatgaatcgtcagatacagcatttcgtcctcagtcatagcgtatttatattcctcttccatcataagatagatcatttttacacagccgtaagcttctctgtactgctccttgatgatcttgaaaagctcctgattctcatcatagtgaagctctttatgaaggaatctctgggcaaaatatttcagatgcgtgagaaaccgctgataatacagattatcctcctgaaattccatattgtcataatacttctccacgatgtccaggatctgatgtacgataatggaaatctgatagctgtccgtcttgccgccatcttccgcattcacaaaatgcaatgcaaaaaatcctgcttcatctgcagaaagatctacctcgaacatctcatttacctttttcagtagttccaagccgatctcatattccttatgataaagctgcttgatatccagaagcagcatattctgaaggcggatcccgttttcaagtctggagatcgcacccatgatatggtcgctaagggaaaaataaatactgtcatttaatttcatcccctctttttccttcacttcatttacaaaagcttccacaaagtccagatatttttccggaatagcagtcagataaccctgtatctccttgctgatctgggcattttccgcagtaaagatcttctcgatcctggactcctccacttgctgtcctttctttttctgaaaggcaattccgcagccctttacaataacttcatgtccctgtccatccctggacagtatcagattattattcaaaatcttatagataaccatattcctgttcccccgctgccagacaaataaaaaaagaccattacagtatatagaaaacctatcccaaacctattcctatactactataaggtcttgcctgacgataaatcaatatttcagtaacaatccttctgattcgtaactatttaataactgtacgtaataatatcagaaaaaatatatgttgtctatctggaatatttaataaaatatt

SEQ ID NO: 3188 - DNA, 32759 bp, Unknown
  16S sequences of unknown bacteria
tttgcgatcgaaccggaccgctcctgccacaggcagaggcctggagccaaattgcgctccaggctttttctttgccccaaatctgcgcccccgttccagccgatctgaaccttcccggatcaaagaagccacccaggggtgccttcttttgctttgtaccaccggcttccccaagacagcccttcccgaatccatgccgcagagcggcactccgaaactattcactcttctctattctctcttccctcgccccactccggccttcccctcccactccccgggaatgccagagagctgctctcagcaggggggcggaggatcagttccccggcggcaatgcgggactgcaaaacgccctttccccccgcacagccccgcatgccgggcacaggctcattctgaacccgtgccgcagagcggcactccgcaactcttcactcttcactcttctctattcactctcccagccctgttcctttttccctccgggacggacagcaaaacaaaaatatattttgtttttttcacttgacacataattctgcaatgtataatataggtctgaatttgattatggagggaaaagaatatggcaaaactggatctgtgtgaaggagaagaactcattgaacaggcagcagcatcgcatgtaaagaaggtgctgattatgccgcaggccaatcccggcaatctgtttgtgaccaatcagcgggttgtattccggccgacacagggccgtcccagctcgcagttcgaatatgagctgagtgaccttcgctctttctcggtgggcatggcaagcaccattaccctgcacaccaagtccggtgaggagcacaagatcaccggtatgttcaataagaagctgatcagcgcactggagaaggctggtctggctcaggaataaagatacccgaaaaccggaacggcatggactgttccggttttttgctgtggtgacgggaagtccgccaggtgtgcgggccgggggattttttggagaaaaaacaaaaatccgcttgacaacacaagggattcttgatatactatatgagtaacttgcggatatggcggaattggcagacgcgctagattcaggttctagtggtagcaatactgtgcaggttcaagtcctgttatccgcaccacgtcggaatggactgcgttccattcaaaaagcccggtctttgaccgggcttttttcataccgctccgtcattcctccttttccgcaaaaggtcccgtttgctccggctgctcggttgcaagcgccctcgcgacgcctttgcggcactaccaaccttttgcgggtcattagatacaccctttccgatccaaactgtccgccttttttcatttggcaaagacagtccccctccccgcaaatcctctgtgacctccggtcacagaccagcctgcgctgtcccctgcggggaaagcagtttcttggtagtcctcgctgaccgggagggcaagcggcagttccctttcctcgtacagccctgcccgctgggcataagtttgttctgaatccgtgccgcaaggcacaccgtaactattcactcttcactattctctattcactcgcccccgcccggtcatgtgaccgggctttttctgtttaccgggagactttgtccccgggaggatctaaaccagcggggacaaacatactcatagtacaggctttcacagaaaggaggggatctatcatcgaaacactgacgctcaaagaaggcgaactgtttctctcggatctgggccaggacagtatggtacagatcaatggtcagatgaactggtacccatgccggcctttaccatggacgaagccactgtggatttcaatatggaggtcaaggagtcgtcggtgagcgccgataccagctccgagagcatctccaataccgacaccttcaagttctgggggtgcagcgcgtcgatcaccggaaatgtggcagccagtcagtcccggacccgttccaccgacagcagcgccaaatatcagatccatgcccgggctgtacagcaggcgccgtcggagggtatggcaaagctcaccgccctgtttgcgtcggctatggagcccattgagaagaaggaatcctgaccggctgcgggcagaagggaggtgatggcccggtatggaccgctatggcaatttcccgcccggaagacagccgccgggacagactgcggcacccagccggcccgcggcgccgggactgccggtgtgggccggtccgtggggctgtggctggggattctcccccggggccggcgcggacccgctgttcccggatttttcccggcagaccggtatcccgccccagttccgggatatgcctgcgggagggcttccgggtgttcccgccccatcagaagggcaggggtttcccctgcccctggtgaacctgcccccgcccgcagaccggaatacccagagccagtacgcagccgggcagatctccggggtgtccggagcctcggcgccgggccgggccggacagtatttcaccgatgcggagatccgggacctgtactgcccctataacccggtggaaaaggatttcatcgtactggggatctgcaccaaaggcggaacctctcccggagatgatctgcccgatctctatggtgcggagggcgtggagatgcgctgtcacagctgcggaaatccgctcaccggggacaatctctaccgggatcaccagccgcccaccaatctgcgaaaacagttctttctgttccagagctataacgggaatcccccgggtgagacggggaagatccggcagattctcgactatgtctgtacccatccgctgccgctgtacgaatttgagtgcataatcataaaagacggcggagccaaacggctcaggtgccagaccaaccatctggagaccgcccggaagctggctttggggccgatccggacggtgaactatggggagaactttgagcgccagtacctctaccctcattgctgcgcatgcagcaatacacagggcaagaagctctggtaaagccgccccggaactgaaaacagccccgccagccggaacatgccggtctgagcaggggctgttgtattgagcggagtaccgccggacaggagccaaaactcccccggagagcgccgcccgccccggcagagttcctccccgccaatccccataaacaacccagcccccgcccgaccggaaacccggtctgagcaggggctgttttattgagcggagtgccgccggacaggagccaaactcccccggagagcgccgcccgtcacccgtcagagccctccccgccaatccccataaacaccacagcccccgcccagccggaaatccgatctgagagcaggggctgttttgttgcgcaggaaatcatcggacaggagccggattcccccggagagcgccgtacgccccggcagagtccttcccctgccaatccccataaacaacccagcccccgcccagccggaacatgccggacggaacgggggctgtggcgattgggttatgccgagggggcggaggttccggcttcggtgagccggaccagcacccgccgggtcatatccaggttgcaggtaaagagggtcatatcccagtcccctgcgtccagggctgcggggtcatcagcgtcgatctcggtgatcccggtgacctgatagcgggtgactgtgccgtcctcccgggtgtaggtcaggagagcgccttcctccaggctggcgatccgtccgaagtgattgcggtagttgtgaccggcaatcaccttgcggctgccatcgctctcctggcggtacaggcagatactcagccggaggttttcctcgctgtaatctgccagcaccgggagttccagtcccagatcgggaatggacagaatcccatcaatggcatagccagccaggggatcggggttgaggggatcatcatcgggctggggattttccccgtccagacgctgctgggccagagccagcagatgggcggaattctcttctgcctgacgctgctcccacaggttgccgaaggtaaggcccagggcagccagcagcagacagcttcccaggatcacacagatccgtttccagaggggattattccggctgagagggttcatggtccttcctccttcggaacaggcccaggctgagcaggatcacaccgccggcactgagaagacccactgtacgccagtcctgaccggtatagggaagttccggatcagaggacggagtcggatggtcgtgcctgggatcgggatcggggtcaggatcgtgaccgccgcctccaccgccgccccggtagttttcaaaggaggcggagatggtgctgccgggcaggactgtgccggaagctccggtggaagatacctgatagccggcgttgtcgctctcggtgaactgataggcggcattgccgggcagttcgctgatggtgatgctctcattgtgacgcagggtgaaggtttcgccgctgcggatcacaccggtttcctgggtgccgtcctgccgtgtgatggtatagggataggcatctgccggtgcggtggagggcagaccgcttgtcagggtaaaggtgaaggtaaaggccttggaggtatcaccccggctgccgcttaccttcttggtgagggtcacagcgccgtctgccacattggtgaactggtaaaccggttcctcattgctttcgggggtgccggtgacagcctctccatagtaaacccgatagccgagcggcatcgactggctctcctcccggacgctgtaccggatcagagcgccattggaatcgtatttggcaaggccgtcaaagctgcccttccagtcattggctgcggtgagggtcagggtccgggtgggatcgggactgccgttgacgcacagttccacaatgatctcatccgggcgcaggccgagggcattgtcgttatcctgccagagcttttccacctgcaggttcactgtgccggtgagggtgttggtgagattcatgccgttctgggtgactgtgtactgatctccgcccgccggaccggtggtctggatctcctccacacggtaggtatacgcttcaccctgggcattggcctggggcagatggttgtagatgaaggtccaggtatcgccgttctgaatccaggtgtccggctgaaccggctgaccgaactcatcttcaatccgttcctcagcgccggttccggccttgcggtacagggccagggtgatgccatcgggacgggtgccataggcatcgctgttgtccttccagctcttggtgccggtgatgtcgctgtatgctacattcaccagcgatgtgcggtaactggtttcgttgggggtgtcgtaccagctgtacagctgatattcgataccgtttactacaacggaagcggaaccgtctgccttaacattgagaggaataccattgatggctgtttccacagcgtagtagtaccagcgctggccctgctcattgtagaacggcaggtggtcgatggtcttgctccacttattggtgctgtccagagtaatggaattgccgtaatagtaactgctgtcccggttgccgatcttggtttcatccaatgtacggcagggctggatggttactgccggagtaggtgttccggtcttggttccccaggttttggtaacggtcagcgaggtgctcttcacattggtgaaggacgcttccgcgttgtccgcggtgacctcctgccaggtgggactgccgtccacagtctggtagccgccggggacagtctcggcgatgcggtagcgggtctttccgtcatcaccggtcacactgccgggcatcacggtgggcaccttctcccagacagcggtccagacagcgctgtcagccggggtattctcatagtagggatcggtggggttcgggtcagctgtgccgtccagttccacctttgccggggtcgggaagctcttccagacctccttgccgttttccactgccaggtactggagttccaggggcagggaggcggcaggggtgccgtgccaggtcttggtggcgttgaaggtcagcacatcgccgaaggtgtttttcaccaggatatcctgaccgccggtgctgtcggggtagtaggcggtgtaggcgtcattgaagctgccgtttttgcccacaatggccgcctcggcctctgccacggtgcgttcgtcgctgtaccaccaggtgttgtccgtcaggttgggctgcagctcccgtacccggtaggtgaactcattgccctccaggtcatgggtgggcaggccattcagcgcggcattggcggtgcttacgtcctgctcattgacgccgtagacatgcaggatcaccggatgcggctggaaggtgtcatcggcggccttttcgtatgtgacgagggtcgaccaggtggtgccgtccgtactgtactgcaccagcaggctcacttcccagtcatagttggtgcgtccggtgtccgggcgtgtgccgtaggcattctgcccgtcgccgtcccactccttccgggcggtgatgccggtggtgttcaggtagttctggataataaaggtgctgttcgatggcagggagagagctccctgaaccggcgagaagagaccgtttctggagaattcatacttccagctgtccttgctgtcctcggtcacagtgacagtgatctgactgccgccgtcccagctgattccggtttccacaacacggtagctcagctgggtggtgccgccctgtccatcgctgatgaaccggggcagattgatgagggcgtggttcttaccccagacggtactgtcgttgatccgcccggtgagctcgggtgtgaagtcatagctgccgaagagcttggtgtaattctccgaatcgagggcatgctggaagaaggtatccgcattctcccactgagaggcggtgtcgttccacacctgcagctggaaggtgacggtgattttggtgcccaggtagtcctcggtgacggcggtgctgtccgaattcagccactgcttctggtagtagaccgtctgcgtgatggagttggtgaggtcgcccgcagtgagaacgccgtccacaggatcaccggtggtccaggtttcgccgccgctggcggattcatacccggacggcttcacttcctgaattccgtagacccagggcatgccgttgggagcgtaccgctccagttcgccatctgccttgccgatgatggtgtagtgccatgtattgccgtccgggtccttggtcatgctgatcgtatacaggctggggtccacagtctgcggcggcaggatttcgttgtcctggccttcctgcgaatgggcctggcgcagaaccgtgagggtcagttcatcgggccgtgtgccgaaggcgtcgccgaagtcatcccagaccttgtcaaactcgagggtgaccgtctcacggttgtcgtccggcttgttgtagaaggaggctgccactgccacatcgtcgccgctctcatagagtgtgatatcgtccggattgactgcaatgccattttccgcatcatagacggtgccgatcacatcggtactgtccgcattgcctgccgcagcggtgatctcatagccacccagccagccgtcggtcacttcccggatgcggtactcccaccgggagccgttgggggcatagtagtccagattctcgaacgtgagcacctgttccagcagtttgctgcccggattggcctgataggctgccttgaccttctcggaagtccaggtcacggtctgcacatctttctcccagtcggagggggtgacgtcatttttgatatagcgcctatagcgccggtcaagtgtgaactgcactgccggataggcagtgggttcgccgtcctcatcggtgggcagctccaggaacttcttcaccgacagggcgccctggatgctccggtagccgttttccaccaggtaggtgttgatcaccgggtcgaggtagaccagcttggagttggggacgttttccagggtgatggcagtttccttgagggtataggtgtaccgctgtccgttttcatcatacttgggaagcggctgggcattttcattgccgggagccggttcgatgctcagtgtgccgtcatcggcgttcatggataccacattttcaccggtataggcaaatccgaagtgataggcgccgttctccagcgggagattccagttccggatggtgagggtggcaatgtccctgggttcggtgcccagggtctgctggagggtaaaggtgacctccggcagatccgccgcgagatagctggcgggcatggttttccacagcttctgacccaggacggtcacattggcggaagcggtgttggtaaaggtaccgtcctccagcagggcatacttgcctgcgtctgccagaccatcggggatcagcacagcggtgtcaacgccctcgccattttgcggaatgcctctgtccatgccggactgtgtgccaatctcggtgagcgtcccatccagcgtataggagatggcggtatccagatagtcgaagtcagcggcgttcacatgggtattctccactgcgtagtagtagatctcatagcccaggctgtcgtacttgggcaggctggagaatacagcatgccagtggtagatggggctgagcagctgatcgccgttccatacatcgtcctcgaggtaggtccagtgatagttggcctgatagagggatacctgtgtagtgggaatgccctgattgtcccgcacatgggtcacctggtagatgtccagataaatatcggggcgcaggccgttttcatagttataggtatccttccactgcttgtgccagagcaccgacttggtgccggaaagccggttggtgaccgtcatggtctggctgtcgctgtcatggtgttcgcccaccaggtacttttcatcggaatagccggtggaataggaccggatcagcgcataggcttcggggaatttctgggcgagctcggtgcggctgagttccctgccgctgccgtccacccagacttccacggcggtgtagtggactacctgaccgctgcggtcatatttgggcaggttgtggaagtcgtagtccctggtgctgtcctcgggcttcaggctgacgatctgcaccgacgaaacagcgttcccgttccggtcgaggatagccacctggttatcggggttgccgacggtgatggtgtcagcttcgcccgggcctttccggatgatcttatagtaatcctctcccccgacaaagtccagacggatcgccagatagagctggctggtagggtcggcgggattcttccaggtctttttcagctcggcgaggagttcttcccgcacactgcctttgccgtccagccactgcttggtgacagtgaggtcgatgttgcccagacgccggttggtgacggtgaggaactcggtgccggcgatggtatcccgggaataggtggcctcataccggtggtactcggtttcatactgaatggcggtataggtgccgttgggatcgtattccgccggagcctcaggctgggtgtagttggggtaggcgccgctgtccagatagtaggtggtcagcgggacgggtttgtcccccacccgggtttccaggatatagacctcatcggctgtgtagctgccgatgccgatatagccataccagacgccgtcttgcagggtaaccgaggagattgccttgttatcctccttggcataggcctggatggtcaccggcatacggtgggtggtatcactgtcatcgatccacaccttgcgcaccatgatgcggttgccggcgccggtgggtacattgatgacccgggtctggtagccgccgtcctcggtgcgtttggtttcatagatggggaagcgggaaaccccgtcgccctcttccagcaggtagtattcatactggtgaccggagctgtcgaattcgggcagattcctgacctctcccttccagggttcagtctcctggacggtgatgcccagatcggcattcaccaccgtgggagccgggtcggcaacgccgtccagggtgatctccacatagggatcggggtcaaggggttcgccgggcagtccctggaagatctgcagggtgacagtctccccggcaggagcctgcatgggctgtccctgttcgtcctgccagtccttggccaccaggtagtccagggagttgtccagggtattggtgatgagggtgctgctgccgtcctgctgtaccgaggaggactgatagttcaccgagtagccgttctgctggagggtgaaggtgccgtcgtcccggaggaggttttcctcgctctccccctggtagacaccgcattccacccagcggtattccagttcccggcccagcatgtcatactggggcaccgactgactgctgatctgggtgagctgttcggaatagaattcgtccatggtcacagtgggcagactggtatcttcccagggttcatagctgtccttgggacgggactggagtttcagttccacccggacatcttccagttccgactggaaggaagcagcgtcccaggtcttggtgacccgggtggtgatattggcgtcaatgcagttggagagggtgccgccgttatagagataggcgttgcccgcggggcgtttcccctcggaatcggactgcacttcgccgccgagatccactgtatccagcagggtgccgtccgactgcaccgcaccgaatacctgtttatagttattggaagtggaaagggtctgggtcacttccataacgcagtagatgtattcatagccttcggggtcatatttgggaagcagggagccatctgccttcccatcgccgtcgaagtccacggtaaagctgatgtgctgccgggccacgccggtttcatccggctggggatcggtttccaccgccacttccacaagggtgccgtctgcattccggagcggggacgccgtatcgaaatcctgtcccttgcggtaccgccacagctggaaggtgccgccgggacgggctttaatggcctcctcggtgccgctgtccatccagaccttgtaggcctcgtattcagtgctgccggtgagggtcagattgagggtaccgcctgaatagagggcgtcctcaatggagccgaagttgggcacattggagttgttataggtgatggcgaggtaatcctctcccatattctccagcggaagacgcccgggggtcgtaccgccttccgactcgggaagctgatccaccttataggtgatgagtgagccatcgagattgtatttccataccccggcaacggtcagggtcaggttgtcattgtcctcggtgatctgtacatagctttccatggcccgcaggatggaaatctgtgttttctgctcatcgcccacattccagaaggcggtgaaccggaagttatccagaatcttgttgcggaaggactctttggattccacggtcgaaggtatggtgccgtcccggagtaccatattgaaggtgagatcccgcttgaggacataataccagccgggcggagaggggccgatccgggggcagcggcataggataatccgaaaggagggtgtgacccctatgccgaaacgttcccggcgctcccggcgcagggtgacgctgttttcccggttccggcgggaactgcggaccctgtcgctggcggaccgctgtctgtttttcatgttcctggtgctgctggtgcagtccgccgcggtgatgttctccccgcctctcgatgccggcggggagatcgacatcattgtgcgcacctcatcggcgtccatcttcgggtatctgctcagcgggggactgtccggctcccggactatcccggaatccccggcggaggacccggcagccatgccggctatgccttcgccggagccgtctgccgcagcggaaccggtatccatggagccggtccggaccgagtccgggacagcctctttgccggacatgacacagccggcagcgggcggatgcagccggattcgggtgcttgcgacagccggtgtagggatattctgtctgctctcccttctgctgctccgggactggcccggaaaagccgcccagctggcggattcgggcagcggcacagccatggtgacccagttccgggattttatctcgggggcagtgggatttctcaccggctgtgcgtcccggggctccggcacaacgccggactgacccaatttgatacaggagggatcttcccattgcaacactcaatcaggatctgtacggtctgcagtacagtgcggatttttccattcagggtctgcaggaagcagacattgacctgagcctgccgccggtgagcgataccgcagccacagtctatggtaccgtcaccgatggcacccagcccattgcggacgcggtggtcaagctgtttgatgaacacggggtgccgttccagcacaccatgaccaatgcggtcggtgaatatgtgctggaaaatgttccggctggcacttataccctggcggcggtgaaggagggctgccggctcagtgacgcagccggtgtgatcctgcagcagcgggataccacccggatcgatctgatctgcatcgccgatcccactctggctctgggtaccattgccggtgtggtgaacactgtggatgcgtccggtgttccccagccgctgggcggggtcaaactgaccctccaggacgaactgggagcggcagtggctgtgacctataccatcgacgatggtgagtttgtcttttatgatgtggcagacgggcgctataccctgctgtccacagcggaggggtatctgccgtccgcgccggtgactgtggtgatcggcagcggttccatcgccaatgtcaccatgaccatgctggcagacagccgcacttataatggtacagtcagcggtaccatcaccgaccggaatggacgggtggtagccggatgctttgtaggtctgtaccaggtgactgtggagcagggcatccagcatgaaaccctggttgctgtcaccaagaccaatgcgtcgggcaattatctgttcggcggggtaagcggcggcaagtatctggtcaaggccaagatgagcatctgcccctgacttccgttcccggcctgccgggcatataaaaaagcgatcccctttctcatgggacataagcccggggaaaggggatcgttctgttatggagaaaggttggtggggagaatatcccccgtctgaccggcagaaccggctgcccgaaccggaacagcacggaggagcctgtcccggaggccggcagccggtaccggcggggggtctcctttgttgtgcgcctgccccggaaccgtccgggggcagggcagcatccgggagggagccttctgccccatgccctgcatcagaggattggcacaggagcttttgtccctctcaccgggagtatggacagaaaggcgccgctctataccggaaattttactgatggcttttgccctgtaccccggccctcgcccgccggggcatttttaccggaagagggacagtcccgcccggttcaccgccgggctttggccccgtaccccagccctcgcccgccgggatattttcatcggtagagggtcagccccgaccggctcagctgccggtgaatcagcccttgtaatcgggagccttgccgatggaggcaatgatctccttgacagcttcgatcagtttgtcgatatcctgcttgttgttgacccaggagcaggagatccggaagccgcccacatggccggtgaagcgctgggcgatgaagatctgacggctgtgcagttcccgcagaatggcacggtcctgttccacgtcctgatagagccgggtgatgatgataccgccccgacggcccgggtcacgatgggtgatgacagtaccgccgatctcttcccagcgggtcatgcagtactcaccgatctcccagacacgctgctggatattctcgatgccgatctcattgaccagccccagggattcacccaaggcaatggcgccggcatagttgctggtgccgccgatctcatacttgcgggcggtgttggggaaggtccagtcatagacagcctgggcgtccaccttttcccagtaagcaccccagccgccttcgggcacggtggtgttcagatagccggcatagctctgcttgatcttatccaggctgttcttgttcacatacagcacaccggtgccatagggggagttgagccacttgtgtccgccggcggtgagcagatccacatggaaggtcttggtgtccagctcggtgacacccagctgctgtacagcatccaccacaaagaagatgcccttttccttacaccagtcaccgatggccttgaggtcgctggcccagccgttgcaccattccagggtggacatcaccagaatgcgggtgtgttcatctgccagcttggcaaagtcctccacacggaagcggttgtccggggtcttgcagacccggatatcgatcttcttctcactgcgcatcacgcaccagggcagagccacctggataaattccagattggtggtgatgatgttgtcgccgggctggagttcaatgccctgagcggcaatattgaggccatgggaggtgctctccaccagggcgatctcctcggggtcggcgttgagaagcttctgggcctcttcataagccttgtggcgcagggcgtccatggcgatgtgatgggcactggaattggcttcgtcctgacgggcggtcatatcagcgaaatccttgacagcctttacagcccgctggggagcaaagctcacacaggccacatccaggaatgtcatggtattgaggatcggaaattcctcctgacggatcttttcccaatcgatctgtttcataataaaaattcctcctttgaaatcacttgggatctcgtttttctgtgatttcattgtcccacagactttggaggagttctgtaaggcacttaacatccgcgtgaaaattttgtgcagagagccaggggcaggctggaaccagtccggagcaaagagcagtagcaaatgtcacagcccatggtgccagaccgcggatatactggagaaaaagagagaaaaaagggggaactggcaatgcccatcgtgataccatcccgggactggggagatctggaatccccctggatttccaccgatctctccacctgggagaccccgctgcggcacggacggctccgggaatatcagccccgggagcaggtattccggcagggggaggatttttcttcggtgtatattgtggagtcaggccggatacgggtgagtgtctgtcatgcggatggacaggaaaagaccctgtatgtggcggacaccggtgccatgatcggggagagcgactgtatcctgggacagccatacagcagtaccgccacggtagtgctgcccagccgggtccgggcggtgccgtcggcactggtgcaggagctgttccatgccgacccggtgtttgcggactggctgcttcagtaccaggcccggaaggtgcgtctgctgctggggcagaacatgaccctgtcctttgaccgggccaggcagcgggtggcaaagaccctgctctatctgtgcggacagtacggacggcagaaggaggacggcatctggctgaccaaccggttcacctgcagcgatgtggcggggatcaccaatgtgagccgtgtgagcgtgaacctgatcttccgggagtgggaggaggcgggaatcctcacccgggcgcacggacgctgctgcatccgggacctggaggagctgcggcgactggcagagccggactgagggtccgcctacccccggccccgcagaccggcatcatgcaaggaaccaccggcaggcttcccccaaaaacgggagagcccgccggtggttttttctgccgcttctgcaggagggggccagccgatccggaaaaaatccggcggaatccggcttttaagggagaaaaatgcagttttgcttgcgtgaagctgcaagatccggtatcatatagataacaggatttccatttcccgggaaagaaccggatcaaaggaggcgtttgtgaatggaagcggtaaaaaatctcaatggtgagatgtggatttttgcgttcctgctcatcgccattgtggtgctccaggcgtgctggttcctgcgcctggcgctgaggtacaacaagaagcataactacttcaccaaggaagaagtgggccatctgctcaagatgggttcggtttcggtactgggcccggccttcagtgtggtagttgtggcaatttccctcattgccatggtgggcagtggtcttaccttcatgcgggtgggcgtcatcggcgctgccggttatgagatgatgatcgccaccaccgcggcagaaaccatcggcgtccagttcaatacacccgaattcaatgagtcagtcctggtgctgtgcggattcggtatggcctttgcgtccattccctatttcatctccacccccatcgagctgatgatcatggataaggccgctgccaaggccggcggcaaggcaaaggacaaaccctcctttatcccctatctgggcaaggcagccatgatgggtctgatgggttcctttgcggtatcctatctggcttcgcccatcaactgggtggccttcctcacggctgccgctgtggtaatcctcattatcaagcgggtggcaaaaaccgggaagaaaggcctcatggactggtgtattaccattgccatgctctgcggcatgacagtggcccagatcgtttcaatgctcatcgcataaggagggaagcagtatggaaaatatggaaaacaagatgcagaccacagaactctctccccgggaggaataccatcaggaatttctgccccaggtccataagatcggcgccgcaaccatggcaatcgcgctgatcctctcgctgctgcccaccgtttactttgtctttatcaaggggatcgaagtgccgctttccacctttatcagcgtggtgatcgccatcttcacctttgccattggcatgtggctgtctgaacccgctgccttctggcccgtgctgggttctgccggtacttactttgccttcctcgccggcaatgcctcgagcatgcgtctgccggtggcactcaccgcccgcagctccatcgagggcggcgatgacctggaaaatccccgtacccatgtggcaatgatcattgctctgtttgcctcggtagtagtcaacctggcaattctgctctccattgtcctcatcggcgacggactcatctccattctgccggcaagtgtcctggcagcgttcaatttcgtcatgccctgtctgctggcaaacaatatcctcatgcagtccaagggcccggacggcaccatcatcaaggggttcctcaaggtgctgccctatctgctcaccggtgtggcggcccagctgctggtgaagaatgtctttaccttcctttccaattatggcattctgctggcagtggtattgtcggtgctggtggcctatggcttctaccgccgggatctggctgcccatgaaaagcagaacagctaatccttgtttctcagccttccctgccgctgctgtcatgcggcggtgagaacaaatatagaatcagtcatgcaaaggagagatcaaaccatgctcaatcaggcaagaatagacggactgctgaagtatatggatcagatcggtctgagccagatgctgatccgcaatccggtgctggtacggtactttgtggggattacaccccggggtgcggaccgcgccaccattctgtatgtatcgaagaagaacggcgtcaagctgattctcaatgagctgaccaactatcccaaggaactgggagtggatcaggagttccatggggatcaggacaatgtggcggaagtgatctcccggtacaccattcacgatgaacccctgggctttgacggggaatatcctgccaagtggctgctgtccctccgggaattcggggcagccagtgactatgtgctgggtgaccgggcgctcaatctgcagcgggcgcacaaggacgctgaggagatggaactgctccgggaagccagccgcatgaatgaccgggtaatggcccgggtacggggcgtattccatgacggcatcaccgaaaaggaagccgccggcatcatctccaggatgtttgtggaggaaggcgccgatatgcccggctgggtgatcgtagcctttggccccaatgccgccaatgtgcatcatatccccggcgatgcccgcctcaaggaaggggacgccattctcattgatatgggatcgccccggaagggctatcattcggatatgacccgtaccttcttctggaagagtgtcggcgaaaagcagcgggctgtctatgagctggtgaagaatgccaacatcgccgctgaaaaggccatccgtccgggcatgaagtgcagcgatgtggataaggttgcccgggatctcatcaccgagggcggctatggcccgtacttcacccaccgtctgggccactacatcggcgtggatctccacgatcccggcgacattgcctggtacaatcccgatccggtggagcccaccatggccttctcctgtgagccgggtgtctacctgccgggcgagttcggcgtgcgggtggaggatctggtcatcgtcaccgaggacggctgtgagatcctcaacagcgataacaaggaactggagatcctcggcctgtaaaccaaataaaaaagccgcccctgcgggcggctttttttatttggagccaaaggacaccacttcaaagtgcgcgctgccctctgccttatctccggtcacggtgatggtataggttccgctttcctcgatcccgatggcgaagtcgcaggaggcaacaatgccgtctccgctgtaaagcggttcttcaccctctttctggatctgaacggacagttccccgccatccacggtaatgtccgcacggatctgatctcccgcttgggcggtcagctcctgggaatcggtggtgttgaacatggtgtagtccagaagaaactgctcatcgttccctgtccggctgccgttgaacgcaggggtactgccgcaggctgccagggaaatgatgagcagcgcggcgcctgtcagatattttgcggttcgcattggaattcctcttttttacaatttttcatttgccagagcttctcccggctggggtacaagctcaatggcctgcttgccggtgaggtgctccacggtgagcaccagtaccgccaccgctgccagttccttcccgatctcctcctccagctcggtatcccggccggggctgtacttctcccccagtgcccgcagtccggtgaggatctcttcggggtcctccgccacccggatgcgtccgaaggcaatggcgctgcggtaatgggtggtgaacttctcgggaacgatcttgtcctgatccaccacacagaagctggccttgggacagcgggcaatggcatcgatcttgtgtccggtgcgggcggcatggaagtagatcttcccctcccggtaggcatagctcatgggcagggcatagggatagccgccgtctcctgccagcgccagtacgccgcaggtgttctgctccaggatcgcccggctctcggacaggcgcagctgctgccggctccggcgcatcttccggaaggcaaagggcgcctcgggcaggatctccgctccggtaaaggccgggtcatcggcttccaggacggtatagccgtgcttgatcgccggaagaagcttgtccacaaagtcggaggtggcaatgcgcaccagccgtccgtcggcattgggcgggaagcgtacaaacggcccgtccagcacttcccggtcgatgaacagttccagtttgccctccatgtcatacatcagttccatggcgcccaccgctccggcagatcttccagcgctgccgcgttcaccatcgaaagccgggtgatgttccggctctttgccagggccttggcatccagacgcttttcccggggcagcagcaggaacagggtccgggaccggttgcggttctggaagatgaggttcttgagtcccggtacacccagggccttgtccacttcttccgcctcagcggtggtctcaggctgccgggagaactccacccattcataggcgattcccagccgttccagcagttcatagcattcccgttcccggtcaccggtgagggcggcggggcgtccggtctgccgtgccgatacagtaaatccttcgctcatacagatctcctccttgccgggacgggaaaaaacgcccgtccctctctgtaagcagaatagcacggcagcggcccggggtcaaggagggttttgttccccggatataaaaaacacccggcggggaatcccgaatcccgccgggtgaagggaatatcagaggttgtgagggtcgtccgggaaagctgcccggaacagagggtcctgttcggggaagtgggtcacatagcccaccggaatcctgccgccggtggcttcaatgacctgccgggctccatccggaccaaaggcgccgcacagttcaatacagccgatcccctcttctgccagggctctggctgcggcacaggcagcgggaaggtcgggcacaccgatcatccgggcgctgccgccgccgatggaggcggtacggtcctgttccggggagaaatccccgaggatcagaaatgcgaaggtcatgaaaaacacactcctgtcagactgaggcttacagattcttcacaaagagggcacggatggcgttgagcactgccaggaccatgacgcccacatcggcgaagatcgccagccacatattggcgatacccagagcgcccagcagcagacagcccagcttgatgccgatggcgaaccaggtgttctggtagaccttggcgatcttgcgggggtcgtcgtccatgaggaccacatcagcggcctcaatggcggcatccgaacccatggcgcccatggcgatgccgatgtccgcacgggagagcaccggagcatcgttgatgccgtcgcccacaaaggcgagcttatcccggtcattggaacgctctgccagcagttcttccaccttggtgaccttgtctgccgggagcagttcgctgtaatactcgtcgattcccagttcctttgccaccttttcggctaccgagcgatggtcgccggtgagcatgaccatccggcgcacaccagcgctccggagatgggcaatggcttccgccgcaccgggcttgatgcggtcggcaatgagaatctgtccggcatagacgccgtccaccgagatgtgtaccacagtaccgggttcatcgctttcctggaaagcaacgcccagctggttcatcagcttgtcattgcccgcagccaccgatttgccgtccacttcggctacgacaccggcgccgctgcgctcctccacctgacccacacgggagcggtccagttcctgcccataggccttctggaggctcttgctgatggggtgggaagacgcgctctctgccagggctgccagctccagcaggcgtccttcctcaaagccctctgccggggtgatgcgggtcacttcaaagacgccttcggtgagggtaccggtcttgtcaaagaccagggtacgggtctgggcgagggtttccaggtagttggagcccttgaccagcacaccctggttgctggcgccgccgatgccggcgaagaaggagagcggaatactgatcaccagcgcgcagggacagctgataaccaggaaggtaagggcacggtagaaccagtcagcccagtcgggggtgaggcccatgaggaactgacgggtcaggggcggcagcagagccagtgccacggcactgtaacagactgccggggtatagaccttggcgaacttggagataaaggcctccgacttggatttgcgggaggaggcattctccaccaggtcgaggatcttggaaacggtggattcgccgaattccttggtggtgcggatcttcagcagaccggtgaggttgatgcagccgctgatgatctcaccgccctcttccacttcccggggcaggctttcgccggtgagggcagcggtgttgagggtggaacggccctctacgacaatgccgtcgatgggcaccttttcacccggctggacaatgatgatggagcccacttccacttcatcggggtccacctgttccagctgaccgtccacttcgatgttggcatagtcaggacggatatccatgagttcgctgatattcttgcggctccgtcccacggcatagctctggaacagttcaccgatctgatagaacagcataacggcaatggcttcggtatagtcgccgctgtcggtgaggccgatgacaatggcgcccacggtggcaactgccatgaggaagttctcatcaaagacctgacggttccagatgcccagaacagccttccagagaatatcatagcccacgatgaaatagggcagcatgtagagggcgaaccggacaagaccggtgaccggtacaaagtgcagcgccaccatcagcacggcggaaacaatgatccgccagagcatttttttctgctttttgttcatagaggaaatcccttctttgatccggtcggagccgggaattttataattaaataaatgtttaatcgttcatatattactgctgcaaaaacacccgggcaatgccgcaggtgttttttaccagcagtcggaaccggacggacaagcgtcccgtgggatcttacaggaagatctcgcagtcgctttccacctttttgcagttcttgagaacctcagccatgacggccttggggtcctggccctcatcaaactccacagccatcttcagggtcatgaagttcacattggcgtccttgacgccgggggtcttgcgggcggcgtcctccatcttgttggcgcagttggcgcagtctacatcgatcttataggtctttttcattgctgttttctcctttcccgacagaatttcggttataagattaaatgcttgtttaatctttcatatctatactctatgtcaaagagggccggaagtcaacgggggaacggtgaatcgttccgtttggattaaaaacagttccgaatggattaagcgaaaaaagcccagactccggatgcccgcaaaccgcgtacagacgcgataaaatcgcccttgcggggagcagttctctggcgtccccggaaaattgggtgggtatgcctttgttttcgccctcgcctggcttcgggcggaaaaagagaacagtgaagagtgaatagcgaaaagcgaatagttttggtgtgccgctttgcggcacggattcagaagaaactttcacccggtgggcgggactgtgggaggaagaatgcttccgcatgccctcccagccaacgagggacgccagggaaccgccccaccgcaggcggcaggccccagcgccgcattttccgcaggtggttgacagagggcgggcggggattttacaatggagaaaacaacggcgaacaaaaggagagtggagccatgaagccggaacagaccggacacgaaccctgcggctgcggcagtgatcagctgcgggagaaactcccgtccaccggggagatccagtcggtggcggatgccatgcggcagctgggagacagcagccggctgcggatcttctgggtgctgtgccactgtgaggaatgcgtcatggggctttcggcgctggtggagatgagcagtccggcggtgagccatcatctgcggctgctcaagagtgccggactgatcgtcagccggcggcagggcaaggagatgtactaccgggcagcggataccgaagcagcccgggtgctgcaccataccattgaacagctggcagccctctcctgtcccggagaggaggaagaggcatgaccctgtggaccaaggagacaatcaccggggatctccgggacctgccggcgggggtacaggagatccgcaccccggagggagaactctgccggctgccgctgcctgagagcggcggacggggccggtcggaggagatccggctctgtgactgggcgaccatgcgcctggagtggtatgaagccgagggatttcattcccggcatggagccgagccgggctttctggagctgagcttctgtctgagcggacgcatgggctggcagctccgggacggcagcggactctatctcgggccgggagggctggccatccgtctgcgggagagctgcagtgattcccggctccagttcccgctggggtactatgcgggactggctttctcggtggatacccggacgctggatgcccagctgcctgtcccccttgcgcagatgggcgtcaccggagcggggctgctggagcggtactgtcccggcggacgcagcctggcactggcggctcaggcgggagtggcgccgctgctggaaccactggcgcgtctgccccgggaggcccggcctgcctggggactgctgcgcatccaggaattgctgctcctgctgggggctctggaacagcccgagctgtcctcccctgagggctggccccgagatcagctggctgcgatccaggcggtgcatgcccgtctggtggaggatctctcccggcggtataccattgaggagctgtcccgggagcacctgctcaacacctcggcgctgaaagccgggttcaaggcggtgtacggacagccggtgggcgcctatatgcgggagctgcggatgcgggaagccgcccgtctgctccgggagagcgacctgcccatcgccggtgtggcagccgccgtgggatatgagaaccagggcaagttcacccgtgccttcaaggaggcggtggggctgctgcccaccgagtaccgccgccagaacggccccctgcgggggaagcagttccctggcgtcccccgatagcaatgtagaaatgcaaaacgccccttccaaatcccgtgccgccaggcacaccaaaactcttcgctcttcactgttcaatattctctattcacccccaccccctgcgggggaagcagttccctggcgtcccccgatagcagggagagcatgcggaagcttccctccctcgcaccacctgcggtggggcggttctctggcgaccctcgctcgctgggagagcatgcgaaagcttccctccctcacatagcaaaacccgtcggacgaaaatttcttctgaatccgtgccgccaggcacaccgaaactcttcgctcttcacttttccctattcactaaaaaacgccgtccccgcagcgagcgaggacggcgttttcttattgttctgaggcagaggtttccgcttccttggccttttccgaggcgaaggtgccggtgaagctgttctcggcggtgatgacgcagagccacaggggattcttccgctgggcagcttcctgcagggcgtgcttgagttccggggcgcggctgtccagttcccggggcagcaccagatcgaagatcacattggtatgggtggtgccgggcaccatgcgcaggtcatggatggagagccggggatcgagcttctttgcttcggcggcaaagaactcccgggcctcaccggtttcggaatcatcggtgacaatggggtcgtagtggatcaccacatgcagcccctcctgctccaggaagtatttctcaatgcggtcgatggtgtcatggctttccagtacatcggcactggcagccatttcggcatgcagactggcaaactgccggcccgggccatagtcatgtacgatcatgtcatggatgcccagtacaccgggataggaaagggtcacatcggcgatatgccgtaccagttcgggatcgggggtctgtcccagcagcggggcaatggaatcctttaccagaccccagccgctccacaggataaaggctgccacagccagacccatatagccatccagattccagccgaactgcatctgcagcagagtggcaatgaggacagcgccggtgctgatgacatcgttgcggctgtcagcggcggtggcttccagggtggcggagcggatcagccgtcccacatggcggttgaaggctgccatccagaacttcaccagaatggaggccgccaggatcagaatggatgccattccggtggtgatgggttccggcgagaggatcttctggatgctggtctttgccagttcagcgccgatgagcaggatcatcacgctcacagccagtcccgagagatattcggtgcgtccgtgtccataggggtgttcatcatcggcgggacgggctgccagccggaatcccagcagggtgatgatgcttgatgaggcatccgagaggttgttgacagcgtcagcggagatggcaacgctgccggtgagcagtcctgccaggaatttgccggcggagagcagaaggttgcagcagatgcccaccagtccggccagattgccgcaccgggcccggacctgagggtcatttacttcggggtatccttttacaaaatgcgagagcagaaattcagtcatgcagtaacacagtcctttttatcgaaatggtttcagacaggcttgcgggccttgaccagcagcatcatgggacggcgcatctcatccgccataccgggcagatccagcatggacggatcgggcatagcctcttccacagcctccagtacaaagccgcaccggatcagacccatcaggatctgggtgagggtatggtgctgttttttgacctcctgacccagaaagagagtagtgcgttccccgggataatagtagttgtccaccggccagcagaccggacggccctctgtgtcccggacccagtcctcccgtacaccggcagtaaagaccggatgttcgatattgaacaggaatacaccgccgggccggagggtggagaataccttccggtagatgtcgtccaggtcggcgaggtagtgcagcgccagattggaaaccaccaggtcatagtagccggcgggatagctgtattcggcaatgccgcatacctcataccggatgcgggggtcggcattgcgcgcccgggcttcggcgatcatcttctcactgagatccagtcccagggcttccgcggcgccctgttccacggcgtatttgcagtgccagccatagccgcagcccagatccagtacccggctgccctccatggcaggaaacagcggctggagctgatgccattccccggcggcttccagtccgccggtgctccgggccatccgggaataggcgtcaaaaaatgccttgtcatcatagatgttgttcatgggaaaaattcctccttctatggataaaaaaggcggccaactgccattttagcacacccggtgccggcaggcaacggggcagaggaaagttttggcttcatctgcagtttacacaggggacgaatccccgcaaagccgggccggtataataaaaccgtaccggaacagcgggaggcagttcctgccggcggacggcgggaaccaaaacccccatggcgcttgctgccgccttgccgctggaagcagcgggcgcctgaatggaaaggagtgcctgtccatgcttccctgtcagagccgctgtccccagtattatgaaggctgtcacaagacctgcgccgcctggaaaaagtaccgggctgccagtgccgaggatcaccgccgccgccgtgcctatcttgactattacagccggctctgtgccgatgtggagcgccggtgctggaaggtggaccctcactggactctgcggtagcgggccctggattctgaaccgaggtggattttctcatggaacttctccgggcacttttctgtgtgggactggtcgccgccggctggcgggtcctggcgcccctctgtccccggcgctggctctgaccggctgttttcccccgaatagaccctgctccctctccacgcccgcaagggcgttttttctgtctgaataggttgacaactgtctacctttctggtatgctgatgtcaggtaaacaactgtctaccatacggaaggagggaacgacgatggcaaatattccgctgtcggacggggaatggaagctgatgaaccagctctgggggcagtcaccggcgaccattacccagctcaccgagcggctggcgccggagacgggctggagcaagcatacgatcatcaccatgctcagccgtctggagaagaagggcgcggtggctcaccgggaaaatggacgggccaaggaattctggccggtgctggatcaggcggatgcctgccgccgggagacccggagttttctggaccggctctatggcgggagcctggggctgatggtgtccaccctggtggggacagaggccctcaccccggacgatgtagaggagctggaagaactgctccagagggcaaaggaggcgaaacgccatgatgaatcccagtgaactgctgctcacctcatcggtgctgatcctggcggtgctggcactgcggcatttcggacggggacggctgagccgccggctctgctatgggctgtggctggtggtgctgctccgcttgctggtgccggtgtcgctgccctcgcccaccagtgtgctgaacctcccggcggcccagtcggcagagcggttcttagcccaacgggtggaggtcatcacccccgatggcgccgcctctgcccgaccggaaaccgctgaacccgccgcgccggaggaaactgccccggcggcggagcccctgccgcagttttcgcccctggttttgatctgggcggcgggagcgctcggcaccagcggatggtttctctgggtgaatgcccggtttgcccggcagctccggcacgcccggcgggaactcccggttcccgagagtccgctgccggtgtgggtggcggaggggattggttccccctgcctgttcggactgctgcgtccggcggtgtatctcacccccgaggtggcggcagacccggtgcgccggcggcatgtgctcacccatgagctctgtcactggcggcagaaggatcacatctgggcggcagcccggaccctctgcctgattctctactggttcgatccgctggtgtggctggcggcagcggcctcccgggaggactgtgagctggcctgtgatgagcgcacggtgcggacactgggcgaagaggaaaacctcgcctatggacagactctggtggaactggtgcgcacccggcagaatcccggggaactgggttcgctggcgaccaccatgtcggtgggacgccggggcctcaaggagcgggtacggctcatcattgccgccccggtgacccggaagtcggcactggcagggctggtgctcatgctgggcattctggtgagctgtaccttcaccggaggcatgaacctcaccggcaccgaggcactggacgccctcaccgacagcattcagtatgaggacagcaaggtgtccttcaccattcccgagggatatgccccggcttccgactgggagatccgggtgtatggacgggctgccatgggcgacagctttatgagcgttcatctctttgaggaggagagcagcggtcatctctgggaggcgggcaagacctattccatcgaccttgccgaaacccagtatgatgagctgtggctggaggcgaccctcaagggcatcgaccagggggtagccaccgatctgctggaggaagccggcggcggccccaccgtgacagcgctgcccgagggattcaagctggtatcggccaccctgcccatgagccaggcggagtatgccccggcggtgccggaatttgagctgcggctggcggttcccgagagctgggaggtgagcacagccggcgcggaggacggccccatcaacaatctgggcgccgatctggtgttccgggacggggagaccctcatgggcgtgctgggctgcagcggatacgaagtctacgacggcgagatcgccccggaggacgagtacaagagcgtctattccagcctgcggctttccagttttgagatctgggacccctacacccccatccagaccctggactatggcgagaccggacgcatggaagtgcagtacaaggataccgcctgggcggaagcccatccggaggtatccaatgccggggtgccctcccttgaaaccaccggtctggtgagcttcaaccgggagctgggcgtgtatattgccctgcgcttcgagccgggggcggaaatttccgatgataccctcgacaccatcgcccgcacggtgcgtctctccccggcagacgccgacgaagcccagtgggactatggccccaccggcaagcggtacccgggcagtttctccgaccggtacgacttttcggacaccgtgatcctggacgccgatggcagcaatgtcaccgggattctgctggatctctggtactgtgccagcgccgcctatgatgtggacgacatggttctgttcccctggcaggacacgaccaccttttcggatggctcggtgtattatgacctccccgactatgaccgggtgatccacagcatcttcacaccggaggccatcgaagcctatgaggccagcgatgtggtgcggattcagaagaccgatgacggcagagtctggcggctgggcccctggaaaacaggctattcctatgccatggcgctgtcggggctgcaggccgtatcggtggaaccggaccgcatggtgatccgggcagcctatgagaccatggacggcggcatcgaccgggacgaggaccccacctatgtacccagctaccgtaccgtggatttcaccgtggaaaagacggacggcatctggtatgtggtggagtacacctatcccgaggaggcattccggcttgagcaggaggccgccgttgcggcggtggaagcagcgctggaacgcctgtatccgggcgcgtcggtggataccatcgcctatgagagcgacagcacagacggcgccggtcagaccatccggttccgggtggattactcggtggggaccaccggctatcagaataccctctggacagccacctgtcccggtgagggcgaagcctggcaggctgccgagaccccggcagagtgatcctcccctttcattccctattgccggagagcggcacggactgttcctccgcccgctttcccataaaaacgccccggaactgccacccccggcagccccggggcgttctgttttcccctttctccccggggcgctgtggaaaactcccgggcacagattccggcacgcccctgccccggaaaccccatgactgcgtgcccgggccccggactgctccggcttttccacattttccgccgccttctgtggaaaacccggcggtttgatgctacacttattatataaaggagggagtaccatgaaaccaaaacttctgcttctgaccctgcttctcgccctgaccctggcggcctgtaccccggcccgctcggagcccgagagcggcagcgaggcctctgccccgtcctcccaggcggaggaacagccctctgagccgtcttcatccggatcggagagccattccgaacccgctgccccggaggagagttccaccccggcctgggcagcggagggatttgccgagggcgtcacagcctatcgttccggggaactgagcggcgaagagtggcaggcgtttctggagagccagccggattttgtctggctgcggcagtatgacctctggcccttcgggtataaggagggacactatgagttcgatgcggactgggcctacctcaagttctccaccggggaggagctgcccgaacgcctgacccccgaagagctctggtcgaaccaggagcgcctgtgggagttcctggagcactgccgtaccggggaagcggatcatcttctctacggctctgccaaaaatccggtggtgctggacatcaccgagctgtggtttgatggggagcagctctggtaccggcgcaatcccgcctggagcggggagctgccctatcagacagatgacggggagcagttctccccgctgaccctgcatgaaaccgacaccgccgtggagctgctccgggagaacggcctggtgctggaacgcctcccccggtatggctatgagcgctgcatacccacccaggaggaggtactggcgctggcggaggacgccgagctgatccggtcggacgacggcccggagatccacgggattccgtgcgcccggtggacgctggtgcggtccggggacggaacggagctgttcacctgttatccggcccgggacgggagcgcctgcttcctgccaaacggcatggaccccgacgctattctactgctccgccccgcctcccccgcctgatcccctttctcagcgcaaaaaaaaacggacgctccgtatggagcgtccgtttttcgcgtatgccgtgcattcacacgggggtttctgaatctggaaagatgcccttactttacatactgaacatcgaggtcgttggggatctcgatcttatccagcttgccggagttcgcccaggcgatggagacggcaaacaggataacgaagccgatcttggcagcggtaggcagctcgatgatgagcgatgccgagaagatcgcggacaggattatgctgccgtagcccaggatcttgacggtaccttcggaaaccttcatctcagagcgggcaaaggcttcgggatacttcttgggcaggttcaggaatgcataggagaacatcagcttggagagcagggagat

SEQ ID NO: 3189 - DNA, 5148 bp, Unknown
  16S sequences of unknown bacteria
aagtccggggcggctcatctctgttcttttttatccggatatcttccggtcgagcctcacgagcatatacgcgagtatcgcggctgctctgccgacaccctccagccacacgcactcgtccggctgatggcagtcaccgtgcccggcgggaagggtgaacgggcgcgtatgccagtccgcggcggcgacgccgaaggcgtttttcagcagtctcgcgtgggtcgctccgctgttgacgttcggcttcgggtcgacagcgccggtgcactcgctgtacgcctcgaggagcgccttcaggtactcgttgtcgtcaccgatgaagaatcccttgtcgtcctcgacgatctccatgtcaaacccgaggctgtcgagcctttcctttatcttcgcgatgagatcggcggaatcgaacatcgtgccgaagcgcatgtcgtaggatacggcgggtctgccgtcgatgagcttcagcatacccgtggcggcggtggtcctgccgaacctcgggtcgttcccctcaacgccgagaccttcaccaaagctgccgagtatcgcgcggatatcggagaagagctttctgtcgttctccggcaggtcgtcgcagtgcaagagcgcgtcggtcagcgtgattatcgcgttcttcgagccctcggggagcgccgcgtgctttgaaatgccggtcgcgctgagggtcttgtggtcggaggacagcgtgaggtcgggatctgacggcgcgccgccgtgcgggaatatctcgctctcaaaggtcgcgtgggcgcttccggcgattatgttgaacgcgtcctttccgccgacaagctctgtcacagtctcaaactttccgcgcccgacagcccagaacctgataaagctcttctcaccgcgaaataccggataaccggcgtccgcgatgatcgacgccgacggcatcggctgttctctgacgaacctcttgataccgcccatgccgctctcctcgttgttttcggtgaccatcagaagtccggacgagaagggtatcccgaggtcgcgtatcgccatggcggcgagcagagagcagacaatccccgacttgtcgtcaagagcgccgcggctgatcatgaacccgtcgcggatcgccgccgaaaacggttcggcgagcatccagtcgtcatagaccggaacgacgtcggcgtgggcgaaaataccgatctgttttcccctcccgccggagtgcgcgagaaggtatccgctttcctgatgaatttcggtcgcgaagccgttctcctcgtagattttacgcgtctcctcaagagcctccgcgcactttttaccgtatggagcgccgggttccggagcggacctgactgacggtatcttcacgagacgtgtaagggtggatgttatgaaatcgcgcttttcagacatataagccgcgatcatttcaaaattctggttcattggtgtttctccttaatctgccgttgacaatattataccacataagccgctaaaacgcgagaggatccgcggattttatctgcaatccgcgaagctttccggcgtagactgcccctttttcatatctgccctcgaaaagcatccggagcgagctcgttataaggtcgtgatgcgcctcgcaggtgaaagcgtcgacgtatcccgcgaagttctcaggctgggacgatatgtccgcatactcagcctttaccgcgccgttcgcccactccgcgccgctcttctgcacgcaccagccgtcgaaatagtccgagagctcgcggcggtcggcgatgatagctgacaatctgtcgatatagtcgagcatatccccgcgctctttcccgcgaagaagctctattttgctgccgtccggctcaaagcggtacgggtgtatctcatatccgatctccgcgccaaacctcaggctgaccatatagccggtaaaccatccgggcgggacatcaggttcgtgcttgaagatgaagtttccgaggctgtagaatatcggctttccgtggcagatttcaattccctgcgggcagtgcgtgtgcatagcgacgaccgcgtcagcgccttgcatgataatcgagcggtatctgctctgacactgaggtgacggaatcggcgcgtgctcacagccgccgtggaaaactactgtgacatagtcggaatcggcttttgcggtctttatcgccccggcgagaagatactcgtcatacgctgccgttccgggtgtgtcctccccggcgagtccgaactcatgctcgcagaccgaaatgaccgacgcggatactccgtccttctcgaaccggtgagcccggtaagcctccatcagattttcacccgcaccgatatgcacgattctattcttgtcaagcagcgctccggtatatctcatcgcgtcggcgccgaagtccatagcgtggttgttcgccatgacggcgaggtcgaatcccgccgccctgaggaatccgacgttttcagggcggccggttatattcggtccggctttgcgtatcggcgcgtcaagttccttcggcgcgagcgggcactcgagattcacgacccggaaatccgcgcttctgagcagcggcagtatgtcagagaggatatcccccgacctctcctcgtcggcgtcgtgctggagcttgaagctggcgtctccgcagaaaatgatctccattattcctcagcctcgagattcttgatgagtttttctatgacgccgtttatctttccttcaagcttcgcgaaggtagaaacgacatttccctcgccggacgcgtagatgcccgctatcagcggattcgccacagtcccctcccacgcgatgtatccgaaatcaaagcacatggaatcaaggacgatatcgaacatttcctcagactcaatgtcctgagcgtactttcccttcatcatgacttccttgtatatcggaagaacgtcataatgaccggcaaagctgagagcctcaagtatcgcggaaacattttcgagcctctcctcaggaagcgtcttgagtatgaccatcatctcagccgcccacgtcggggaataatagcgttcctgatcggaatcatatttcgggcatggcacaaaaccgacattcacgttgtcgagctgtctgtacttcgtacccattccgttcgggtgtccgaggacatagagtacgttatgcttcgcgatttcaccattggcaagaacctcagcgtcagacttcgacgggttgttgtatatctctttatcgttgaaaaggtcaaaaatcctcagcatcttatcaatcgccgtctgattgtccggaagatcaaacaccggataaccattctcatcctgagatatgagagatattccggaaccgtttatatagcgggcatagatctccttccatgaagagccgataccgaactggtcctccttgtcgatctgcgcgttgccgttgagatccttgtatccgagcttcgcggttctcgcgagagtatcgagtgtccactcattgtcccttacatactcatacggcgtcttgtccgcgccgatcttgtcatagatattcttgtcgaagatgaatcctccggcgcgcgatatcggcgaaagtgagaacgaactcgtcgcggcgtactgtctgccgtcgaaattgaacaccttcgacgcctgcgggaaccaccagtccgccgtcagatcaacataaggaagatcattcaatggcctgagatacggtatcgaatcaactatgttgtaatccctcggaagccagagatcatattcggaatccccgctcatcaccgctttctgtatttccgtagttccgatctgaaatccgttgtgctcagtcacctcgatcgtacaattgaatcggtcttcaacgttacgatttcttttgtaaatggcctcattgagcacctctccgtcctgctccttgatatcgagagtgacgttagtccagtgcatctgcgcagggtcattgtgatacaccgaaaacacaaatccgtccatgtcgatatccggcacgccgtcggtcaggacttcttccgcggtcgtctctccgctggtcgtcgtgtcgcccgcggttgtgtcctgtgttttgtctccggaatcgcttccgcaggacatacttccggccaacataaggagcgcgaggatgaatgatattcttcttttcattgggttttctcctttgcatacagtaaaatttacaattgcattatagcatacacgcggcgtttgtgtaaatggacaaaacgctgaatctgcacaaaaaccaacataatactttcagtctcacttgacaaaatgccttgtttcgtatataataatcctgcgcgatgaaagaaatgtctttactatccttcaaaaaacaagttatctgccaaaggagttcaacatgcaaagcgcaacaaacggctctgagcttcgctcaacccactttctcgtcaccggcggcggaagcggcatcggcaaagccatagcaaaacggctgacagcgggcggcgcgacggtcgtcatagccggacgaacgccggaaaagctcatgaaagccgccggagagatcgactcagaccgtctcttcacaatgacgctcgacatcgccgactgtgagcgtattcccgaaaagctcaccgaggcggaggctctcgcgggcggactcgacggatttgtcaacgcggcggctctcggcgggaatcaggcgctcggacgcggttttgagccatgggacataacgccggacgaatgggacagactcaacgacataaacttcaagggcgcgtttttcatgatgcgcgacgagatagattttcttctctcccgcgggcgccccggaaacattctgaatatcgcctcgaacgcggcgtgcatgggagtcgtcggctcttacggcgcggcaaagaccgccgtgatacgctggacgcgctcgtttggaaaccgctacggaaagaacggcataatcataaacggcatagcgcccggagccacgctgaccgacatgatctcgaactacgcgaagtcggcggatcagccgtatccgcgccacgctctcggacgttttatccttcctgaggagatcgccgagctggcggcgtatctgctgagcaggtcgggcgagatcgtctgcgggcatacggtcgtcgcggacgcgggcgacagcggcgcggtctattgaccatgggctctcacaga

SEQ ID NO: 3190 - DNA, 1674 bp, Unknown
  16S sequences of unknown bacteria
gtgagcgatatccccaaaatgggtgacgagggcccggagtaaaggaaatcggagtcaacggctcacagtacggatattattacgtcgacggttcggccttcagaggtcttttgaatatgtcggtaacctttgcaggcagctttgacagttatctttcgcccgtcacacccgagcccgagacgataaattccggctcggcagcggccaccgccgccgaaaaggcaagagccgaaaagacatacggcgagatgataacaaatctcaaaaacttcccctccaaaatgaccataggggaggactcctacgtcggcttcggcagctccgacttcacccttaagtccaccgacgtcaccgaaaataaaatcacaaagagcataaacaccaccttcaccctcgagcacaagagcgggcttgaatttgagcttcgctgcgtctactatcccgattacgccgccttcgactgggtcatatatttcaccaataacggcaaggacaattctcccgccgtttctgacatcagccccgccgagcttacctttgagggcgacaatcccataattctttcaaacttcagcgacggaggtccctatgcccccttcgttcctcaggccatatatctcgaggacggatacagcagaaccttcgcaccccaaaacgggcgctccaccgaggccgcgttcccctattacaaccttgaatacggcaacaagggcgtctttgtggtgaccagctggtcgggaatatggcaggccgacatagcctaccgagacggaaagaccacctattccggacgtcagcagaccttcaactcctatttaaaacccggcgagaccgcaagaactccgctgaccgccgtaattctctatgacggccgcgacaccgaccgtgccgcaaacctttggagaaactggtttatggactgcaatatgtataaaaacgacggggaaaatcttcccgagccctttgttgcgggcgttacctcggcggtctataacgaaatgtccaaggcgaccgaccaaaatcagatcgacgccataagaaaatatctcgaaaacaatgtggatattaaggtttggtggatggacgcagattggtatgccaaggtcgacaaaaatcaaagcggattcccggtcggaaactgggtgcccgaccccgagcgtttcccctccaagtttaaggacataagcgactatgccaacgaaaacggcgttaaaacgctgctctggttcgagccggaacgcatttccataactaccaagcagtatgccgaaacccccgacaccgaataccgcgtcaagcccgagtggcttatcggctacggcgaggcgggaaatcagattgcctacggtatcgagggcaacgccttccagcttgaccttgggaacaaggaggcctttgactggcttgtggaccgagtgtcgaccattattaaagagggcggaatttccatctaccgcgaggaccttaacagcaattccatcgacgaaacctgggcagccgcaaactcggctcatcccgaccgctcgggaatgagcgaaaacggctgcgtcatgggacattatgcctattgggatatgctgcttgcccttgacgaggtggagatgatagactcctgcgcctcgggcggacaccgtctcgaccttgagaccatgcgccgcgccgtggctctccacc

SEQ ID NO: 3191 - DNA, 5380 bp, Unknown
  16S sequences of unknown bacteria
gatcagcgggccgtcggtcacatccgatatcgagctcgtgcgcgtcgagggcgtccacgggccgatgttcgtccactacgtcctcgtaggctaaacaggtacgcgataacgcggggggcgtgcaagccggcatcatgtcggcaagcgcgcccccctttttttgaaccgatacccacggcccctcgtgccaaagctgtcaggcgatgaccgcctgcattgccaggtgcttgttcgccgcgtagcgcatcgccgcgaggctgagcgcctcgagctgggcggcgtcttggccaatctgctcgagaagccgcgcgggctcgccgtgggacatcgtctccagcagctccatgacatcgtcttctgtcggctcgatgccgaaatgccgtgcccaggcgtcgagcgcgagcccctggttgaccatatccgccgcctgcatgcgaaccatgcggtcgtactgcgcgagcgtgacgtgctgctttgcgagcgcctcttcgagcgaagtccccgacgcttttgcctgggcggcagcctgcgccttcaacccctcagctgcggattcgtagacgcgagggttgcccacgccctgcacccgcttggaaagctcgattgccgcgagcgcccggatgtacgccgcgcgctcgccttcttcgcggggagtctttccctcctcaagcgtgacgaccaccgggtcgtaggacttcagctcaactgactcgtatgcgtcggacatcgtcgacctccactcgcgcgcccactgttttcgcatccaacgatacgggccccacggctccaagtaaaacaattcgtcctcatctatccatccttatttcatccttatatcaaccgaattcatcctctatttcatctattgagctgaatacgcaacctttttaggagcgcaagattgcggcaggtaaatcgccgcggcaccacaacgtccgcggcacctggaaaagggaggatcacccatgagcgagacggtttccatgaagggcgtgcccaacaacaccgttgacgaaaacggcatccgctggcgcaggacccgttgcttcatgtgccacatgaactgcggcatctggtgcggcgtggacaccaagaccggacgcctggtcgagatgcgccccaacgaggacgagggcagcgtcatatgcaatcgcctcggcgagaagggcgagaaggccatcaagttccactaccatccgaagcgcatcaaccaccccatgaagcgcatcggcgagaagggcgaggaccgctgggaggagatttcctgggagcaggcgatcgacgagatttccaccaagctgctcgccctgaaggagaaatacggcgcgaagactctgttctcctccgagggaacctaccgctccgaccacctgtgggcgcgcacgcgcttcttcaacctgttcggcaaccccggcaacgtcgtcgaccccggcaccatctgctggtgctggaactactcgctcaacatggccatggtcggctggcccgtcgaggccatcatgcccgtctcgccctacgcgaccggcacgatcgtcaactggggcaagcgctggtctgaggcatacgcccccgaaggcccgctgtggcgcaccatgcgcggccgcatcgacgtgaaccaagacgagccctcccagtacatcaacatcgacacgacctgcatcgacggctccgccactgccgacatctggctgcagccctaccccggcaccgactgcgccatttcgttcgcatggctcaacgtcatcttcgaggagaggctgtgggacgacaagtttgtccgctactggtccaacgcgccgttcctggtccgcaaggacacgggcaaactggtccgctgcgatgcctacaacggcggcaagcacgaggacttcatcgccgtgaacgaggaagacggctccatcgtcgactggtgctctgacgagaaccgctactacaccgacgcagaggtcatcccgcagctcgagggaagcgtcaccgtcaagatggccgacggctccgaggtcgagtgctggaccgcgttcgaggccatccgcgcgcgcttcgtcgactggacgcccgagcgcgcatccaagatctccaacgttcccgcccgcaagatccgcgaggcagcgcgcctgtacgcgaccaacggcccggcgttcatcggctggggcctcggcggcggcgaccagcacggcatcaacgcctcgcagttcggcatcgccaagaccatggcgcgtatcctgaccggcaacatcgacaaccccggcggcgagtacgtcggccagccggcagacccggacgacaaggaaaagctgttccccgtgcgtgactccgagctcgagctcgccgacgtcctcacgccggagatccagaaggactacatcggcaacgaggacttccgcgtcatgtcctggcctggcttcaaggccatcgacaagtgctaccgcaagatgttcggcctcaaccgcccgatgatgcaccagatgctgtgcagcccgtcgctcatgtggaaggccatcctcgagaaggacccgtacccggtgaccgcctgcatctgctggtcttcgaacccgctcgcatgggcgcccaacaccaagcgcgtctacaaagccctgaaggcgctcgagcttctggtcgtcgtcgactactggaagaccccgaccgcagcgctcgccgactacatcatccccgcggcagactggatggagcgtccctgctgcaccacgtccgaagactccaacgacttcatcgtcaccggcgaccgcggtgtcgagcctctgtacgaccgccacatggacttcgacttcttccgcgcgctcggcatcgcatgcggtcaggaggaatactggccgtgggagacctacgaggacctgatcgagtaccgtcttgagcgcgtgcccaatatggaccgcgagaaggcaacgaacatgggcaccttcttcccgtatggcaccgacttctacaagtacggcaagcccctggcaaacggccagctgcgcgggttcgccacgccgtcgcgcaaggccgagatctactcctccgtcctcgaggagctcggctacgacccgattccgacctacaccgagcccgagacgcccctcggcaaccccgagctcgccaaggagtacccgctgcgtctcacgacctctggtcgcgtgagcccgctgtaccactccgagatgcgtacgcccggccatggcacccgctccgtcgtgccctaccccatgacctggatgcacatcaacgatgcgcgcaagctgcacatccgcgagggggactggatctggatcgagacccgcatgggccgtatccgccagcgcgcgcacgtcggctgggatgtccccgagggcatggtccaggtaccgcacggctggtggttccccgagctccccgccgaggagccgtggagccagggcgtgttcgagagcaacgcgaacgtgctcgtcgacgacgacccggcgctcgccgacaagatgacggcgacctggaacgcacgcggcctgctgtgcaaggtgtacccgtgcatcgacccgaccgaccagtccgatgagaacgtgccgatcgagcactacgacaaccccgacgtcgagacggtttgggaccgcgcctacaaggaactcggctgctgggagctgaacggcaagtaagcgtctcgaacatgtccggcattccgcccgccacacgggaggatatgccaccttggaggggctgcacgacgcagcccctccattccgtgcaacagcgtgagcgaggaggggcaatggtatacggaccgcccgcggggttctaccgcaacaaggccgtggtgaaggtctaccgcgagttttgcacgggttgcatgacctgcgtcgagaactgcccgcaggcaaagggcaccgtcttgcgccccgcccgcgacggaaaagggctccacgcagaggtcgtcgacccctacgcatgtcggggctgcggtctgtgtcacatgaactgccctacacatgccatcggcgtgacgctcatctgatgcccctcacgccgcacatctaacgattttgctaccatgctcgcaagacgacggcaggggggatgccaatggcagaacacatcgcgcacgacaaactcgcattgccgcaggtgccgctcgtcgccaagtcgattccgcccagcttggacgggtttgaatcgcttcccgagcgtctcgagcgtcttatcgaccaggcgcgctaccgtaagatcacgttcgtcaacgccccggaaggctacggcaaaaccgcagtgctctccagctggttttcgagtctgcgcgcagaggggctgcccgccgtctggttcgcatgtgacgagaacgattcgaacgcggactacttctggatgaacttctccttcgcggtgtgcagcgccttcgagggcacgcaggtgccgggctacgacgagctcgcggcacaaccggccgcgcaggccgcctaccttttggcaaatgccctctgcctgacagccgtcgagcgcggaggggtctacctcatcatggaacgtgccgacctgctcgaatccgaggagagccgcgccatcctctcgctactcatctcctcgctgtcagacgacgtgcacctggtgctcaacgcgcgcctgtgcagctacgtgctcgaccaggacgacgcggcgcacatcctcgacgagctgctcgagctcaacatatttctcgaggcgatcgatgcgagcgggcagcgcttcgtacgccacccgctgttcacacgctggttgctcgaggcgaagggctcccagctgcccgtcgtcgagcgcaggcacctcaacggccgcgcagcacactgggccctgcggcatggcatggacgtcgccgcggcaaagcaccagatcatggcgagcgagcacgaggacatcttcgagctggcggcctgcgcgttcccgcacatgcaggcagacgaaatcgccaatctgacgctgtttcccgagatgcccgacgtcgagacgctcgatccctgcttcatgatgatggcggcatgggcgtactcgtacgcggccgacgtcttcaacatgacgcgctgggcgcagcggatgcgcgcgcggcatctcgacgagaaaagcgaggaggtgcggctgtcgcttgcggtcctggacgtgaaggggctgtgcctgcagtgcagcttcgacgagggactcgaaaaggcatccgaggtcgcaccgctcctgaagggcaacgagcatctgccgttgaggatcctgctcgccaactgccgcgccgaggcatacgaccaccaggggcaatccgacttggggatgaaggagcacaaggcgttcgcggtgctcgcgggcacggggtcgtttgccttcctcaacgccatcaaccaatacgagatggcgtattcccagttcgagcatggtcacctctctgcggcagcgc

SEQ ID NO: 3192 - DNA, 2570 bp, Unknown
  16S sequences of unknown bacteria
ggccgagctcgagcgcttcgcgcccggcctcaaggcgtgcgcggtggtggggagcaaggcgcggcggagggacgtcatcgcggcagcaggcagcttcgacgtgctcgtcacctcgtacgactacgtcaggcgcgacatcgaccagctcgcctgcctctcgttcgggaccgtcgtgctcgacgaggcgcactacatcaagaacgcgaagacgcaagcagcgcgcagcgtcaagcggctctttgccaagacccgcttcgcgctcacgggcacgcccgtggaaaaccgcctctccgacctgtggagcatcttcgactttctcatgccgggcgtgctcggcacgcaaaaggagttcgcacgccgcttctccacgcccattggcaacggcgacgaggcggcggcgaagcgcctgcagagcctggtcggccccttcatcttgcgccgcctgaaaggcgacgtgctcggcgacctgcccgagaaaaacgagaacgtcgtctacgcggagatggccggcgaacaggacaagctgtaccgggcgagcgcgagcaagctcgcgcgcagcatcgccaagcagctgcccgaggattttgcgggatcaaagctgcaggtcctcgcggagctctcgaaactgcgcgagctgtgctgcgacccgagcctgctctacgacaactacacgggcggctccgccaagctcgacacctgcatggagcttatctcgactgcactcgaggcagaccactcggtgctactgttctcgcagttcacgagcatgctcgacctcatcgcagcgcgcctcgccagcgatggcgtggcctaccagatgctcacgggctcgacgagcaaggaagagcgcatgcggctcgtcaagcgcttccaggaaggcgcggtgccggtctttctcatctcgctcaaggccggcggcgtgggcctcaacctcacggccgccgacatcgtcatccactacgacccctggtggaacgtcgcggcggaaaaccaggcgaccgaccgtgcacaccgcatcgggcagacgcgcacggtcaccgtcttcaagctcatcgtcaaggacacgatcgaagagggcatcctggcgctgcagcagcgtaagcgcgagctcgcggattccgtggtgggcggcgaggcgctcggttccacgaccatcacgcgcgacgacgtgctcgcgctgctcgacgcggggcgctagcagtcgcgccgggcgtcgtcccctcagcttatgcggtatttgagaatggcgtcggcgagctcggagagcgtgtggatgtcgttccacacgccgtcgggaaccttcgagccgtattcggcctcgagggtggtgagcacgtagatgaaaccgagcgagtcgaccccgccctccaagtcgagcggcgtgtcggggccgatctgctcggggtgctcgacctcggtctcgacctgctctgcgatgatctgctttgcgcgcgccattatctgctctttctcgggcatcgcgcagcctcctttgtaatcttccaacgttggatatcgccgcccgccgtacgcggcagcggatgccccagctcgacggcgcgtgcgatgtgggcatcgcggccttcggacaggcgcatgccgcgcagcttgcgcgtgagctccccgacgttccagccatgctccttgcctgcaggcgagaactccccgcaaacgagcacgggcgagccttcgagaacgacgatggcgaggtcgtcttggccgagctcctcccgaagacgctgctcgcagctggggaggtgcagcttgatgcccgagtcgagcacgaccacgtcgcgtccgcgccccctcacgtgcagaaaccccgcttcgtcgatgaagccgacgtctcccgtgtggaacactcccccctcgagcgcgcggcgcgtgtcctcgggcctgccgtagtagccctgcatctggcaggtcggcgcgctcacgagcagctcccccgcggcagagacctccaccgtgcattcggggcacaccgtgagcgcttccgtatcctctcccaaagaaagcgccacgcccgagctcgtctcggtgagcccgtagccgcagtgcacctcgagccctgcgctgcgcgccagctccacgagctctggcggacagggagcggcgcccgtgagcacgaggcgcagctcggggttgagcaggtgatggcgcagaaagaagcgcagcagcgcgggcacgagcggcatgaccgtcgggcgaaaggtccgggcatcgtcgagcagatgcctcttgccgcgccccagcgcgatgcgcgcaccgcaggaaagcccccacagcaccccgcagacaaagccgaacacatgcgagagcggcagcacgtccagcacgcagtcgtcctcgccgagcggcagcagcgccgagccgttgtacgcgcttgccatcaagctggtatccgtcagcgcaaccggctttgcacgagacgtcgtcccgctcgtgaagaacaggatgcggccgaatccgggccgctcgatgcgctcgtcatcgccgcgcagggcctcgcgcaccccacctgcggcacgcgaggaaggccagacggcatcggcatcgcccgccgcgac

SEQ ID NO: 3193 - DNA, 32759 bp, Unknown
  16S sequences of unknown bacteria
caaagattgtggaatggtgggaaaaaaagagggcaaagagaacgaaaaatgttctacaatgcccgatgtgttaataaagggctataagatactcaggacagtaagtgttggtcaagacttttcgggtcaacaccaaaggttcgctcttcgtcaaactcagtgggatgaggaagaaagaggggataagagaagaaggaaaacgattagaaaaagagagaggcaaagaggataagaaatatcgggtcaacaccaaaggttgtggaataggttgattttttagatttgtctttcatagattcaccccgcataaataaaggctttccgggtggaaagcctttgttttaaagaagtacctgaccagggactcgaaccctgaaccaattgattaagagtcaactgctctaccgattgagctagtcaggcataaatattattctatacaacgtatttttttgcccactctatgcaagaaaaaaatgaacttttttcactaaaatagcaaaaatcgaatgtcgggtatttttatttatgcattttttatctattcggcacacacttgcgaataattaccgctacgcatagttggcatgcgccggtgtcatattttttacagatgccgccgcattccgactattttccatttggtgttgcatggcaaggcccaaaatatataaacttgcgttaattttttattccctttactcctatacgcatgaaacagtacctcgatctgctgaaattcgttctcgaaaacggagaggaacgctccgacagaacgggcgtgggcacaataggcgtcttcggagcccagacgcgcttcgacttgcgcacttcattcccgctgcttactacaaaaaaactccatacgcgctcgataatctacgaactcttatggttcctgaaaggcgatacgaatattaagtatttaaacgacaaccgcgtcacaatctgggacgaatgggcagacgaaaacggtgatctcggccgcatatacggcgcccaatggactgattggcgaacaccggacgggcggagcgtaaaccagatagacaagctcatcgacggcttgaaaaaagatccgttcgggcgcaggcatatcgtgagcgcatggaatccgggagaactcgacaaaatggcgctgccgccgtgccatgcgctcttccaattccatgtaaacgccgcgggcgagctcagatgccaactttaccagcgcagcgccgatttattcctcggagtgccgttcaacatagcttcatacgcaatgcttacaatgatggtggcgcaggtctgcggatacaaaccgcgcgaatttatccataccttcggagacttgcacatatataagaaccacctcgaacaggtaaagacccagctctcgcgcgagccccgcaagttgcctgttctgcatctcaaccccgcgcgcaaaaatatccgcgacttcgtctttgaagacttcgtattcgagggatacgatccacacccgtccataaaagccccgattgcagtatgagaaattttaaggcaatagcggcagtcgcagaaaacggggtgataggcagggggcttgaaatcccgtggagaataccggaggactttcgccatttcaaacggacaaccatgggcggcgtattattgatgggtcggcgaacttgggaaagcctcggcgcaaaacccctgccgggacgtgaaaacgcggtgctcacatcgcgcccggagctcgtaaaaggcgcgcgcgcgttcgcttctttggaagaggcggcttcagcctatcgcggcgaccctcgcacagtctggatttgcggcggggctgccctgtacaaggccgctttgccggaatgctcggagctcattctcagccgggttaaaatgtcgccgcagggcgacgtatttttccccgacttcgccgacctgtttgagaaaaaagaaattattttagaaaatgagctttttgacgttattaggtatataagaaagtaaaaattctccgaatatgccgtcggagggtatttttgcgtgcaataaataaacagactatatcgatggaatttttgatcttaataatagtaccaataatagtggggatttgggcgcaagcgcgcgtatccggcgcgtattcgcactattcaaaaatagcgtcggcatccggacttacggggcgcgacgccgcggcggcagtaatgcgctcggcggggatttccgacgtcgatatcgttcccatagacggaacgctcacagaccactacgatccttcgagaaaagttctcgcgttaagccgcgacaatttctacggaacgagcattgcggcgctcggagtcgccgcgcacgaggctgggcatgccatacagcataaggttggatatgcgcctctgaatttgcgaatggcgcttgtgccgattacaaattttgcatgccagcttttgccgattgtaatgattggcggatttttcctattccacagcgttgcaacactctatgtgggcgttgcgatataccttgttcttacggtgtttcagctcgtgacgctgccggttgaatttaacgcctcgacccgcgcgaaagagagcctaagaaagctcggaattatcggcggaggggagtcggagggcgttgaaagcgtcttggacgcggccgcttttacgtacgttgcggcttttgtgtcgtcgttgggatggcttttgtatatgctcgcccgcgcaaattcgtcgcgcgaataaagcgctcggaaatattcgtacaacggacactttaaagccgccttaacaggcggtttttttgtcgcggcatgcggcggcgattttttagttgccattttttagtgcggatacgtttaaaatcgcggcgttgagttatgtttgattccaaagcgcgctgatttttttgcgttttttttttaactgttaaaaaaaatataccattgttttgcttgcgacttgcagcgcaggatttatttctttttacaggaaagaataaggatttgttatgaaaaagattcccttcaccatagcaatgttttgcgcggcttcactgtttgcgcaggacaattataagaattattactggataggtcaatatgaaggaactatgaccgcccttacgagttggagcgaagatgagaccggatacgacaatcccgtcactgttgcgcctgatgaaaacactatttttaatgttaacaaagataataagccaacccaagggcagttgtcaaatccggcgcgtttgcaggggaacactacgaaagcgtttcgctcactaatctcgacggtaaatacggaaattcacgtattgaacactatgaattttaccggcgactatattagccgggtagattccgactatatgtacgacggcaagtcggttaagcagttgaggtttgccaacgacaattccgcctcgacatttaaatttctgaatgtcggcggggacatgatactctcaacgtctaaataccacgcgacgcgcgtaagctttgtaaagggaaacacaatgcagatggacgtggccggcgccctaaaatttgaatataccggcgaagcgtctgcaggcggataccacgcatttgatatgcgcgacaacaactcaagtacgggatccaactttttggcaaatttgggcgggctctcatcgagtggcaaaggcgtgcttatgaccgccagcaaaaatgtcgttgcggacttcgtcttccaaaactccgccgacggaacttttaagggcggcgattttaagggagtgtttgcagacttctccacttccagctcgacggtcaactttaccatgaatggcgacgggcgccaatccgtgagcatttacaaggcggcaaacggggcttcaattggcatatcgggggttgctgaaaagagcgacatgcaaatcgacaacgtaaacgtcaccaaaggagaattcatattaaacagcgagcttgcaataaatacggtttcccttgacggcggcagcttgaagctcacaacctctgaaaaggtcgggacgctgtcgattggcggaggagagctcgtttacggcggcacgatatttgcggataagctgtcggtatcggcggctgatgcggttaaggttgtgttctcttcagaggacttggcttcgcacgatatcatagttgtcgattttgaacatctgtccggcgatttcgatgctaattcggcactcgtggcattcgacgaaaacggcaacgagcttggcggtgagttcattctaaacggttcagtcggagaaggtggaactctcgtttacagtgttccggaaccttgtgttactgcagcacttctgggcatgatagcattggcaacggcaattgcacgccgcaaaaaaagctaaattttttatgaagaaaatatcaatattactcttagtatcaatcattgcaatatttggctgcagtgaggacgtatctaccaataatagcaatggcaaggcaaagtctcttgaagattcaaagttaaatgccgttgaaaatacgccgaaaaactcggatgccgccgcgcccgttaagggagtcagtaagctgaatgtattgttggatgaagattttgaaggggatacttcaaaattcacaaaattggtggggaaggggattgctttaaaatttgtttccggagatgaggcgatttccgggaaaaaatcgctgtgcctcgactcaatgggttcgactaatgaatggattcttgcggcagagctcaacaaaagcatgaggtttaagcccggaaatgtgtatgttgtggagtttaagtacaatctcctaaaatccttaaatcaatcttcggataattacgtctcgatggttggcgacaagggcgaattctatggacggtatatcttcgcctcggcgcccgggcaaaaaggaaatgaaaaattgtattttatgataccttccgactccaatggcgcggcgtttagattctcctcccgatggggttgcaagacaataatagacgacttaaaaattacgcatgccgagggtataaatgccgactcatggataactaagtccgacgcgtttattggaatgcgcaagacccccataaaccaaaatatgtttgatatcaaaaacccatcatactacctcccgaaggacaaatacttcccgatggtggacgagcttgggcaattcaagcatgtagaatgggaaggaaaggcgcgctcggtcgaagacttaaaaaaacaaatagaggaagaaaaccgctataatgaatcgagacccgatatcgccggaagggacgagttcggcggacttgcaaattcggcctcaggtgcgccgaaaactccgggattcacaacggcgaaggtcggcggcaaatggtacttccgcgatcccgacggaaacttgttctggtccattggggtgacgtgcgttggcgcttttgaatcaaccccaattacagacagggaattttattttgaaaaaatagatcccgcgtatgtgtcaaaatcgcgcggattcaagccggggacgacataccataaccgcgaaattaagacatacgcgctcggtcgcaggaatatcgagctcaaatacggcaaagacggagtcgccaactattggaaaatagcggcgaagcgtttaaagaaatgggggctgaatacgattggagcgtggtcgtcggctacggtgatgaaatcgaacactgttccatttaccgtctatatacagagtgccggaactgtaccgcttaatacaaaacgcaagctttttgccctatggggaaatatgcaggattattttgctccgacatttgccgagaaaactgccgaaagggtaaaaaaatattccggtctgctaaatttgaaatactgcataggcgcatttgtagataacgagatttcatggcagcgtaaaatgggcgtgacagctctcgccgttttatcttgccctgcgacgcagcccgccaagattgaaatgcaaaagatgctggcaaaaaagtacggaactgttgcggaattgaacaaagtttggaaaagcaattattctggctggagcgatttcctggcgcgcacggactttgagccaaagatggaaaacgcaaaagacgatttgctcgcctttgaaaaactctttttggaacactactttaaagtgtgcagagacgccgtaaaggcggcgtgccccaaggctctttacttgggctgccgctttatgacagtagagaacgaactgaccgcgcgcgctgcgtatgatatatgcgacgttgtaagctgcaacatataccgctcggacgtgtcgttctacgctcctccgcccggggcaaaagacaagccaatgattatcggagaattccatatcggaaggatagacaagggctctccgtacggaggtttgcttgaagtccccaacgccaaagaggcggctgaggcttacaagaaatatatgatttccgcgatagaaaatccgaatatcgtgggcgcgcactggttccaatggcaggatatgttcattaccggccgcggggacggcgcgaatgccacatgcggatttgtaagcgtgaccgacaatccggattacgcgctcgccgacgcctgccgcgaggtagcctccgagctttacaaaatccgcgcccaggcaaaatagcgcgaatcatgcaaggggaaacagcctaaggagtctaagtgaagaaagggggcttccgcttgcgaagtagcgaagccctactcgaagttgacatgcccagactggattcctatctaatcggcgccaaccagccgcgccgcaccgtatttcctactcgaagtcgagatacccagactgtatccctcttgtagtgcaccccattaaatcaatgtaaaacttggagaatattttggttatttagttgatggttgaatgtataatttttttcgtattgttcgggtgtttgatatcctattgctgaatgcggaaaatcttcgttatacgactttatccatttcgttaaagtttcgtctagttcagcgtaggtttcaaattctcgtggccatattaggtcttcttttagtgtcctaaaaaatcgttctgtatctgcgttacctttgggattacagaacgatgtaaatatctgttttactccgagtaccgagcatgccgccataaacgccgatgatgtgggttgacaaccgttatcgcttacaatcataagtggttcgtattctctgatcccaagcggaaactgtttgtttatgcccatctcaagcgcgtttagccagtcgcgtgtctttgatgtcaatgacaagctgcaacctacaatctttttactcgcccaatccttgaccgcaacaaagtagcaccagccgcaactctttacccgtatctttgtcatatctattccccataacttgtttggcactgtacatttaggctttggtcgttccgtccgtatcgcccttaacttgcgcgtgtttattgccaacaacttatgctcttttaatatcctgtaaatacgacgtttacttacgggtatttgctctcgatattttagatatgcctaaattcttcgatatccccaagcaggatgcccggcttttatcggctggataattgcaagcatcgcttcgtctctgagttgcgcagattcgctacgtttacggttcatagaaagctcgctatgtcgtcttccgttttttttagctcgattgtgaggtcgcctatcatcttgcgaagacgcaagttttcctgacgtaaacgctcttcattcgcgcttactccgacgtattcaaaggctttttccccctcctttaacagacggtcgcgccacttgtaatattgagcttggctaacgccgtttcggacgcaaagttcccctaggggaacttgtccctttatcccttcaagcacaatccttagcgtttccttcgatgtccatttcttctgattcattgagtccctttcctatcataaatactctcaaagttgaactcttttcttaaaggagtgcagtatactctcccttgcaaacttgcgccacgcccgaaaaaacgcctcgaagatttgaggcgtttttttgtgcaattaagtttgcgcgtatattatctacgcagcggtatgcacttttgcggagtgcgaaaaaaaaaacggggcggaaaattttccgccccgagtgtgcgcgttggcaagccaacgcctaacggcagttaaattttcattatttttacaacgtcttctggcgttatgtcggcgttctcaccaagtctatcgtagttctttgcgatatttttgccgattgcttccggagcgtcagcgggcagcttgtatgatttcagctcaactcccgcgcccattttcacaaagaactttttcatcgcaagaattgtggcgtcggccgcctttgatttgctcttttcgtttatgccaaatacccgcttgccgagctgcacgagcttgtcgagcttttgcgcctttttatattcgagaacttttggcatgacgattgcgagcgtttcagcatggtcgagcccgtacaaagctgtgagttcgtgccctatcaggtgcgaagaccagtcttgcggaactccgcagcatatcaagtggtttagagccattgtggcggcaaacattatgtttgcgcggcagtcgtaatcttccggcttttttaacgcgatgggaccctctttgacaagtgtctgcgctatcgattcggaaaacctgtcctgaatctcggcgttcgcgggtcttgtgaggtattgctccattacgtgtacaaacgcgtcgattactccgttgcgcgtctggcgcgcgggtagcgtaaatgtgaaggtcgggtcgagcaccgagaactgaggaaaaactttttcagaggcgaaggaaagtttcttgcatatttccctgcggctgacgactgcgttcatgttcatttccgaacccgtcgcaggcagcgttaaaacggtgccgaagggcagggcttctttcacgggcaaatctttttcaagaatgtcccacgggtctttccccttgtagagcgccgcggcggatatgaatttgcacgcgtctatgacggagccgccgccgagtgctattataaaatcgatttttttgtcttttatgagctttacggccttcatgcatgtcgcgtattcgggattgggttctatccctgaaaattcgataaatttgcgcttgccgatagccgcgactgtctggtcatacgagccgtttttctttacggagccgcccccgtaaaggagcagaattttagcttttgcggggatgagcccagacatctttgatgtcatgcccttcccaaagagaatttttacgggattttgaaatatgaagttttgcataatatataatttcattagtattttcccattgtgtcaacattcaaaaattagcggaaaattgtcgggagcggggaaaaaaggctttacatttgtaaaatcagtgttaaggtagtttctaaattatccccattatgaatatgaagaaaatcaccatcatcacagtgtctctcctgcttgcaggcgcctcagcattcgcgtggagcaagaagagcgatagtcttggcaatctcggacgcacttatgtcagcatttcgggcgccgtaaacgtatcaaaatataagtcaagcggcgtcaccgacagcccgactggcgcacagggctcggcagtgataaacgccccgatacttaaacccggcatcaacgccttccgcgacatcaaatgggcgggcctcgacggtaatatatttttcaattacaattatagcggcgaaatcggcagcgtagattccgctaagctttcaaattacaacgtcggtgcgcagttgaccccgtacctgaactttgaaacaggccttcctttccttaaagcaataaaaccctttggcttcggctttgccggatacgaatggattgacgttgacactaacgttgcttccgcaaacgacaattactttatttacggcgttggcgcgggcgtagaattggttctcctcgacgaaatctccgtcacaccctactggaagtggaatgcgaatgctctggacgatatgccctgctaccacgaagccggcatcgaagcttcttactgggtcacagaccagttctgcgtttccgttttctggtcgcataactttggctgggatgatggcgataccgaactcaaacatggcgacataatcggcgccaagttcaagatcggtttcctccgctaatacgaattttaaatctaaaaaccgccaagaatctcttggcggttttttttgtctatttacttccgtcggatggcatgagtattactttttgggaggcactttttgatacctcaaacaaagcatatttgaatggaataaaaaaatcataaaaaaacttcaatcgcacggcaaacggtaaaatttttttgagattttcccatatcgcaacacagggctttttatatcgcaatatgtgatttccacccgcgcaaatggcgcacttgccaagtgcagtccgaatgctgttttggaattataatttttctcccactcagcgcgtatatggtctgaatgctaaaataaacgcgcaggaaaggtattttttgccaattagataaatcaaagggctgccttaaaaattcaaaaaaatacgcagaatttttttaactctgacaatcatcgcctgtgaaatatcaaaaacttcaaaagtatttttgcgttttttcgggatattgaatagaatcgggcattatggaaattgaaaacgcccgattcatcggtgcgggactcatggttttaacttcgcttcttggagcgtattatctcgtattgaaaatacgcgaattgcactcggaaaaacctgatcccaaactgacgtatgtcacatattcgcacatggaaaaagtccgcgccgaaataatgcactgcatatccgacgccgtgcaagatttgcgcagcctccgctcggagattcgcgaggaaacgcgctccatgcaaaaacaatactcgcgcagcctcgacgaagcgcgcgagctaatcagccgcaattcccaaaacataagctctctcgtcgcccaagcccagattgccaaccagcgcatagcggaattgagcgtcaagacggacaggctcttcatgaaggttaggggggacgaataaaatgtccgacgaatttttaatgctcaggcgcgccgttttattacagctcgacgccgtatttcccgcaggccttcctccggcgacaattctcgaaggactgcgccttgctggattcgattgcggattgaacgacgtgcagcggaacttggagtaccttaggcaaaaggggctcgtggaaatacggccgtcgcgcataagcgcgtcgagcgtgagggcaagcctcacttcggagggtgaagaatatttggagtcgggggaattttaaatgtgtgctgcaaggaaaaataattctttagaagaatccgacgattcagcaaagcagcctgcgaaaaaaagaaaaccgcgcgccgccacgaaagaggcaaagcttgcttccgcctccaaaaaaagtctgaaaaaaaacgccgcgccagaaactgaagattatgaaagcgaggcggcgccttacgccggcaaaacagaaaaattttttggcgaagaatccgcgaatgtaaaaagcgaaaaaatttgcggcaatgacggagctaatgcgtcaggcgagaatgaaggtgccgcaaaaaatccgctctacaaggatacggagtttttcccttcggacggctttaaaaggcatatagcgcgcattaaagccgcaaaagcgcgggcggacgaaatcgcggaagatggcatgtgcctcgacgcgtcggaggcgtctgtcgcgctcatgtgggaaattgtgttcgaccgcctttgcaaagccgaaagcgccggcatatcggaagtcgggacgcttgcaggcatacttcaaaagctgttttctgccgattcaaaacgcagacccgataaggcgaaatcccccggggacggcgttgtaagcgaagaaactatgcgcaaaatagaggaaaaattaaagctgttgtagatgaaggccgactcattttttcttccttaccagcgggcttggatagaagacaaatcccgcataaaaataatggagaagtcccggcaaataggaatgagctggaccgccgcctattcgcttgtgagggaacattcaatttcgggaaagcggctcgactcctgggtgtgctcgcgcgacgaaatgcaggcgcgactatttctttccgactgctcaaaattcgccgatataataggagctgccatagccgattgcagcgcagtcgaagtagtcggcgaaagcgccgcaaattacatcggttttttcaacggaacgcggatatggtcgctctcctcaaacgcggacgcacaggcgggaaagaggggcacgagggttctcgacgaatttgccctccaccccgagcccgagcggctgtactcgatagcgtatccggggataacttggggcggaagaatggagattatctcgacccacaggggctcgggcaatttttttaaaaagcttgttgacgaggcgcggtacggcggaaatcccaagaaggcttcgctgcacagggtgacgcttcaggacgcgctcgaccagggttttttaaaaaaacttaaatcggcgctccctgagggccatgaagtcagggatatggacgaaggcgcgtattttgattatgtgaaaaattcctgcgccgacacggagagttttttgcaggaatacatgtgcactccggctgacgactccgccggttttgtggggtacgactgcatatcgcgctgttgctataagccggaagacggggattggaggcgccctgcgggaaagatgaaccctttgtttttgggggtcgatgtggggcgaagccgcgacttgtccgtgttttggctgttggagagcgtgggcgatattttatatacgcgggaggtgtccgtaatgtcggacgttccgttttcgcagcaggaggccgaattgcacagatttttgcgccttccgaacctcaggtgcgtgcgaatagaccaaagcggactgggacgccagtttgccgagcgggctgtcgagcggtatggaagcgcgcgggtgggcggagtgacgtttacggcaggcgttaaagaggcgcttgcatatccgttaagggcgagatttgaagacgccaagataagaatacccgacgatatagaaattattgccgatatacgcagtgtcagaaaagaagttggcgcgggcggaacgcttaggttttgcgccgagaggactgtcgatgggcatgccgacagattttgggcgcttgcattggctgttaaagctgccgacgaggcaacgtcaggcgcgggaatggaacttgtagaaaaaagcggggcaaatttcatttggtgacggaattttaaggcgttttttatggaaaaatttttcgtaagttgcatgggaattttttcgtaaaaatcaatctgtcccttttcttaaaagcgttcaggcgttttcggggcaaaaaatatttttatatttttgttgactgtgccgtaaaaaattctaacttggtctttgaaatatgagggcgaggtaacggttcatttgaaataggatatttccctaacaaaaatatgataagttgtatcgcaccttagttttctacttccagaatactccggtgtagattttactctaacaaccaataaaataacaaatatgaataaagcagaactcattcttgaaatccagaaacttctcggcaaggacgccacgaaggcttgcgccgaaaaagctctcaatgttgttctcgccgcgataaaggccggcgttaagaagaacaagaagcttcagcttatcggattcggcacattctctgttgctgaacgcaaggctcgcatgggcatcaatccccgcacgaaggccaagataaagattaaggcttcgaaggttgttaagtttaagcccggagccgactttaaagtctccaagtaatcggctaatccgaggcggttttttcggcgcatggtttcgggcgttttttagcgcggcgaaatttgcgcgggatattttgaaccgccgtgtaaggccacggaaaaaggcggattttacatccgccttttttattttattaaacatttattgccaaacttattaaatgtttattgccacagttgcggtttacttaaaaaatccgttggaaaatggaaagcgggctttcatcaatcttacactacctttaaatataaagtaaaatagcttcgccttctataaaagctcgaggatatatggccaatctagagcgtaatatccggggcagaaaagaattttgcgacatttatgtgagaattgtcttgcgcctttccgcttgacttctaattatatgatgtaacaatcctccttttttaaaatttaaatagagccaagagcaaagaaatcagagacgtttagatgaaacagcgcacaatattacgcgaggtgtcaatcaacggtacggcgttgcattcggctgcatccgtcacgctgacgctcaaacccgctcccgtaaacacgggaatagtctttaagcgcaaggatattttcggcaagcccgaaataaagccgcatattacacaaatatcgtcggaccttgtccgcaacaccggggtgacatcggggcacacaaaactgcataccatagagcacgttttaagcgccctaaacggaatggatatcgacaactgcatagtcgaaatggacgctgctgaaccgcctattctcgacggatctgccaagttctttgtaaacctaatccagcaggcggaaccggtcgaacaggacgcagagcgccaagttttcagccttcgcgagccggtctcggtctccgagggcaaccgctcgctgattgcgctcccatacgacggacttaaaataacatgcacatccgccgacgaccgcggcatacacacacagcacctttcgatagaaatcgaccccgaaacataccaggcggcaatcgcccccgcaagaacctttaccgtttacgaggacatagaggaactccttaaaatggggaaaattcagggcggaagcctcgattcggcgattgtcataaagggcgacaagataatatcgaaagagcccttgcgctaccacgacgaattcgtgcgccacaagattctcgacatcataggcgatattgcgctactgggcgtaaagctgaacgcgcatatagtcgccgtaaggccggggcacgcgctcaacgcaaagctgaccgacaaaatttacaagcagttcgaggctgccaaaaattctcccaaaaaagcagcctctcccgcgaagcaaaacgtaaagctctttacggagacgactctcgacacgcgcaggatacttgaactcctgccgcaccgctatccgttcgtgctaatagaccgcgttgttgaaacgcgcggagacgccgagttgacggcaataaagaatgtgacgataaacgagcctttctttatggggcacttcccgggaaatccggttatgccgggtgtattgcagcttgaagctatggcgcaggccgccggaataatgatgttaaggcatgtcagcagcgaggacaagctcgcctactttatgagcgccgacaaggttaaattccgcaaagctatcaagcccggagaccaagtgcaaatcgacgttaaaatcacaaaatcgcgcgggcagaaatttgtttgcgccgagggaacctgcaaggttgacggcaaagtggcgtcttcggcggaacttatgttcgcaataatagacgcgagcgaagcgccgtaatctatccatacaaaatgacgaagattcaccccagtgctattgtagaaaaaggcgcggagctcgattccgacgtcgaagttggcgcttacgcctacataggaggctccgcaaagatagggtccggaactgttgtagcccaccatgcgacagtcgatggcaacaccgttttgggcaagtgcaaccagattttcccttacgcgttcatcggaggcaagacgcacgaccttaaatataagggagggaatccgggcttgagaatcggggacaacaatgttttccgcgaatatacgacggcgcactgctccacggcggataagaattttacgataataggaaacaataacaatattctcgcatatagccatattgcgcacgactgcattgtcggcgactatatagtgatgagttcccattcggctctcggcgggcatgtgatagttgaggaccatgcagtaatcggctggggaagcggcgcgcaccagttctgccgcataggcgcgtacgcaatgcttagcgcaagctcgaagctcgtaaaggatttgccgccgttttttatggcggacggatctcctgccgaagtctgtgcgataaataaaataaatatgcagcgcaacggattctcgcccgaagagatagagcttgtgtatagcgcatttaaactcatatatcggcgcaggctcacgcggccgcatgccattgaggagctttctatgcgcgacagttcttcaaaccgcgtaataaaggcgattatagaatttgccaacgggtcgtcggagcgcggcttggcgtaggcgcgtaaaatctttttttactggcttgtttacattaggtggttcccatcgggtacgggcggcttcttgcggtatttaagattttttgcattttttaggctgaaaaatttttatgcagggaagggcccaattcttttcttaacgttgtataatgtctgagacgttgcgggtctctgaccttgcgtgttttttttaagccaggtttccgcgcgaattcttgtatttgcggggttaaggctcttatcaaaaattttctttttgaatccagattagcctgcaactttttaaattctaatgcaggcgtatggcaagcgggtattttcttttgataatacagatgttgctttgaggaaagcggcggcagaaggctttttgcgggattgatagttttcgtgtttttggcggcaaattttttatacaaggaaagaaatcaaatccttttcttaacattgcattaccttatacgcggcggatttttttaaggcgcggttgaaaacatttgtttgggccggtttaatactaattgagattattttattgaagttttaggaatcgtaagattaaattttggatatgaaaagaattcgactttcccgtaacttatttgttttctttgcggcagcgtctgtttgcgccttcaatggagcttgtgtttccgacaatgcggaaaatgcggacgctccaaaaacttcgcaaagcgcggcagcaacgtccgactcgctgtcgtatccggcaaaaggctctgtaaagctttcgggagtgctcggaaaatctctggacgcgtcaatgaagggcgatatgctctcgtgggacgtaaacgacctcgtaagaccctttaagacgcgcccggaaaacaaaatgtggcagattgaattctgggggaaatggtttacttctgcggctctcgcatacgactacgaaccgtccgcgcagctcgataaaatcctcaaatacgcggcttccgaactcttgaaaacgcagggggctgacggctcgattacaacctataaaaaaggctctgaattcgcaggctgggatatgtgggggcggaaatacgtgttgctcgggctgcttgccgaatacgtaagaacgggcgattcaaaaatactaaatgccgccgaaaagcatgccgacagcattatggcgtctgtcggcgaaggcaaaaaaatcgacaatatctgcaaaatcggaatgtggaaaggtcttgcgtcttcgagccttctcgaaccaatggtgcttctttacaaatatagcggcgagaaaaaatacctcgaatacgccgaatggatagtatcctgctggggcaaggaaggcggcccaaaacccgacattctcgcgcaggctctcgaaggtaaaagtgtagtcgatatgctcccgaagcctaaaaagggcgcgaaggactatatggacggagggctttcaaagtcttacgaaatgatgtcatgctacgaagggctggtcgaactttacagaatcacaaagaatgaaaagtataaacaagccgcaatgaacgccgcaaaggccatactcgaccgcgagataaccgttctcggttcgggctcaatatgggagagatgggttgacggcaaattttgccagcagagggattccgagcattggatggaaacttgcgttagcgccacttggattaagttctgcgcgcagctattgcgcctgactgccgacccatcctacgccgacagcatagagctttgcgcatataatgccctgatagcggcccagagagccgacggcaagtggtgggcgcattacagcacgatgaaaggcacccgcaagcctgcgcctgagcagtcgggaatgcacatgaattgctgtgttgcaagcggcccgcgcgcactatttttacttccaaaaattgcgtacatgacaggcggcgagatgggcttgtatgtaaacctctatgaaaacggctcgggaaaagtatacgttcctgcggtaaagggcgatgtcgttctaaaagtttccgatgttgattacggcgcggaaaatttgagggcaaaaatcaagcttgaaatgccaaaggggctttacggattcaatctgtgccttcgcataccgtcttggagcgaaaaaactaaaatatttgcaaacggccaggttgccgcatatcccgactccggagtatatgcggttttgaagcgcgactggaaaaacggtgacgaagtggaggtcgaatttgactcccgcgcgtttattgtgagggatccctccgaccaaaagcgctttgcggtgcgccgcgggcctttcgtttacgcttcagacaagcgctttgacaaggcttttgggaaaccgcttactcccgaattggacggcaaatacataaaaaatgccgttcctgtaaaaatagacggtactgacgcggctctaaaaataaaatcttccgacggaacggagcacacccttgtcgattacccctcggcgggcactacgtggagcgcggaatcgccgtttacagtctggttttagcagactttgactaatgccgccgcgcgctttgctttttttagcaatgcgcgcgcggcacgataatcttgggcttggaaaaacattaaatttttaccgaatactccaacgctttggcaggtaggaaatccgaaaaaatattctcatagattgcgttctgtatacggatttcctagactgcgctttgcctaaaaagtccgcatggggtaaatttgcaatctatggttcaggttatatctatacgcataattttgttattgtataaatattgcgcgcaaaataaaatttaaaatatatggaacttggtgagatttacattctgtgcgtacgggttatctacatgcttgtaataccagcctgcgtttgtgttctccattacaagaagcccttgctcttcaagggactttggcggaaaataatatttgctgcaatatattcgtgcatctcttacatcaccttattattcgcgctatgcattccatattggcttggcaaatatgcattccgcgggccggaaattgctttcgcgttattctttggctggctttatttgtggattgcttccattccggtttggttcgtgtattggcttgcccgaaaactaaaataaaaatccccaaaccttggggattttttcgcatattatttagcggaaactttataaaccttaaagtgttcgcccgctttcgacaacctctgaaattcgttgctcccgggcaaattcggcctctatttgcacgcaatgaaagctaagatataaagcgttcagatagcacccttacgcccaaatatctgtcgagcaactgctcgcgcttcgggcggaactccgtcatgtacggcatagtcctgtgggtttgatacgcgttttcgtcagcgtattcttcgtaaaaatagaatatctgcttgtccaacacatcttgcaaaaattcgtattttacgcaccctggctctttgcgcgttgcggctactatgggagttgcaagctttatgaaatcgtcggccgagccgtccttaactctgagcccggcgagcacaattataggttttgatgtcatttattttttcggattttcgatttgtttaaacttgattaacgcttcgccgcctttggagaggattaattccccgccggatacggaaactttgtcaacctgtgagagcgcggttaagaatttagtctcataggcggcaaacttgcccattctgcgcgttgaaagcatttgcgagaattttatggaaccgtctttgcctatctcatacgttccgccaaatagatttgcgccggacatgccgtttaccttgccgtccggattaaagctgatgaatactgttccccagtcgttgtcggaggcgtctgggcatttcgcgtcgccttggcctttcaggaaaacgggggtccacgaagttccctttatgttaacttccgaagattttgcggcggaaggctgtgcggattgcgtggcttttgcggaggcgtccgggcattccgttttgcaggaggagcaccccgcgcatgcgagtatcataaatgctatgcttatatttaatattttcataatacactttttttagaaagttctttcaaaatatttcaagactcttataaaatcggcaataaaaggaaaaaatatatggaaaaaataactgtggacggggaaatatgcaccgcatacacaattccgacgactaacgcgtcgatgcttatgataaattcaaaatgcggaatgcttgcgtgcggctatataaaagtggagaccgccgacaagcttggcgacgctcttgcgatagtcaccggcgtaaataactacgagcagatgcttgaaaagccggtggttgcggcgagcattgcggcgcaggccctcggcgtcaggattggaatgtccggcagggaggcgctgctttgcatgcgctgacacgtatcatgttcttgtattaatgtaattctcaagggtaatcatttaaggctgtttatatttttttgaatttttcatcgagctgataatgccaaaaaaataaatttacccgtgcgcttcgccccaaatttttttatattttcacttgcctactattctggatttacttgccctttattatcgacgaaggcgaaaggtttgattcgtagtctggctgctcgttgccgggggtctttgtccttctaatcctcttgacttcatcttccgtcatcttgcgcagagtgtagtccttaggggtttgtatcgcgggattgtcgaaaggggtggatatgcctgtcgctaattcgacaacttcttccgcagtcttcccgtcaagcctcttcattatatcgtcttcgttctttccggcttttttgttgtcgtacattatttttgcgacagcttcggaaaaggcggtttgtttgtcttccggcagggttatcaacaattccgcaacgctccttccaaacgcctcgcggctcgagccgtctattattctcgtattctgctttatccccggaaagagcttgcgggagattgctattatttcctcagcggttttgccgtctatggcttccttcatgccctccttgctgttgcgggcgtcctgcatataataaacacctattgtcgccatcgccgccgcaaatttttgctgggtgttcccgtcgagggaggagagcattttcataaaactgtcctgcaatttcttcgggtcggaggcgtctatgcgcatcggggcgccgggcgctcccgccgtctgctcgagcgcaggggtatcggccgcaaccgcctcgatgacaaaaaatacaaaaagcgcaactatcgaaattaattctttcatattgcgcattatcccgttttttgcgtattccacaataatttttatcggccgcagacttttttgcgcaaataaaaaattttacccctcccaaagcgcatatttaacgcccacatactgcgataaaaatagttgacagcactcggctactgcacaatatttaaagacaagaaaataggactctccgcataggtgggctttttgcccgctttttttgtccgtacgcaaaaacggggagccgcatttcccatcagcaatttaaaggaaaaattatgagcaacagcagcgaaatattggcaattctcgaatacatggaaaaagagaagcagataagccgcgccgacatgatagaatcaatatcatcggcgattcgcaatgcggcctcaaagggcgcgcaggcgggttataatctgaaaatagaaataaacccaaaaacgggcgcgttaaaatcttgggctttgctgaccgtgactgacagcgtcgcagaccccgccacagaaatacatatcgacaaggctaaactctatctcgacaatccccatatcggcgatgtcgtcgagcgcgaaatcgacctctccaacctcggcagaatcgccgcgaagaacgtctatcagagcataatccaaaaagtgcgccagttcgagaaggacagaatttttgacgaatataaaggcgacgttggcaatatcgtcacgggcgtcgtccgccgccgcgagaaaggcacaaccatagtcgacttgggcaaggccgaggctctattgccgcgccgcgagtccgtccccggcgaggattacgcccagggcgagcgcatcaggtgcctcttgctcgaaatagagacgactccgcgcgggcccgagataattttaagccgcgcaagctataagttcgtaaaaaaactatttgagctcgaagtttcggaaatcgcagacggctccgtaaaaattgaagctatggcgcgcgaacccggctaccgcacaaaaatagcggtatccagctccgacagcagaatcgaccctgtgggcgcgtgcgtcggcgcggggggctctcgcgttaagagcattgtgcgcgaattgggcggcgaaaaaatcgacgtcataaaattctcgccaaatccgcagactttgcttgaagaatgcattaagcccgcagttgctaaaaacgtaaaagttgacgcccgcgaaagaaaaatatcgtttgaagtgtccgagccggacctctcgattgtcataggcaagcgcggttccaacgcaaagctcacttcaaggctcttgggctggaagctcgaaattgccaaggaggaatcgggggaagtgggcatccgcgaaaaggtcgcgcaggcagcgggaagcctcgggcagatattgccaaacctcacagagcagcaggcggcgatactcgcaaacaacggcatcaacagctccgacgccttcgagggagtggagctttcggacctcgtcggaatgggattctcggaagacgaggccgcctcgattctcgcgcagatcggggaatacagacagtaatagccgcgcaatacggcgcggacgcttaatttaaaaaaaggaaattgcgttttcatgagcattagaattcacgcattggcaaaagaactgaatgtcccgaacaaggaactgatagatttcataaatcggcgtcaggatatataccacttggagataaaaacaccctccaacgccatcgatccgtttacggcggaggcgataggtaaggattttgccgaatatgccgcgtcgaaagcggagcagccctcggaaagcgcaaatgcggccgaaccctcggcaaaagaacctgcggatcaaaaggctcaaggttccgcggaggaagcaaaaaaggctgaagacaaagcagaaagcgccaaagcagaacctgcggcggaacagctcgcggggcaaaagccaatctcagcagagaagaagcctgaaccgctctctccgcctccggttgcaaagcgacctgcgcctatcgtgcccccggcagccaataaggcgcctgcggccgttccgcctacggcggcaaaacccgcgccggcagttccgccgagcgttgcaaaagcgccggctccggcagttccgccgagcatttcaaagtcgcctgctcccgcggtaccgccgaggatttcaaaggcgcctgcgcccgttgttcctccgtcaagaccaaaaatttcaatgccggagataaaaccgtcgcagccgcaaaagcgcgatgtccaaccagaggttgtcataaaatttaatcaaaagccggaagccccgaaagagcccgcgcgcaagcccgcgccgctcgtgcctccaacaatgtcgaaatcgcctgcacccgcggtgccgccgaccatgggcaaagcgcccgcgccgctcgttcccccggtatcgaaggcggctcctgtcgttccgccgatgcctggaagggcgcccgcgccgcttgtcccgccgcagaattcgcatatgcagcctcatgcggctcaggaaaagaaggaatttaaaactattcagctaaaagccccaatcattgtccgcgactttgcaaaggctatggatttgaagccgtttaggctcatatccgagttgatggatatggggattttcgcttcgatgaaccagtcgatagaagatccaaccgcaattgtaatagcaaaaaagcacggatttaatctcgatataaggcataggggcgaacagcagcagcccaagaaaaaagaggccgtaaaaaggcctgaggacgacattaaaaattacgttccgcgcccgccgattgtctgcatactcgggcacgtcgaccacggaaagaccacgcttctggacactatccgcaacaccaatgtcgtcgcgggcgaggcaggcggcatcacacagcatacggccgcataccaagtcacttgcaacggcaagaagataactttcctcgatactcccggccacgcggcgttctcaaagatgagggagaggggcgcgaatgtcaccgacatcgcgattctcgtagtcgccgcagacgacggctttatgccccagacggacgaggcgctcagtttcgcccaaaaagccggcgttccgatagtggttgccataaataaaatggacgccaagggcgcgaatatcgaccgcgtaaagcagcaaatgcaaaaacgcggaatcacctccgaagactggggcggcgaagtgctttgcacgccaatttcagccctaaaaggcgaaaatatcgacaaacttctggagctcgtgctattgcaggctgaaatcatggagctcaaggcaaatccgaaagcgcccgtcgagggcgtgataatagaaagccagctcgagcagggcaggggcgccacctctactgtgatagtccgccagggcactctcaaaaccggcgatgtaatcgtaagcggagagcactggtgcaaggtaagggctctcatagacgacaaaggcggacgcatgaaagaggcaactccttctacgcccgcgctcgtcatgggctggacaggcgcgccggaagcgggcgattcatttgaaaaagttgacaacgatagagaggcaaagcgcatcaccgaagaggcaattcgcagccgcaaaatgcaggccgccgcggaatcagagccgcacgcggcaagcatagaggagctgatggccgcaatcgaaaacaaggaccacaaagtttacaagtgcattgtaaaaagcgacgtgtccggaactgtcgaggctctcgtagcttgcctgaaagatatcaaaagcgacaaggtaggcctcgaagttattgccgagtctgtcggccagataacgaagaacgacgtcgacttggccgccacggcgggggcgtcgattgtagccttcaacgtcaagcaggaaaacggcgttgcggggcttgcgaaacataaaggcgttgagatagtctcgcacaacattatttacgagcttataaataccgtaaaagaggcgatgaaaaacctcctcgacccggaattgcgcgaaaacaagctcggcgcggccgaagtccgccagctcttcaacatatcgaagggcggcaaagttgcgggctgcatggtgacggaaggcatcgtcaaaaacggaaagtttgcgcgggtattccgcaagggcagggaaatttcctcgaggggaaaaatatcggaaataaagcgcttcaaggacgatgtcacggaagtccgcgccggctacgaatgcggtattacgctcaacaacttcactgattttgagccgggcgatattatcgaatctttcgagatactcgagatacgccccgaattgtaatatggctgcggtattccaagtttggcatcaaaactttataaaatcgcaaaatgggtgaacgcaaaataagggtgggcgaactcgtaaagagggaaatcagccgcataatccatgaaagatggcgctcggagtccgttaaaataacgctaacggaagccgacgtatcgccggacttgaagcgcgcgcgcatatactattcggttctcggaggcagggaggacgccgcgaaggcggcgaaatttttgatgtcaaaacgcggtgaattgcgcagaatgctcggcaaaaatgtggtcttaaagtacacgcctgaattggagttcgcgtacgacccttccatagagcgcggaatgaaaatactttcccttatggacgagattgaggccgacgaggcgcgaaattccgaggaagccaaccacaatgccagcgactcgctttcttaggcgggcgcttattttaaatacgcatacgttttttatgaaaagatttttcccacatttagaaaaaaatttttccgagcttttggaggcttgcagagggcggaatatagcggttgtcgggcatatgcgcccggacggagactgcgtgggctcgcaatttgcgcttgccgacatattggcgtcggcgggggcaaagaaaaccgtgtgcctaaaccaaaacggcttgccgcgcctgtacgaaaattttgcctacgggcgggaatttttaagcgccgaagacttcgacgacccttcgtttgatattgtcacagtcgattgcgccgactacgcccgcacgaatttaaagttgcgcgaaaggtacccgtcgcccctcgggtgcatcgaccaccatgtgacaaacaacactgttgccaaaataaatgcgatcgacccttcggcgagcgcaacggccgaaattatcgcgggcatggcgttcgacgcaggcataaagatttccccggatacggcgaaccgcctgtatatgtcgattgcaacggatacgcggcagtttacgacttcatcgacgcgcgctctcacatttgaaatagcggcgaggctcgttgaaaacggagcggactctgcgcgggtggctatggagctctaccagagggagacaatcggaaagctaaggctcctttgcagatttctcgacacgctaaaattgtacgaaaacgggcggatatgcgtgggggtgttggaggacggagtttttgcgcaaaccggttccgagaaggccgacagcgacgggcttgtcgattacgcccgctcgatagacggcgtgcaaatagcactgcttttggagcagatgcccaacggcgtaaagggaagcctgcgcgccaagacgccagatttgagggtaaacgagattgccgaaagcttcggcggcggcgggcactttgccgcggcaggtttcacggccgagggcagaaccattgcagacttctacgaacagatactttcgactgtaaaaaaacatctccaaaaatttgactccatcaaatcatagcgtttgtatccatcgtttgtacgccgttaaaaaaaaagacttccgagattaacaaagatgcaaaaacagcaatttccagattacgaaggcatacttctaatagataaagacgcgggctgcacctcgcacgatgtggtggataaagtgcgccgaatcctaaaaatgcgctcgatagggcatgcgggaacgctcgacccaaatgcgacggggctgttgatattgcttgtcggcaaggccacaaaggcgtcgcagtatttgatgagcctcgataagacctacgagggcgaatttgagcttggggtagaaaccgattcgcacgacgccgacggaactgaaattgcgagaatgcctgtcccggcagggcttacggcggaaactctaaaagagcagatggcaaaatttttgggcgaccaataccagactccccccatgttttccgcaaagaaagtagggggagtgccgctgtataagctcgcgcggcagggtcaggaagtggcgcgagagccgaggttcatacgcgtgtcaaaattcgacttgctctcttgggaaaatccgaaagccaagtttattctttcctgcacgaagggaacatacgtccgcacgctctgccacgatctcggcaagcgcatcggctgcggggcgcgcatgactgcgctgaggagaatttcgagcgacaagtttaacgttgctgaggctgtgacgctcgacgaactctcgcaaatgagcccgagtaccataaaaaaaatactaatacccgtccgctccgcagtgccgagtttggccttttaaaaatgccggaagtgctgcaattagacgaaatgaagagctacggcgccccgtgcgtcttggctatcggcatattcgacggcctgcacaaggggcaccgcagggttttggaatgcgcgctaaacatggcaaaatccgagaatgcgaaggcgggtgtattgacgttcgatccgcatccgtcgcgcgtaatcccgatggggcgctcggcggttgaaataatatacccttccgatttaagggcatcccgctttaccgaggcgaaagttgacgccgtttttttcaaaaagttcgacaaaaaatttgcgtcgctctcgccggacgaatttgccggctacctttccgagaaattccctaatctccgcggaatcgtgacgggaagcaatttcttgtttggcaaaaacgcagccggcaattccgaggttctcgaaaaaatttgcgcttgccgcggctggaaatacaaagctgttgacggcatgatgagcggtggagagcgcataagctccacgcgccttagagaatgcctttcaaagggcgatatgggcgaatacgcgaggcttgccggcgaaaactacgccgcagagggaatcgtgaaaagcggaagacacctcggcagaaagctcggttttgcgacacttaatttgccgtgggagccccaatgcaagccgccgtacggcgtttatgcggtgcggctcgaaagaaaaggcgcagtttacaatggcgttgccaactacgggctcgccccgtcggtcggggattcatcaaagccgattttagaggttcacctttttgatacgcctaattttggtgcgcgctcaaagattaaagttgaattttttaaattcataagagccgaaaaaaaattcccggatttggactctttaaaagcccagatagctattgactgcaaaaaggcggaagaattttttaggcggcgggattagtatttttttatccggcttttgccatttctttttataactcttgttattttgttgtattttttttgtttcatatacttaataaaacatgaaacttttgcgtatcttgtgcgccgcgctgttttgcgcatgcgtgaacctgccggggcaaattgcgggcttgcccgagcacaactgcctttgcgaatccttcatctctcacaaagacatagaccgcctaaaaaacgattccgaatgtatgggatatttcggcgacgtcggagccccgggtacgccaagctatgttgcggtatgcacgaggggctcaaaaaactatttcattaaattcatagactttgactacgcggctaaaaaactaagaacctcgtcggaagcgccggtatcgcaaaaaaccgcagaagaattgctgaacttgctgaaagaggaaatattcaatcgaaaaattgtgggaaggagagggtttgacggagtttgcttagagttcggagcaagggtcggggatttctttttgtgcgcgggcgcgtggagtcctccgcgcggttgcgttgttaggtttatgggcgatattgcgcgggctaaatctgtggaaaaaatatctgaaattttagaaaaaataaaagaaatccgcgcagatttaaaactgacgctcaaactcgaagatgcgagcgcggaagatgtcgcaaacgcgctcagaggcatatatgcgcggggcgtctgctttgaacaggcccgccgaaaagagtgcgacaaaattaccgtccgccaaaggcgcgaggaactctccaaaaaaaagaatctttccgaaagggagcgcattcttttagcggaaataaaaaattataaatccgaggacgcggcaattggctggcgcgaagaaagaagaaatataaatttcgagaatatgtcggcgcaagaattgatagggaggctgtcgaaagagtacagccagtacgatttcaaaatagacggcgacggttggattatcatactaccgaaagaatccatgctgaaggtcaaagtgcccgcaatggagctctccgaaaaaactgtttcggaaataatgtctttgctgcctaaatcgctcaatatagtcttatatgaagctttgaatatatctgtaaataactccgaaaaaaactggtggcctgataagttaaaagtaaggcacataaaaactccagaattgcccttgtgcgaattcctgacttttctttgcaagtccgcagagaaaaaaatttcatggtcggcgcacgcttttaataacggaagtattggggtaatgtttagatggtagtatttttatagcctctattctgtgcttgcgcgttggctttattttaatttttgggcgcggtttaaaatctgccgcgtaaaaaatctgccgcgctaaaattttcctttttgcgctctccgttaagagtgtttgggaaaacttatttctcgctcggcaactccctctcaagcgcatggacgataaaaaatatttttttatctcggcgatttttttaatatcaaaatattctgcacaaactgccggctgggcgttaaaatatatacgcgcttcacgccgcttttgtctgagttttttgccgccgtacattgattaaccgaatgtcgggcattttttttcgattttgcaatatatcttgctcctttttttattctgaaattcaaaagcctttatactcgccttaaaaagcggtcggaagaaatttaaaaaagatttcgccatgcgcgcaacggcggtggctactaccaagtaggttaaatcatattccgggtttccagagattattcgacgaagatttaatctgccgcgtaattgtataatctggaacaccacagtggcttggcgcaaaaaaagggcggctttcgccgcccttaattttcgccctgaatgtgcccaaacgaagttaagccttcgctagcgctccaaaagctttttttagaaccaaagcccggagaatatgaagtatagaagggcgcttatgacgagaaccgccgcgccgccaatcttggctccggttgacgaagtgaggtccattgtagtgttgaccggcatttcgatgtcttgctttagcggctttacgagcgtgagcaccgccattaccgcgagcgagcatgcgaacgtaatcgccattctgttgaggaacgcaatgtcgttaaattgccattgcagcaagccatagactatcgggcttgtcagtataccgagcgcgccggagaagcgtggagccctcttggagaacatcccaaaaatgaacaccgccaaaatacccggcgagaggtatccttggaattcctgtatgaatgtgaatacaccgccgagattgggattggcaagcaggggagctacaaggcagccgattgcggcgaatatgagcaccgctattctgccgaccaaaacttggtgcttgtcgcttgcgtgggggactatgaactttttgtagatgtcgattgtaaatatcgtcgaggccgcattgagcatcgccgcgagcgagcttaccacagcacccagcagagacgcgaatataaagcccctaagcccgaatccctccggaagcactttgcttattaacagcccgaaggcggagtcgtacttgtatccgtagagcgtctttacgatggcgtcgtcgccggaatttgtttttgaatgcttttgattccagaagtcgacaagggctttcggaccgtttgcgccgccgtgggtttttgcccagccgctgtcgtacttaaagcggattttctggagcgaaccgtcggactttgccttctggtaggctttatacagattattggcgccctcttccgagataaccgcaacttgcgcgggcgcttccgacttttgtatcgtgtaggtaaactgcttgactgtgtccttggcggtgacgggctttttgagcgcctccatcatgtcaaagtacacaatggagtagttgccggcgtttgttgccaaaattttttggtcgttcattgcggactttgcctggtctgccgcgaaaaggttgaaggcgattatcccggggattacaattataaagggaattatcagtttaaggctcgccgcaaatattacgcccttttgcccttccgcgaggctcgacgcgccgagggttctctgaatgatgtattggttgaagccccaatagtagaaattgggaatccacaagccaattatgagagccgtccacggaacttccgggtggtcggctggcaggaacatcgtgagcttgtcggtattgagtttgaagaatttttcaagcgttccggcgtcggaaagcgacgagagagtatcgggcgatattgtcgcggtcgtcgttatttcggcaacgggcgtcgccgcaaaagcattgaatgcgaaatatgctattagggcgccgcccacaatcaaagcggttccctgaaggaggtcggcccaagcgcaagccttcaagccgccggcgcaaacatagacggcagctatgatgcctatcgcccagcagcaggttgaaatatcgaggtcaatcggcaggtctgcg

SEQ ID NO: 3194 - DNA, 18552 bp, Unknown
  16S sequences of unknown bacteria
atcgtaaggctttctcccgtactcactgaaaaaaataggcggacttggcatcatcggctatatattcaaaagaggattgtcgtatatatcttttgaatttctttcatcaaagccgagccttataagaggaacggaaggaattctgccgaatatacttaacactctttacattatatttataacaatgatttttgttcttccgataggaacaggtgcagcgatttatctcactgagtatacggaaaataagaagattgctggaatgattgagtttgctgcggagacgctttcaggcataccttcaatcatatatggtctttccggaatgctgattttcgttcagtttttctcgctgggaacaagcatacttgcgggcgcgtttactctcgtgattatgaccttgccaacgataataagaacgacgcaggaaagcctcaaagcagttccggatggctaccgcgaaggtgcgctcgcgcttggctccggcaaatggtatatgatacgtacagttgtacttccgtctgcgattgacggaattgtaacaggctgcattttggctgtgggcagaatcgtgggcgaaagtgccgcattgctttttacagccggaatggcaaacgaggtactcagcatttttgaagccgttaaacctggaaacgccggatctacactgacagttgcgctttatatgtatgcaaaagagcgcggacaatttgatacagcttttgcgatagcggcgatccttctcatactgacatttgttatcaatttatcggctaaatgtgcggcaaaatttttgaagcgaaaaagaggaaaataaaatggcaggtattattaaaacggaaaatttgaatttatggtacggcacgaatcaggctttaaaaaatataaatgcggaaatacaggaaaaacagattacagcgctcataggcccttcgggctgcggtaaatcgacctttttaaagacattaaaccgtatgaacgatttggttgagggctgccggattgagggcggcgtatatctggacggtactgatatttataaggatatcaatgtcaatattttgagaaagcgcgtcggtatggtgttccaaaaaccgaatgtctttcctatgagcatttatgataatgtagcgtatgggccgagaatacatgggataaaatcgaagcttaagcttgatgaaatagtggaaagctcgctgagaaaagcggcaatatgggatgaatgcaaggacagactgagaaaaagtgcgcttggaatgagcggaggacagcagcagcggctctgtattgccagagctattgcagttgagcctgaggtacttttgatggacgaaccaacttcagcgctcgatcctgcttcaacttctaaaattgaagatttggcgacagaattatgtaaaaattatacgattgtgatagtaacgcacaatatgcagcaggcggcgcgaatcgctgacagaacggcttttttcctgcttggagaaattattgaatttgataagacagaaaaaatgttctcttctccgagagataaaagaacggaagactatataacagggaggttcggatgatgcgcaacaaatttgaggagcagcttatgcatcttaacaatgagcttattacaatgggagcgctttgtgaagaagcaataagcggctgcgtaaaatatctttttaatagcgatagcgagatgaaagaggcggtaatagaggtagaaaagcagatagaccaaaaggaacgtgatatcgagcagctttgcatgaagctgcttatacagcagcagccggtggccacggattttaggattatatcatcggcactgaaaatgatttccgatatggagcgcataggcgatcaggcttctgatatagccgaaattgtaaagcatattgacagaaggaatattgatggtgatacacatatttcggctatggctaaggagaccatcaaaatggtaacagacagtatagaatcatttgttaaaaaggatattgagcttgcgacggatgttataaaacaggatgataatgtagatgagttgttcaataaagtaaaagacgagcttatagagacgctgcggcagccgactgaatgtgcggaagcgctgatagatttgcttatgatagcaaaatactttgagcgcataggtgatcatgctgaaaatattgctgaatgggttatattttctattacaggacagcatattgatatcggacaaaatgattgaagtcgtaattcgcaaaggttataatgaaagcagcggagggtaggaagatgatttatttggttgaggatgatgataatataagaaagctcgtgagctatgccctgtgtaaagatggattcgaggccaaaggcttttcgactccggcggaattttggcaggaaataaaattgaatatacctgagcttgtgctgcttgatattatgcttccggaagaagatggtttgtcaatattaaaaaaactcagagaaaaatcggaaacagcggatgttcccgttattatgcttacagcaaaggacagtgaattcgataaagtgatgggactcgatatgggagctgacgattatatagccaaacctttcggtatgactgaacttatatcgcgcatacgtgcggttttacgcaggtatgaaaaaaataagacaaataaagtatatagaatcggagaattatacgtaaatcatgccaaacatattatagaggtttccggggtcagcgttgcgttgtcatataaggagtactcgcttcttatggcgctgcttgaagcggaaggtgatgttgttaaacgcgacacgctgcttacaaaagtgtggggcgaattctatacggagtcgcggacgctcgatgtacatataaggaaactgcgcatgaaacttggcagtgccggtatgttaattcagaccgtaaaaggtataggctacaagataggtggtactgaaaatgaacaataaaatttttaaatcttcttttttaacgacattgtttgtgctcatagcgacgattgctctgataatgggagttctgtttgatttctttgaagatcaaatacagaaagaaatagaaaatgaagctgaatatcttgcccaggctgttgaaaatgaaggcattcaatttttcgatagttttgatgtaaatgaaaatcgaataactttgataagcgccgatggtaccgtaatttttgacaatcaaattgatgcagcttctctcgacaatcatgcggagcgtgaagaaataaaacaagcgatggagacggggagtggaataagcacgcgctattccaaaaccctgacggaaaaaacggtatattatgctttgaagctttccgataacaatatactcagggtttccaccgatcagtatacagtagttaccattttgttgggaatggtgcagccgcttttaatagtgcttatcatagcctttgttttgacgataatattatcatcaagggtttctaaggccattataaaaccgataaacgagcttgatttggattgtccggaaaataatgaaacttatgaggaattaacaccgcttcttaaaaaaatatcgatacagaagcaaattataacaaagcagctaagtgaagcgcatcaaaagcaggaggaattcaatctaattaccgaaaatatgaacgaaggatttttagtaatagataagaataccaatattttgacgtataacagtgcagccctcaagctgcttggcgttgaaagtaccgagctaaagcctgtgctttcggtttgccgtgaaaagaatttccgtgatgcggtagatttggtgctgagcggtgaaaaatcagtaaatatgatggaacggctcggcagaacatacagaataattgctaatcctgtatttgaaaatgatagtgtgataggtgcggttattataattattgacgttacggaaattgaaaaaggagatgaaatgcggcgcgagtttaccgctaatgtttctcacgagcttaagacaccgcttacatcaatatcggggtttgctgagcttatgaaaaacggagatgttgcaggcgaaactgtggtcgatttttcaaagtcaatttattgcgaagcgcagaggcttatttctttggtaaacgatatcataaaaatctcagagcttgatgagggcaattttttagcggaaaacgaaagagtggatttatatgatttggcgggcgagattatcgaaagattaaagagcgaagctgccaagaaaaatatcagctttagtttaataggcagccaggtagaggttttaggagttcctaaaatacttgatgaaatgctttataatatttgcgataatgctgttaagtacaataaagaaaacggtacggtagatattattataaaccagacggataaaaaggtaaatgttattgttagagatacaggtataggtattcctcaggaacatcagcagagggttttcgagcgcttttacagagtagataaaagtcattcaaagaaagtaggcggcactggccttgggcttgcgattgtaaagcacggcgcgatttatcataatgctgagataaaacttgaaagtgaagaaaacaagggaacgacaataacactgactttcgataaggcataggcttaaaataaaagagaaaatatagacttgtaaatatgagactcggagtatacggtctgcgcggtgaggcttatcatagatagccggcgaaggccgtatttttgttttcggtgctggattaaacaactttatttacatacttttgcgaaaatattgatttttcagtgaacgcgctttataataaaaatacagaaaatgaacggagaattgatgaaaaatgggaaatattttatcttgttttaaagaaaagaaaccgattataggcgttattcatgctaaaggtacagatgacgacgatgtgatgagaagagccgtatctgaaataaatacgtatatagaaaacagcattgacggtattcttgtcgagacatatttcggaacatatcatcaggtgcagaggatattggattatctcagtaaaagcgggattggtgttccgtatggcgtaaactgcctgaatatagacgcaatgggctttgtacttgcaagtgattacggatgccaatttattcagcttgattcggtaatagggcatgtaaagccgagggatgaagagtcgctggcggcgtttcttgagtatgcgcgctcgaggtgcagcgcgtatgttctcggaggcgtgcgcttcaagtatcagccggttctttccgaaaaaagcattgaagaggacttgataacggctaaggaaaggtgcgatgctgtatgcgttacggaggatgctacagggcaggaaacatcacttgctaagataattaagtttagggagacgctgggagattttccgctctttgtatgcgctggtgtgacgccgaagaatgtagcggagcagcttaggtatgctgacggagctgttatcggcagctatttcaaggacaatcacaaggatacgggcgatgtatatggaccgcatgttgcggaaattatggaaatagttaattcagtaaggaatacattataatacatgcataagctaaaagtttaagttgtagaagccgggcagtataagggaggtttttatgaaaaaaatattttttataggtgatgtggcacttgacgagtattatcaggcggattattttccgaagataaaagaaaagataatagtacatacgctgccggcgcagatgggcggctctattgcaaacgcggcttgcgtgtttcagtcgatgggaaattcgccgtatttcctcacagcgcttaattcaggaagtatcacaaagagacttctaaaaaacttaaatgaatcgggtgttaatacagattatatggtatttgacgacagcattccggattctaagtgtataatcatactggcggagaatgaacatacggtatttattccaacgcttgcgcttcaggaaattatgatagatgaaagcacgctggcagagttatgctcttgtgattatctatatacaaattttattgaaattgccccgctcaagtgcggagataaaaatgcttcggatattttgaagctgcttaaggaaaacggcgtaaaggtctggtgtgatctcgattgggcggaatatatagaaggtgaagaaggtttcattccgtacatacacactgcttttttaaatgaacagggagctgaggcgcttaacgagcgttacggaagcgaatggaaacagaagttttttgacgaaggtgtttccgttatcgtacttacggaagcggaaagtggctgcagcatttatcaaaacggaaaagaaccaattaaggtagagggtattgaggttgaagtgacggatgttacaggagccggcgatactttcggcagtgcttttatgcatgctgttatgcgcgcggatgatttacggctttgtgcggaatatgccaattttgcggctgcgcgcgcagtgaccggtataggtgcgaggtacggagcggtacagggtgataatcttaagaggtttattgcggagcacggcggcgacgcagaaagatatgctgtttttctcaggaaatagtatacctgaatggcagtactcatgactgtgatcttttctgcgaaaggaatttgaaagaatttagtaatacatatttaatttacattttgggtgcgcaggtatataattatattatgaaaaaatgaagagagacttgagatatattctgatttgagtacgcactctgtaatattgtattgtataatgaaagaaggggacttggaaatgaagaaaaaactttataaatcgagagagaacagagttctgtgcggtgtatgcggaggcataggagagtattttaatatagatccggtaatcgtgagaataatactcgttgtgctttgctgtgtgggattcagcgggataattgcatatatactcgcggcaatcataatgccggagagacctgttaatgttccgccggcaaaagacgtttatgaggcaaactatgctaaaaaagaagatgtagttgatgccgagattgttgatgaagacgaataggattttagcaatttaaatgcagccacgtaaaagtggctgcattttttaatttgctctttacgttttttgcgcaattgctttaaaatcaggttttacagataatatgctctataagcggtcactgttattaagaagattgcgcaaaaacccgccttgcacttttgattttggagatacagttgactgtttagctttgccgctgcttttttcggaagttttaaggttttcaggactgtaatatttgatttcggcatttatgcctttttctgatgttgtcacaagagcgtatgacgcggtagcaccaggaaccggataagtcaggctgcctggatttatgaggtaaagcccgtttatattttcacaaactgcaatgtgagtatggccaaaaagcgcggcaatgcagctatgctcttccgcgaggtatatgagatttgtgagcgagcttttgacgttttgcatatggccgtgtgtgatgagcagtctgccgcattcagtatcaatcgtcttgaaagcgtcgtcggttctgtagccgttatccatattgccttttacggaaattacgtccgtgccgattaggtgcgaaagctcatccgcatcttttttagtatcgccaaggtgtattatcgcgtcgatatccgtgtaattttcatatatggcgattgcttttttgatgtcgccgtgagtgtcgcttattacgagaaatttcatagattgcgctcctttaaagccaagaatatcagtataatttgtaagaattataacatatagcaggtaaaaaatccataagattgcgcatgcggagcgataataattgacggaaacatttgcttgagttaaaatttaatataggaaataaaaagcatatttatatattaaaaatatgctttttgcatagcggaggagaaaatgagcaattttaatgaaagttttaataaaaaaatcagaatagagctgtcagagcagaaaggcggggtggcgctaagcccagcgcagattaaaaatgctgtagaagctgctgcaaaagcgggagcaggtattgtaaagcttgttggacaagaccctgtacgctacagcgggctcaaggcacttgtaaaggatataaaaagaacagagggaatatttgaggtgtctctgacgacggatggacacggacttggcgatgcagcgaaaggacttgcagcagcgggtctcgatagggtgaatataaatgtagatactctcaagtattcaaaatatacgggaggcggcgagctcgacgatattgtgacagccataaatgcagcaactgacgcgggacttaagcctgtgaagctcaatattctgcttaaaaaggattacagcgaagatgagataatggattttgtgcagcttacgcttcagcatcagtatgagataagatttattgaaatgacagaagaagaggaagcggaatctgaatacgaagcgctgctctgcgcagatgtaaaaaagcgtctgccggcgctgcgcccggggcttatgggcgacgacggaaaggcgctttcggatccgcgtgacggtactgcggatgtatataaatatccaggagcactgggaaaaatttgctttatagaaaaaagagctgcggattttgcgcaaagatgtgcagatctttatatttcggcagctggagttttgaaaagggatgagaaggacgaaaacggaatcaatttgaagccgattgcggacgataaggaaaaacttgcggcggcgataagagaaatattgggataatttgaaaaaatgctgccgtgcaaagttgtatgcagctgaaagtgcattttcacaagaaaggaacttttgtgtacagagagataaacaagagaaagataatcattgaaaacagaaaaccgtacagccgaagcgtcacggagcgcataaacaaaatgaatttgctcgattttatttacacttctatgcgtttaagcggctgcgcggccactcgcgaaatgatagaagcgatgatgaacggcgagattttttctgatatgagcctcggggagcatgcgaggacattaaggtataggcagcttctttcagagatgcagagcatgtgtgaaatgagaacctcactttctcttgatgtaattgcgcgtatttactgtataatcacgggtgaagatgagatgaagttcagggatagagatgatactacggaatttggatacgattataatccgccggatgcggcagagattgatataaggcttaaggtgcttttaaactggatagggcgtgacggcggagtgtatgaaaatcagaatgcgctggaaacagacgatttgagcgaagcgccgtcagattttatattgcgtgcggcatatcttcacaacaggtttatagaaatttgtccgtataaagaggataatgcggagattgcgcgcgcgattatgtattattatctgatgtacaagggacacggtgttttcgcgctcgatataagcacggaagattatctggaggacataatgatatttcttaaaagcggtgatgtaactcctttttataaggtgcttgaatgttcgctcgatgaggcgacaaagaagcttatggaaattacggcggagcaggtataatgaagagacttgcgggacttgacagctttaaggcggtagcctgccttatggtgataatgattcatgtgacggcgacaccggttacggtactggcaaatgtgaatgcggagagtgcgtttgcagatgtattggtgcggctgcttgtaatttttaatagatttgccaaaccatctgtgcctatgtttatatttgcgagcgggcttgcactctattataggtatggagaaagcagagataaagaagtctgtgcagaaagtgaagcccgaggcggcgcgagcggctcaggagactttcggtattttgaatttcttaaacgcagggttgtgaaaatagtcgtgccgtacgctttatggtgcgctgtttattatggatggtttatctgtgttggaatatacgagtttgacgcagccttttttgcggtaaatctgctttcaggcaagatgatgtatcatttgtattttgtgatagctatagtgcaatactatttattgttcggagtatttcgccgtcttacggcaaattgcagcgcggcatttgtgattccttctgcgctggccgttaatcttgcagaggtatgtctgattgccgacaagtattacggcagatgttttttgacatatattacggtgtttttgctcggaacatacacggcaaagcacatagatgcggtgaatagagcagtagcaggcaggaaagcgcttgtgattctcggcgcggcgtctttggctgcgggcgctgtatatacaatgcagtttacacgcgatatggaatgggagcgcggtatttttgatgatgacaagatattatttacgattttttcgatattagcatcgctgtttatatacggactctgtgtgttgctggcagagaaggcaaacggaggctgcaatttatcagcgaaaatagaatttgtactcgggcaaatcagcaagggctcgttttatatatttcttgcgcatccgcttgctatgcttgcggcgggtgaactgtgccgatatattggcgtaactggcgttctgagagaaatggcggtatctgttatacttatacttgttttttgtattccgcttgcgattgcctatgcaaatttgagagctggacggcataaaaatagaatagaaaaaaatctttgatttggagataaatatggatttacagggtataaaaacgttgttagcggaatatttgggcgatgaatgtgtaatagaaaacgcggatatgagtgagcattgctcgtttcgttgcggcgggcgcgcaaagctgcttgtgacggcaaatgatatggatgcgctcaggtatgtgctctatgttgcgggcggagcagatgcgctttttgaagataggggatgtgcaggcgggtgcgctggaaaaacaggctgcggaaatacgcctgcgtgcggaagctgctgcggaggaatgaagggcggcgaagggggctgctgcttgaaaaacggcggaagctgctgcagcaaaagcggcagaacgccggaagttgtgataataggaaacggctctaatatactggtgcgtgacggcggctttgacggcgtaatcataaagcttggagacgaatttacaaagatagaacaggatggagaacaaattacagcgggcgccgcagcacttctttcaacggtgtcgaaggaagcagcgcaaatggggcttgcaggtatggagtttgcgggcggtattccgggaagtcttggcggtgcggtgtatatgaacgccggagcgtatggcggcgagatgaaagatgtggtaaaatcggtgaaagcaatttcacgggacggaatgcgcgagtatcttgcttatgcatcagaacttgcatttgcttacaggcacagtatatttgcggaaaacggcgatatagtgactgaagtcacactcgaacttaaaagcggcgataaagcggcaatagaaaaaagaatgaaagagctttcagaaaagagaaatacaaaacagccgctcagatatccgagcgctggtagttttttcaagcgtcctgaagggcatttcgcgggagcgctcatagaagaagcaggtcttaagggactttcagtcggcggggcgcaggtatctgagcttcatgcgggttttatagtaaatacaggcggcgcgacggcaagcgatattataagcctgatgaagctcgtgcagaatacggtaagggataaaagcggtatagagcttgttccggaagtgcgcatcatcggccgtgattagaagcatgatatttaaatacagaaatgacataatagcaggagaaaagggaatatgggaacgacatatgaaaaataccgggcgatatacgattatcatacgcatacgacatattcgcacggcaagggaagcattgaggataatgtaaaggctgcaatatccgcaggacttcgcggtataggtatatccgatcacgggccggggcatttgacatacggcattaaacgtgaagccgtaccgaagatgcgcgctgaaatagaggagctgcgtctcaaatatccgcatatagagatatttatgagtgtggaagcaaatataatttccaccgggaattttctcgatatttcaaagaaagaatttgacgattacgattatgtaatagctggctatcactacggcgtgaaaaacggctattgtataagaaattatataagcgagcacctcggcaaaagcagtgttatgacagccgatgagtgcagcgggcgtaccaaagacctgctcgtaaaaaataccgaaatgacggttaaggcgctttacgaaaacaagataaaaatacttactcatccgggggataagggtccgtttgatatgcaggagcttgcgcgtgcctgtgaaaatacgggaacacttatggaaataagcacatggcacaagcatctcacgcttgatgaaataaagtgcgcggcaaaatatgatgtcggctttgtagtatcgagcgatgctcacacgccgggacgcgtaggcgatgtgtctgagggtataaagagagcgctcgaggcgggtctcgatccggagcgcattgtaaatatcgcatatatagatgaaattacggaggaaaaatgatatgcagctgataatagttacaggactttcgggcgcgggcaaatctcaggccataaactgtctcgaggatctggggtattattgtatagataatatgcctccggcgcttataaacaattttatcgagcttgcaggaagaggaaagacggctatagaaaaagccgcgctcgttgtcgatgtgcgcggtggtgaattttttaatgatacaaagttgttcctcgaggagcttaaaaagcaggaacaggagacggaatacaaaataatatttcttgaagccgatcccaaagtgcttatcaggcgctataacgaaacaagacgcacgcatccgctttcggacggcggctctacggaagacggtataaaaaaggaaatcgctttgctttctgaaataagaaaaacagccgattttgtccttgatacatcaaatatgaaatcggcacgcctcaaacaggagataaaagctataattgacagcgacaaaaatagcgatactttcatgataaatattaagtcgttcggctataaatacggtattccgctcgacgcggatctcgtgttcgatatgagattcattcccaatccgttttatgtggcgactttgaaaccgctttcggggaacaataaaaaagttcaggaattcgtgatgaagcatgaggaaagcaaaaagtttgtagagactgcttcacgccttatagacgatatgataccgtgttatataagagagggaaaatatcatcttaatctggcatttggctgtacgggcgggcatcaccgttctgttacgatggcaaatgtttttgccgaaaaatttaaagctgagggcagaagtattacgctcgaacacagagacttatagaaatagtgcgtttagtatggattatatttcgcgcaggcggcgcgcgcaccgaaaagcagacaggtataattaagagttttaatttatataaaattttttaagaagcgaggtttaagcgttatggaaaaattgattataactgcggcaatatgcgggatgggaggcacaaaggaggacaatccggccattccttatacggtagaggaatttgtgcgtgaagcgaaatcagcgtacgatgcgggcgcatctgtgattcatgtgcacgcgcgcgaggacgatggcagtgtgagtgagcgaagcgagaggtttaaagaaattgtatctgcaattaaagccgtttgtcccggtgttataataatagagccggcaacttttgcttcctttgatatggaagagcttgcgtcaatcgaagaaccgaggccggcagaacttcccgaagtgatgacgattccaagcggtacctgcaactgggacggttatccttacataaacacggatgaaacaatattcagctcagcacagacgatgaagagactcggtatcaagcctgatcttgagcttttcgacaaaggtatgatagacacaataaagagggggcttgagcacggatattttgagcagccgcttaactttgatttcataatgggagtgcagatagcagcaaatgtgaaagatcttgcgtttatggcttcgagcttaccttgcggctccacctggactgcaacaggcgtcggaaaagatgtgtggcatattgcggcggcggcgatactgctcggcggcaatgtgcgtgtcggctttgaggatagcatgatgcttaaagaaggcgagctcgcaaagagcaatggcgagcttgtggcgaaggctgccgagctttcgagaatgctcggtcgtgaagtggcatcgcctgctgaagcgcgcaggatactcgggctaaagcggtaaaaatatataaaaattgtctttcattccgcaaatcatcgaaaaaataaaaactgatatatttgtacaccacgcggctaccagtatgtgtggatgcgccgttttcgatgcggctatttataaggttatctcgcagtcgtcttttgtcagtattttctgcactttgatttctccgccgaggtatttagaaatgcggtctgcgagctcagaaacggctgcagccagctcatcgtgcctttccggatttacgctttcaaatattagaaaagcagaggtagaatcttccgtgagcattgtgcgcgtgccgtcgcgccagttccagcatctgcatacggcgcctttatcgtcgagatagcagagctcgcctggcagagtggggtcgttctctgtatcgccgatagctatgaattcttcaccgccgttttcactgagagtgagtctcatagttcctgcgatattatcaaggtcttcaccgccgcacggaagtccgtatgtaagagacattgtgttgtatatatcgacgagaggatttataggacctacttcgtttcctttctgtactcttgaaagcagagcttctatcgacgagcggttgccttttttcttcttaaacttctgaaaagcctctctccatacggataccgcgctgcattcgctcaaagtatctttgtctatgaactttcgggctttaatattggcttcggcaagctcctttgttatttcatcccgcgccggacattcactggacttattgtttatgccggctgcgataacgattccgagctcggcatcagggaaaagatcccaaaacgatttttccgcagtaaatttattcataactacctccttttacatacccatcaagaattgctctttatatatgaaattatattacctcaaatggcactttgcaataattaaaataggtgaaataataaccaattagcaaaccggcacatatgcgcatataatatacagagctgtatacagctctaaactgaaagggatgatttaatgggtgttacgaattctaacaaagaattagacagaacacaaatagactgtgacggtctgtttaaagtgagactttcgctggcagcagcaccggacattatggaaaacccgacggatatcgttatgatactcgaccgttcgggaagtatggcgggaagcccgctcgcaaatcttaaaaacggggctaaaaaatttatagatataatagaagaaagcacaggcggcgcgcaaagcgggcagataagcggtggaagccatatcggaattgtaagttttgccgatactgcgacgcaggatacgcagcttattacttcggtagacgatcttaaagatgcggtggattctctcgacgcgggaggctctacaaatcacgcggatgcatttacaaaagcagtagaactttttgatccaagttcgcaaaacgcaaaggtcatgataatgtttacagacggaaagacgactgccggagcaaacccggtgccaattacaaccgcggccaaggcaagcggaataataatatactgtataggtctttccggaaacggaggcatagacgcgcaggcgcttaacgaatgggcatctgacccggattctgcatatgttgcaattactccggacgatgcagagctcgaaactctgtttgaaaatcttgcgagaaatatttcaaaacctggcgctacggatatcaggattgaagaagtggtaaaccagtgtttcagaataaccggcacatcaaatcctacaaagggtattgtaagtgtcactgggcagcgttctctcgtatggacaatagacgaactcggggttacgggaagcgaaggcgcacagctcgaattcacagtacagcatatagggccttgcagcgggcttcaggaggtaaacgaaatgatactttattccgacagagagggaaatgcagtgacattcccttcaccaaaaatagatattgactgcggcgatgttgttacaccggaagaatgtccggtacctgtcgatatttgtatagacggatgcgaagacagcatcgaatttgatgccggcgatctcggtatagaatcgctcggacgcatagtgcagcttgacgttaagcttaagaatatatgtccgcataagagagtcgcacttgccgctattatgacagaagtggacgaatacggtgaagaacacagaagaggaatgaagaccgttacggtaccggctcatcattatgagtcctgccgcgatgtaacagtaaaatgcattaaatttgttttgcctgaggatctcgatgtatcaggcagtccgactgactgcatgtgcaataacagacatttcagggcaagatttatcgcacactatatagataatgattacagctgctgcgatgttattctttagaggatatctgcgcatcactgcaatgaaataagagtataaaaaaggctgccgcgctgcatttcggtttgcggcggccttttataatatgtgttttaaagaaaggaatatataattatgagaaacaactattacccgtttgtaaatctgccgcttccgtatccttatgatgagcttgagccgtacatagatacgaaaacgatggagcttcatcatgacagacatcttcagacatatatcaacaatctcaatgatgcgctgaaagaatgccccgagcttcaggatttgtcgctcgagcagcttataatgaattcgtacagacttccggaagatataggaacaaagattcacaacaatgcgggaggcgtttataatcacaggttcttttttgccggaatggagaatcctaatgacagcaccggaatgccaactggcaggctcgcagctgaaataataaagacttacggcagttttgataatttcagggatacatttaaaaaagcggcactgtcggtatttggttcggggtatgcttggcttgtggtgtgcagaggaaaactgaaaataattacaaccgcaaatcaaaatacgccgcttgagatgggaatgtgtcctgtcatagcgcttgatgtttgggagcacgcctattatctcaagcattataatgtccgcgcagattatattgacgattggtttaacgtcgttaattggactaaggctgaaaaaaattatcttaagtgtttagtcaggtgaaaaagcggctgtttattttcggataaaaatatgttaatatagaatttataacaaataggatgatatatcgcggggaggcgaaaatttgcaggacggaaaaaaagacataaatgaacacagcagaacggtggcaaaagtatcgcgagtgacgataattgcaaatacggcgctcgctttgcttaaagccgcggcaggaataataggacattcaagcgcaatgctggcagatgcggcgcatacattttccgatttatttgcgtcagttgcggtgcttataggagtgtatatttcagatcatatacgaagcaataataaagagcgtttcagaaataaaatagaaggcacgatatctgttttactaagtctattgcttatttatttggccgtggaaataggtgcgggaggagctgttactattatatcgggggcttacaaaaatgtggaagcgccgacactgcttcctcttgcagccgcgcttatatccatagtgacaaaggaagcgctttataagtacagtatcaaaaatgcacagcgagcagattctgtcgtgctgagagcaatagcctggcataataggacggacgcgcttgtaacagttggaagtctcatagggatactcggtgcgagattcggatatttgatctttgatcccgcagcctcgatagtaataagctttcttgtaatgaaagctgcttttgagatatttgcagatgctgtccgcactctgaaaaacagcagataaaaaaattgcggctgcggcaaaaaacaggatgaagagatcattgttttatggtatactaaagtaaatgcaggcgaggatacaaaaggagaattctgatggaaccaaaatacaaaagagtcgtgcttaagataagcggcgaagcgcttgccggagacaataaaacaggt

SEQ ID NO: 3195 - DNA, 32759 bp, Unknown
  16S sequences of unknown bacteria
aggtatactgcataaacatagatatcagaggcggcactgccattgatatgataaggggcagcataggttttgtttccattttgttaagctcagccaaaatatatcctccagtccttgacattaataaaccggcatactgcgatgccggtttgtcgtatagcctgtattactatttgattattgtacagacagcatcaggtccgcagccggctgcattaccctcgtcagtgtcaaggtgaacttctctttcgtgagcatctcctgaacgtacaagcacgttgttgaatacaaggcctctttcgccctcgattttgatgcttacgatatccttgtccttaacgcctgcttcttctgcctgtgcaggtgaaagatgtacgtgtcttaatgcaacgataacgccgtggtcgatttcaacctctccgcaaggtcctacgattttgcagcccggagttccctcaagcttgcctgactctcttacaggagccttgatgccgagagttcttgcatctgtcattgcaacctcaacctgtgtttcaggtcttgcaggtcctaaaactctgatgcctttgagagtgttcttaggtcctactatatcaaccttctcttcgcaagcaaactgtcccggctgtaccagaggctttgtcggtgtcagttcgtgacccttgccgaaaagaatttcaatgtgttccttctgaagatgaaggtgtttgtttgataatccgatttttacttcgtaacccattttatttctcctttgtatgtataaatttattcatttagataactgatatacgggaggtttctgtatttctgatcataatcaagaccgtagcctattatgaaaagatcctcaacctcaaagccgacatagtccgcttcaacatcgcttcttctgcctgcaggcttgtctaaaagcgtgcagagcttgattgtcttaggtcctctgttggcaagatatttctcaaggtagctcaaagtgatgcccgaatcaacaatatcctctactattataacatttttgccttcgatatccgagtccaggtccttgtttatttttacaacacctgatgtttttgttgatgagccgtagcttgagcacgccataaagtcaatggtgcagtccagtgtgatgcttttcatgacatccgccatccacagaagcgctccctttaatattcctataagcattacctcttcccctgcaaattcctctgaaatctgcgcaccaatctcttttgccctagcctttatctgttcttctgtaatgagaactgtacctatagtgttagctgccactttgaggtcctcctttgtcttcttctacggtgtaattcacatcgtcaactgtgtctttgtatttttttgaaaggtctacgcttttgtcgccaagccagtacctgtccagttcatcgcttaagtaccagagaataaacagccacagcagaaaatcatctataaatcctatcggtccgaaaaccggcggaattatatccaccggcaggaacagatatattattcctgccacaatgagcgcttttttgtaccatttgacagatttatccttcatcataaatctgatggcttttattcttttgcccagaactctgaaactgaaaaagttcatcttattcccccaacaatctctctatttcatctaaaagctcgtcctgtcctgttttcttgagcgcagagcaggctatcaccttgtcctccggcttcatccccagcgccttccttataaccgatatgtttttgttcatctggtttcttgagatcttgtcggctttggttgcaaccaccaaaccgtcaagaccgtaatgcttgagatattcgtacatctggatatcctgctttgacggctcgtgacgtatatccaccagctgtacggttttgataagcccgtgtcttgccgagaaatactgctccatcatatctccccagttttctgtaactgatttggataccctggcataaccgtatcccggcaggtcaacaattctgaaatccccgttgatattatagaagttgattgttctggtcttgccggggcttcccgatactcttgccagagccttgcggcctgttatgagattgagaagcgatgatttgccgacatttgatctgccggcaaaggctatctctttcatattgtcctcaggatactggctgcgttttacggcaacagcctccagctgtgaagttttgattttcatttgagtacctaccttaccagaacctgatcaagcgcttctttggcgtttgaaattaaaacaaattctatctcgtttcttgctttttcaggtatgtcatcaatgtcagccttgttgtcagccggaagcagaacctttctgatgcctgctctgtgagccgcaagcaccttttccttgatgccgcctaccggaagcaccttgcctctcagggttatctcgcctgtcatagctatgtcttttcttaccggtgtgttggtaagggttgaaatcatagccgtgcacattgtaacacccgctgacggaccgtcctttggagttgctccctcaggaatatgaatatgcagatcctgcgtcttgtagaagtcctctttaattccaagctctcccgcaatagatctgatatagctgatgcccgcctttgctgactcctgcattacctcgcccagctgtcctgtgagaaccagcttgcctgtgcccggtacaactgttgtttctataaacagggtgtctccgcctactatggtccacgcaagtcctgttgtaacgccgacctcggtttccccttttattatatcatatctgtacttcttcttgccaagataatccgaaagattttcagaagttatctcaaagctctccgcttctcccgaaaccatttttctggctgtttttctgcacagatttgcaatctctctttcgagatttctgacacctgactctctggtgtagtaattgataaggtctctgacagcgccctctgtgatggttatgttttcttccttgaggccgtgctctttcacttttttaggtatcagatatctgtctgctatcgcaagcttttcttcttcggtatatccgcttacctctatgatttccattctgtcaagcagaggtctcggaattgtttcaactgtgtttgccgtagttataaacattacttttgaaaggtcaaacggcacctcaaggtagtggtccgtataatccttgttctgttcagggtctaatacctccagcagcgcggaagcagggtcacccttatagtctgctccaattttgtcaacctcatcgaacaggaatacagggttgttggtcccggcatccttgagtcctgaaataactctgcccggaatagcacctatatatgtccttctgtgtcctctgatttcggcttcgtctctgactccgccaagggacattctgaaaaattctctgttaagagatcttgctattgatcttgctattgatgtcttacccactcccggagggcctacaaggcacaggataggtcccttgaggctttctgtaagcttcattacagctatatactcaagtattctgtccttgaccttttcgagtccgtagtggtcttcttcaagtatctcctcagctctcttgaggtcaacctctgattctgaggatttattccaaggcagcgcgagtattgtttcaatatatgttcttgaaaccgtgctttctgccgacatcggctgcattttagtgaagcgtttgatttccttttcgattttctgatgtgttttttcaggcagatgcagctcttcgagttttttgagccactcgttctgctcgttttcaacatcctcatcaattcccagctcgtcctgaatagctctcatctgctctctcagatagtattctttctggttctggttaacctgactcttgaccttggcagagatgtcctgctcgattttcataatctcaatttctcttatgagaacctcatagagcttgtttaatctctcgcagacatcaagcatttcgagaagctcctgcttctcctcgattttaatatcaaggtgtgatgccactatgtccgcaaaggttgaaaggtcgtctatttccttgactgtaccaagggtttccccattgagcttatgagtaagctctgcgtactcgtcaaaggctgtctcaacacttctcttgagcgccagtatctgcggtgtgatttcctccggtatgatttcttcaacgtcttcaagagtgcatttgatgtacggcgactcctgaagtatttctccgatttcggctctgtaaagtccctctacgagaactctgattgtatctccctgaagcttgagcatctgcttgatttttgccacaacacctatgctgtagtaatcgtcttttacaggcaactcaacatcctcgtctttctgtgatgtaaggaaaatcttctggtttgtaaccattgcggtttcaagagcctttacggatttttccctgcccacgtcaaagtgaagaaccatattagggaatatgtgaagtcctctaagcggaatcataggaagcgccataacctctgacggctctccctctgcctcttctgcggctttttcttccatatccagaagctcgtctaataattcttcaatgtcatcaggtatatttatattgtctttctttttttcatctgtcatacataatcctccagctgatatatgtaatgaataaggcgacataatgccgccttcactttatgatgctgtttctctgctgtcttcttcagatgcaaagactaaagtcggctgaacactgccagtgattgttccctctgtaacgatgcattttgcaacgtcctctcttgacggaatttcatacattatatcagtcataactttttcaattatacttcttaatcctcttgcccctgtttttctttcgatggcctgctttgcaattgctctgattgcctcaggctcgaattcaagttcaacattgtctatctcaaagagttttttgtactgctttacaagcgcgtttttaggctctgtaagtattctcacaagggcgtcctctgaaagctctttgagtgttactattgcggggagtctgcctataaattcaggtataagtccgaatttcagcaagtcctcaggctgtatctgccttaggatttcctcctcgtcctggttctgtgaaacaatatccgcattaaaacctattgttttttcacctattcttctctgtattatcttgtcaagtccttcaaatgcgccgccgcatatgaaaaggacattggtcgtatcaaactgtatgaactcctgctgtgggtgtttgcgtccgccctgaggaggcacgtttgcaacagttccctcgagaattttaagcagcgcctgctgtacgccctcaccgcttacatctcttgtaatggatacattctcggatttcttggcgattttgtctatttcgtcaacgtagataatacccttttgggctttttctatatcataatctgcagcctgaagcagtttaagcagaatattttcaacgtcttcacctacatatccggcctctgtaagagctgtggcatcggctattgcaaacggcacattgagtatttttgccagtgtctgagccagcagggtctttcctgagcctgtaggtcctatcattatgatattgctcttctgaatttcaatatcgttattatctttgtcaagatagttaattctcttgtagtgattgtagactgcaactgccagagcttttttggcttcgtcctggtctataacgtaatcactgagagtttcgcttatttccttaggctttggtaatttaccgtcgcctgcttcgtatttttcgttttcttcagcttctatgccgtcttctattatttctctgcaaagctgtacgcattcatcgcagatatatacattaggtcccgctataaggcgtcttacctgtccctgcggcttgccgcagaatgagcatttaagctgttttttttcatcatatttatccatatacacgcccccttatctgctctttataaccttgtctataatcccataatcacaagcctcgtctgcgctcataaaattatctctgtcagtgtctttttcgatgacctcaagcggcttgcctgtgtttgcgctgagtattctgtttaatttttcttttgtctttattatatgctcggcgtgaattttcacatcggaggcctgcccctgtgctccccctaaaggctggtgtatcataatctccgcattaggcaacgcatatctcttgccttttgcgcctgccgaaagcagaaatgcgcccatacttgccgccatgcccacacatattgttgaaacctcaggcttaatatactgcatcgtatcatatatcgccatacctgcagtcactgaaccgcccggcgaatttatatatatgctgatatccttgtcagcgtcttctgcctcaagaaacagaagctgcgcaattgcaaggcttgcagtgtgctcggtgatttcctctccgataaatataattctgtcctttaaaagtcttgaataaatatcataagagcgctcccctcttgcagtctgctctattacatatggtaccaatgccatttaagcacccctttctaattacgctttaaccgattgggcatgcccaatcggttaaaacaatatctttcttaaatatatttaccagtaattctttatttaataaccgctttttcaaaaatatagtcgatagcttttctgattttaatatctttttcgatgaaagcgatattgtcaggtccaagcatttccttgatcttgtcggcatcaagctggtactgcattgccataaagtcgatttccttgtcaacatcttctttgtctgcctgaatgttttcctgctctgctatagcctgaactatcattcttgttttaactttctttgctgcctcgtctcttacctgttctctgaaatcagcagtgcttgtctgcagatattcgaagtatttctcaagtgacataccctgtgctctgagctgctggtcaaattctctcatcatatttgtgatttcgtcttcaaccattgcatttggaacatctaagtcatttgcttcgtataccttttctaaaactgcgtttttcatttccatttcagcgtttgcctttgcagccttttcgaggttttctctgatctgagccttgaattcatcaagtgtatcgcattcgcttacgtcttttacgaattcatcgtcaacttcaggaacttcttcttctttaacttcgtggatcttgcacttgaatactgcttcagcgcctgccaggttctctgcgtgatattcttcagggaatgtaaccttaacgtcaacatcgtctcctgcttttgctcctacgatctgttcttcaaatccaggaatgaatgtgcctgaacctatcttgagcggatatctctccgctgtgccaccctcaaactgctcttcgccaacatatccggcatagtcaagaagaactgtgtctccgtcctgtataggtctgtcaaccagtaccattcttgagtttctcttctgaagatttttgatttcgttatctatatcctcgtctgtaacttctttttcaatcttgtctatttcaacgcccagatagtccttaacttctacatcaggatatacctcaacctcaacgttaatgataagatccttgctctttgcaatgtcttcgaatgaaagcttagggctgtctattacctcaaggtttaattcgtctaaagccttagggtagttttcctgcataagtgaattgattgcctcgtcaaagaatataccttcgccgtagtgcttctctatgatgcttcttggagccttgccttttctgaagccgtcaattgcaaactgatccttagtcttctgatatgccgcaatctgagccttttcgaactcatctgctgtaaattccattgagaacttaacaacgtttttctcttttgaaataaatgttgatttcatttgatatatatcctcctaaaattgttaacgtaattaattaaaataaagcagactatattataacctcttttgccctaaaagtaaaggatttcaatggaaaaagccctaaaaaccatacaaaaaacagccgctgtacaaaaaaactatatatacaaaatactttgtttaaactgtatacatgggaacttcaatttatctgatttttaattccgatgccctgaaatatccgtttttcatatccgcagcgggttaatccatatccagcagagcaagccctctggcatatttgcttatattttcttctttgagattatatgatttctgtatctgttttcccagcttcacaaggtcttcttcatttcccgaataaagttctatttccatttcgcatataggacacgagccatttgccgtaattatatctccctggtctattgaaacttccatcagactgcctttgtaatcaatcctgaattcttctcttgcaaaattcatttccattacaggtataagtttcttatctgtaatttcggccggtatatcatcaatcagctcatctcctgaaaaaattgaaagtgtgggattatccacaaaatcatcatctgtaaccggagcgtttatttcttctcttttatgaagtcctgcttcggcgctgcttcttcttttgagtgttgcaatatatctgcttccctcaagtcttattctgaaagctatatggttttttcgaagatctgcttcctcggtatcaaaatacaccgcgtgcattgccagtgtttcccttgaattctttttttcaatagaggtaagtattctgtcctccataatacttcgtattatactgtcatcttcaatactgtatttaagctctatttccattttattccctttcctttgctgttcctaacaaatatacccttatttatatcacattgcagaaattattgcaatacacaacctgtttaatcattgtccaaaagaacagcggttaaagaaatctttgcttaaactcctgacaattttggctgcccagaatattacagtactaaaaaacctgccttgtctggcaggtttaaatatcaaatcaattatgcgcggttaactttgcctgatctcatgcatcttgtgcaaacgttagctcttctaactgtacccttttcgtctacaactcttacagtctgaatgtttgcattccattttcttcttgtgtgtctcattgagtgtgatactctgtttcctgatacctgacccttaccgcagatttcgcattttcttgacattgttatgtgcctccttaaatattactaaagctttcgcatattctcatatttctgctgcctgccggttccctgatagttctcaacttctatctgagcttacgggcttacacccagcgaacatcaaacattatactatgtttcggataatatttcaagctgtttttttataaaatactgtctgaccgccaaaatttttcactaaaaagcggctgatttctcagccgcgcatttatctgttatgtatattagtacagatttgcaaagatttctgcgatttcttcttcgcttaagaatacatagttgtttccaagaagtctctgctggttgtctactgttgacttagcaaacggagcaacctgatcttctgtcatgccgtactcctttaacggtttcttttcgataatcttgccaaggaattcatctaatgcagtgtatacgtcagcttcgctgcatcctaatacgtctgcgaaaatcttgttaacgatttcgatcttgcccttaggctgttttctcatatacatcttgaatacttctgtgaagcagatgaagttagcttcgccgtgaggaatgtggaatgctccgccgtgtgcatatgataaagcgtgaactgcaccgcagcctgcgttaccaaaagcaatacccgcatagtttgaagcgattaagaaatcctttaataaaggctttctgttttctgctgtgttgccgcctgctgcaacaatctgcttgtatccgttcataatcatttcgattgcctttaatgaatacatttctgtgaaaggtgaagcctttggtgaaaggaagctttctacagcgtggattaaagcatctactgatgaagtagcgaatactttgtcaggaagtccctgaagtgattcaggaataagtactgcgatatcagcgtaagtctgctcgtcagcaatacctttctttaagttaagtgacggaattgaagctaccgctacgtttgtaacctctgaacctgtaccgcatgttgtaggaacaactaccagctttttaactctcttaggagctaccttaccagtgtaaaggtcagctaccttatcaggaatttcacaagctaaaaccttgcagcagtcaacgattgtgccgccgccgaaagctatgattctgtcatattcatatttgtccatttcctgtttcatagcatccatcatttcatctgtaggctcgccggcaccgtatttttcctgataaattacaggcatatctattccaagcggcttaacatacggatcatacatccactgatttgttacaaggatgtctccttttcctaatttgaattcttcgttgaaatccttaaaagtgtcaaaataatggattgcaggaactactcttaatgcttgcattttaatacctccgaaatttaataaaataactttaaacttaacttatataattaatattctactttgaacatttttttaaagctttccttaagttcatctctgaaatcaggatgagctatttcgataagagctcttgctctgtctcttacagtcttgcccttgagtttagcaataccgtattcagttacaacatagtcaacatcgtgtcttgaagttgtaacaacctgaccctcgccaagaagcggagtaatctttgaaagcttagtgccgtcttttttaactgttactgacggcatggcgattattgctctgccgtttgtacccatagcagcgcctctgatgaagtcaacctgtccgccgactcctgagaactgtctgtagccgatagtgtctgctgcaacctgtccgtaaaagtcaacacctatgcaggcattgatacttaccatattagggttctgtgcaactaccatagggtggtttacatagtcaacaaccttaagaagacactcttcattgtggtcaaggaaatcatatgttttctttgaacccatagcgaagttgaatacgaatttgcctgtatctatagcttttttgctgttgtctatcgcacctgcctcgtaaagcaggataggtccgtcgcccagcatttctgagtgtatacctaagtgcttcttgtttgtaagctggtggcatacagcatcaggaatagctccgataccaagctggagagtatctccgtcgtttatgagctctgcacaattcttgcctatagcttcttctacaggtcctatctttgcaggaggaagctctacaagcggagtgtcctctaaaacaaacgcatcaatctcatctacatcgaagattgcatcaccgtatgtaaaaggcatattattgttaacctgtgcaagtactactcttgctgattttacagcctgaacagtatagtctgctgatacgcctgttgaaaccttaccattttcatcaggtggagttaccattatcatagcaacgtcaactttaatatcgccggttctcataagtattggaatctcgtggaaaaacataggtgtaaaatcaccgtttcccgcttctatgcactttcttgtgttgccgcttgcaaaccatacatttgtatggaagttttcagcatattcaggatttgtatatccgcctgaaccgtggcttaccatatgcgaaacttctacattcttgtatgccgcgtggtttgcaaccatagcgtctacaagcgcaggcggttcacctatgcaatgtgcaagcacaactttgtcgcctgagttaatcatttttacggcgtcttctgctgacattattttgctttcataatattctttccaacccatttattgtgtcctcctattttatatatatctacaagctgtctcgcagctcgtttataatcttctctatatgctctgccgcccacatttttctgaccttgcccgaccatgtaaactggtcgtagcctgcacagcaattggtgcagcctcctataataagaaggtcgtcgtactgttcgtcttctgttgtgatcttaaactcaatatcactgtctttaagtctgtcttctatttctttgagcgcctctcccctgtcatatctggggttgcagccgccgcaaaatctgacaccgcatttcatatgttaaaatattccctcgtaaattttaatacagggaacggagcaatctccgtccccttgaatttccggaattatttgattccgattatagccttagctaattctttctttgcaggaaggttaccctgtcttgcaatcataattctctgagcctgtggtgaacctgcaccgtgtaatgactctgttctgtatccaactgctgatgaacctaagcagatgttttctaagaatctaagaactctcattctttcttcagttgtgcaagccggtgaacctgcgaagtacttgttgcagatttctccgattgtttcaccgtttctgcctacaggtacgtctgacttgaagtctttttctgatggcattgttaccattaatccgcctgcgatgtcctcagcaagtcttacgatttcgtaagggtatcttgttacattctgcttacatacgtttgcaagaagaaggtcgatctgatagttacctgcttctgtaggatatccctcagctgagcaagcgataccgcagcagtataatgtttcgttaagatgagtcatttcgatgagcttatccttaatgtgtgaagccttctgagctccgttgtagtcagcagcaagtgcagcagcaccgatgataacatcaccaacaccaactttgcatccgccgtatgactgtctgtgatatcctgcgaatctttctacgagcattcctgcgaaatcatattcttcacataagaagatgcagtcattaggaatgaatacattatcgaatactactaatgcttcctggccgccgaatttcttgtttccgagatcaacgtcagcgccgtcttctaattttctagtgtcgcatgactgtcttccgtagatcatgaacataccttctgcatctgaaggacatgcaaatgatactgcataagccttgtcggcttcgcccatagcctgtgtaggcattacaaggtgccagtgtgaattgattgtacctgtctggtgagccttagctcctcttactacgataccgtcttctctcttctctacgatatgtacgaaaagatcagggtctttctgaaggtgaggtgcaagtcctctgtctcccttagggtctgtcatagcgccgtctactactaagtcttcgttctgaaccttagttaagaactttttgaagttttcgtggtagtgagttccgtatttcttgtctacttcaaaagtagttgagaatacagcattaaatgcgtccatacctacgcatctctggaaacatgaagcagtcttctgtccgcagagtctctgcatcttaactttttttctgaggtcatcagcgctctgatgtaaatgaccgaatctgttaacgatttcacctgtaaggtttgatttggcagtcataagatcagcatactgagggtcctgtgcaagatcataagttaccttaacacagtcgattgatggtctgatgatcgggtggtctacccagttatcaatcttttcaccaaacatatagactcttgtcttcatttttcttaagctctcgatatactgttcacctgtcattagcataataaaatcactcctttttatattttagaacaaatccatctccttattgatcagcaaatgttcatttaaaactaaatctcgtggttaagaatttttctggccatgtccagcaggtcctcgcttactgtcgtgtccagtctgacatccttaatcccactgcactcgctcatcacggcatctcttaccacctgctccagcgtatcctgtgccgacggacactgcgcgcaggcgcctgtgaatttgatgtaggcaacgccgtcctctagtgcggtaagcatcgccccgccgtaatgattggctaatatggggtctactttctctttgagtatttttctgattgtgtcttccattttgttctcctgaaagcattagttgcagagatacctctacaagttagattatacctaaccttaaagtcattttcaagtacacttattctacttatttgtctaaaatgtggacttaattgcggtgatttccagtcgctgtatgcaaatccgaaaatattatgcagaattccgtacaaaaatttttaaatttttaaaattttttgtaccggcaagtatacattgcaaactctgccggaaatgtgttatcatacagacagcaaaagatggcacatacgctgcctatattatatacggaaaggaactttttaatatgtacgaaacaattaaatacgaagtcagagacggcataggctatatcacaataagcagaccgaaagcactgaacgcgctcaatatgcaggttcttgacgatcttcaccacgcttttacagaagtaaacgaggacgaaaacgtaagagttgcaatccttacaggcgagggcaaggcatttgttgcaggcgcggacattgcgcagatgtatgaattcgaccctattcagggaagaaatatgatgattaaaggtcatggtcttatgaacttcatcgaagctatcgaaaagcctgtaatcgcagcagtaaacggatttgcgcttggcggcggctgcgagctttcaatggcgtgtgatttcagaatcgcctccgaaaaagcaaaattcggtcagcctgaaacaggtcttggaattattccgggctttggcggaactcagagactccctcgtcttgtaggcaaggcaaagggcaagcttatgattatgacaggtgaaattataggagctcaggaagcatatgaaataggacttgttgagaaagttgttcccgcagatgagcttatgaacgccgcagaagagcttgcaaatacaatcaagtcaaaggctcctatcgcagttgcggttacaaagacagttgtaaacaacggctacggtcttgatatgaaaactgcaagcgcacttgaaatggaagcattcacagcgcctttcgcatcacaggataaatcagagggtatgctggcattcctcgaaaagagaactcctgaatttaaaaataaatagagctttaatatataaagacgcgcagcttcggatatttctccaaggctgcgcttattttttcacatatattcttctgccagcaccatgctgcctgcttctcttgtcttgttcatatctattatccgctgattgccgctgcctcgaaatctaagcgtcagatccctcttatctgcctcgtatctgccatcaataagcagatccgtaacttcaagcagtctgtctgtgctctcatcgttcatatccagaagctcctcataggtatatcccgtaaatgttactaccgacaagcctctttctctgattttctcacccagaaatgcaaactccttcgcctgacagaacggttcgcctccgctgaaagtaacccctttgagcagaggatttttgtctatttcttcaaggattttgtctatggcgcagtcatatccgccctcaaaatcgtgagagtccggattgtgacagtcggcgcagttatgaggacatccctgcccgaataccgcaaatcttattcccggtccatcaactatggactcccttataattcccgctatgcgaagtgtcgtaatctctttcataatatcgcctcatattctcaataaacaggtgctgcaagcgcagcacctgtcttaatttctataaatgtttaactctgtctttttcttctgcggtcttggcatcattccacatatccatagtgcctacaagataacctgtaattcttcttattctttcaaagcccacatcgtcatcttcctccttgcggccgcagtaagggcattcattgtctatcactccggtgtatccgcatacaggatctctgtctaccgggtggttgatggagccgtagcctatgccgttttctttcatgcatcttacaacctgctcaaatgcgtcaaggttcttgcaagggtcaccgtcaagctctatgtatgagatatgacccgcatttgtaagctcgtgatacggtccctctatcttaatcttgtcaaaagcgtttatattgtagtataccggcacgtggaagctgttggtgtagtattctctgtctgttactcccggtataattccgtatttctgcttgtcaagtcttacaaatcttcctgacagtccctccgcaggtgttgcaagaagcgtccagttaagacctgtttctcttgatttttcgtccatgcgctttctcatgtagcctacaatctgaagtcccatcttctgagcctcgacagactctccgtgatgacttcccataagcgccttgaggcattccgcaagtccgataaagcccatgctgagagttccgtgcttgataatctctgcgattgagtcgttaggtcccagcttgtctgagtctatccatactccctgtcccatcaggaacgggaaattcttgacttttttggagctctgtatcttaaatctctcgttgagctgatctatgattaaatctattttctgatctaaaagctcgaagaacagatccgtatctcccttggccttgattgcaagtctaggcagatttacagatgtgaagctcaggttgcctctgcctgttactatctctcttgacggatcatatacattgcctataactctggttctgcagcccatgtacgcacattctgtgtgataatcgccctctttgtagtatttgaggttgtacggagcgtcaaggaaagagaagttagggaaaagtctctttgccgaggtttcacacgaaagcttgaaaagatcgtagttaggatcctcaggattgtagcttacgccctcttttaccttgaaaatctgtatagggaatatcggtgtttcgccgttgccaaggcctgcctgtgttgcaagcagtattgacttcattaccagtctgccctcaggtgatgtatcggtaccatagttgattgagctgaacggaacctgcgcgcccgctcttgaatgcattgtattaagattgtgaataagagcctccatagcctgatatgttctcttttcgatttcctcatcggcaaatttaacagcctttttctgtaccttggctatatcttcctcaggtatgtattttttgagctgctctgcctcaagctcaagataattgttgtcccatgccatgcaagggcatacgccgtactgctcctctatatctgtacctatctgctttaccagaccttccttgtcgtctatgtcatacataaagtcaagtatttcggcaaggttcttccagtatgcgcgcttgtaggtctttcttactcccactgcaagtgcgtaatcgaaattcggaacggactgtccgccgtgctggtcgttctgatttgactgtattgcaatgcaggcaagagctgcgtagctttcgatgctctgaggctctctgagatgaccgtgacctgtgctgaagccgccctcaagcagcttgactaaatcaatctgacagcaggtcattgtaagtgtcaggaagtccatatcgtgaatatgtatgtctccctcctcgtgagccctggaatgagatggctttaatatgcacatcttgtagtattccttggagccctccgaaccgaatttgagcattgtacccattgcggtatcaccatcgatgttggcgttttctctcttgatgtcgttgtcctttgcgtcctggaatgtaaggtcatcatagatatgcataagacgggtattcatatctctcattctggtacgctctgctctgtaaagtatgtattccttggcggttctggcatgaccgttttcgatcatgactttctctaccgcgtcctgtatttcttcaactgtaggtactttatccgcatatttatcacaaagatacgcctcaacctcaatagcaagttcctctgccatatccttatctctgccgcctaaaacctgcgccgccttgaaaattgcgtctgcgattttttctctgtcaaactctactattctgccgtctctttttttaatcttcgtaatagtattcatcaatttccctccagatatcatttgtattgttttcgtacaaaccacaatatattgtgcttaactaatactattaaagtaaaaaaagcacaatttgtcaatcccttttttctgttttttgtaccggactttcatgcagaggcagcctcggaacctgccgaaaggttacaatttcaacggcaaaacaaagaccggagcaaagtccggtctgttaaataaatttacatatctctgttttcgaaaaattctgcccgcagaagcgccatgagctgcaggtcgtaatacctgccgtttttcttgcagccgcttctggcagttccctctttttgaaatctctgcctgcggaacaggcggtctgccgtatcattgtccctgataaagtcaacggtaactctctccatatgaagattgataaaggcgtattcaagaaacgcgctgagagcctctgtgccgtagcctctgcctctgtttgccttgtctgcaatatatattctggtgagatcaagagagtcctcctctctgtttatatcggttacaagtatcctgcccacaggtgtattgtcagccttggttactattgtaaactgcatcaccgtactgtcctcgtcatcaagaataaatttcctgacaacctctccgtagccctgctgatcacttatattaaagtatctggtaacttcgggatcagcctcccattctgcaaaataacggcaatcctcaaagactgattctctgataattaaatttcttgattccattaaaatttaccacctatttcgttaaatatctgtaaaacttcacaaatctatggtattattataaagcattttaattaataaataaacaataaggggtaaatttatgtgcagaaattttaaaaaaatcatttcggtgctgcttatattgtccctgctggcagtatgcggctgtaccaaagaaacagatgagccaaacgttcctactacagacgagcttattgcatcacagtacaatgatctgattaccgatgccggaagcgaaacagacgcgggtaaaatcatagactatgtaagaagctgggcggaggataacgatatttcctgcgatacggcttcaaacggcagcctagttatgaaattcaaagcgtccaagggctgcgatgaatatccgtcaacagcgctgcactgcagcataagcgggacagataacgaaaacgaaatgcagtatcttgccgttatgatgtatgccgtaactcatctggacaagcacggagagctgtcagcgatagtttctcccgcagataccaaagctgacattgacaggaaatatatcaaaaccgataatttcataaatcttgaatacagtgaagatgacctgtcgcttctgacttcatgcgcggcctcgtcaaaatacagactttcacatagaataaactatacctcaccgagatatgatactgcctacagaattacaattaaaaacctcaagggcggcaaagtttcggctcttgaagaaggtcatccaaatccgctgcttaacataaacagtattcttgcaaacttcaagacaaacggactgctttacgatctggctgaatttaagggaggcacctcctctgacagctacggcacaaaagcttctgccgttgtggtaatatcccggtcagatgccgaaagcttcgaaaagtgtcttgacaaggccattgcaaagtttgacaaaaaatggggagatcttgaggagggctatgaattttcatatgaacagacggatatgccttcaagggttatgactcccgaaagcgccagcgatatagtaagcctgttttacactatgctaagcggcgtatatctcacagacgaggatacagatgaaacagtcgcttatacaaatataggcaggctgtcgataaaaaacagcatagcttccgtaagaataaaggcggcaagcaagtcctaccctactcttaccgaaatggacgatgccgtaaagaccatagccgaaatatccaatttcagctacagaaaaacttcttcatcggtactgtggaaggaatatgaaaaccgcggacttcttggttcgttccagtttgccgcagatgaaataacaggaaacaaaatagcggaagcaagcacctttgaaacgcatctctgcggggtattaaaggacagaaacaacagcctttccctgctgtcctttggtcttaactataaccactgggacgatgcagcaaacacaataatagaatttcttgaggatataacggcggctgatattgtttcacagtatttcggagccgaatagcatctcgaataaaaaaagaacgtatatgagattttcattacgttcttttgttatgctgttacgagtctttgagcacccttatgatgtttacggcattaaccataaacgcctcctcgggctgcgcgcttctccttgactcactccagaatttttccttgtatctttgcagcacttcctcgtcagaaagtccttcgctgtacagatttttgacaaactctctctcctttgcggcatttttgataaatctgtcaaagtacgtatcattaaagaattccggaataatcccgaaatgcggcgttattattctcttggccccatatgccttgcatttatgagcgctttcaatactgtcgctgtagcttttgagtattgcgctacaaacatcctgatcttcttctacaacgcctgtactctcacaggcgaacataagccctgcaggctctaaaatatagcacaggcagcagtcggtgtgaccctttgcctcaagaacatatatgtactgttctcccagcgacaccttgtccccttccgaaactacaatatcaacggcaagtccctcaacgggtatctcatttttgcttttgctgtaggtatgctgcgcttctgtgccaagccttttgatagtccgtatggctccctctctctcaaagacagtctttgccttatagcttccgacaaccttagcctcaggccactctctccgtatatacggcagcgcgcccatatgatcatagtgggtatgagttatgaacacatagtcaagtttgcggtctcccagatacctccttgtgttctcaatcatctgctctccgcagtatgccatgccgcagtcaatcatagctgttttttcgcaacaggtaataagtatggcctctccgccgtagccagccgtaactctgtgaattccctccgggaaatcaaatctgtcatatcctttaaaatctctaaaaaaagcatcgtttgaaggtgctgtttcttcttttttaatttcgctcattgtaaaaaataccagtcctgtctatataattatatatgtaaggtaatatgcaaaagcacaacggcagtcgcttcacctgctgattgccatgcaaaacaaacactttacggtgtaatgtcataccatgttttcccttcatctgttgtccggtaaaccttatccttgtttacatagataaactctttaattgagccatcattcccatatgtatagtacgcaaaaccctgattctgattttgaccatgccaatcctccagtggataaaacgggctttgttcataggaggccggctcaggcttataggaagcaagtttatctttgaaggctgccgagtccgcataataaacacgcgctgtaacagtggcgccattaacctcaaatgtctgtctggagaaaaacgccttattgttctgcatattgctgtcattaagcctatcaaatgcatctttgagcgttgatatagtaccatcaagatttccggtataggtttgctgaccggagccaccgccggaaccaccgctccagttaaagatcgctcctttatctttgtcatatgaaacctcgcaggttccgttgtttcccggagttcctatccagttgcctgtattcgtgccgttgaaagcaactcccccgattgtgattgggagttttgtctgccagccggataatttctgattcagcccgacagtaattgcatccgtatttccgtctgtatcaagcaccctcaccatcaactcggcatatgctgctctgacattcgctatatctgccgcctccctgcttttttccagctgagctgtaaagacaggaactgaaatcgccgcaagcactccgataactgccacaacaattaagaattcaacaatcgtgaagcctttttctttcttttggttctctgcttctttgtatatcatattaatctcctccatactcattgatatggcagggcatcattatatttatcccctgatattatctgtctgaagcagacaaagcgacacctctgccatcggctgaataagcggataatccacattgcttttctttatattttatcatctgaaaacaaaaaagtatagaggcagtttacgggacagattcaggtattctcaaggtatgcgttatctcctgccgcagcttattacaggcgggtttgcacagcttcaggcgcacttttttcttttttaatttcacccatagtaaaaaacaccagtcctatccatataataataaacgatatcagctgaaccatatcaaaaggctcattcattatgaaaatccctataacaagcgctatcgaaggcgacagatactgggttatgcccagcgtcgtaagaggcactttctgggcgcttactccaaacagtcccagcggaactgccgtaagcactccgcacaaaagcagcagtacatactgataagtctctcctgtgtcaagagctcctctgccggtaacttcaagatatatgattacagccagcgctatgggcataagaaataccgtttcataaaacagcgaaataagcggcggcagctcgcttgtttttttgattgccgcataggttgcaaaggaaagtgcaagtccaagtgcaataaacggaatctgcataaaatgaatgagtattaccgtaagcccgactcctgcaaatatgatggcgattagcttgtgcttttcaagcttttctttaaaaaacacaataccgaatacacataccataagcggctctatgtaatatcctatgcaggtctgtatcacaaaatcggcatttacggcccatatataaaggctccagttaaaagtgataagaagtcccgccgatatgtttctgagcacaagccttttgtcatgccatggttttaatacttccttaatcccgtatattccggcagaggccgcaaagcatacaagacctacaaggaatatccggtaaaatattataactcccgagcctatgggtcttaaagcctgccagtacagcggcagcacaccccacagcgcggagcagaatatcgcagcctgcatacccttgatgtaatcttttttgtctgtcataaactacctcgtctaaatctaagccaaccatataattttatcaccggatataaaaaaaagcaagccgcagcctgctttctaaaatagccctccgaggaagcctcccttgccgttgttacagctgcagaggagatatataattataagtatccacagtatattcagccctccgccgtcgtcacagcagcatttttcgcagcatttatccctgcatctgtcgaagcattccttttcgcagcaatctcttctgtctctttcgtcacccataaaaaaacctccatattcattctaaattatactatgcaggtttttgtaatctgtgattagtattcatctgaaaattcatcatcaaagagaaaatcgctgtttaaaagctcctcttcctcatttcccggttcatagcctgtgtctccgtcagcatccgatgtaaaggatacaacatattcatcaaggggataatcaaggcactccgaaaaatcatacatatattcatcagctctcagcttttctattctgtaaagcacaagagcctctctgaccggcactgttctggtgcttccgtccttcctgctctgacattccacgtctgtatcgaaattgtaccagtttctgaaacgggaaacctcatccgtaaacagcactatgcttctctcatcatcagtattttcggcatagcccttaagcaccctctttatattgtcaagcagagtaaaaagctccgcctcttcttcgggaactccctccattatatcctcaaaatagttgtctgtaagctctgacagcacatctgtatcaacctcggcaaacagttcatacatcacctctgccagtatataatcatcgctttccatcagagctgcaaaattatcaaaatacttaaagtcctcggcgctttctatatccactatctcaaaaagttcattcaaatccattctcccacttatattcctttcttttagatgatataatactaatacatccagtacattattgcacatttacggtacgaaatcaacggcagcatagcattaacccgaactttgcgcacaatttctacgcatattccgtaaaatcaaaactgaggacatatacagtcttttggggaggtatgagatatgataaaaaaatgtttcagatgcggctcggataatctcgttaaagtggtatcggcaaaatcgcttgtaataccggagataaaacgcgaggttgaaagcggagctgccgaagtcagctgcggctgcgcggggtttctttcatcgcatatgacaagatgcaggaattgcggatttgaatgggatgatattatggagcgacagatgctgcagcgggaataaccgttacatccgttaatacctgcttcagaggccgccgcatggcggactttaacagaaatatacttaaacataaatcaggaggatacaaatggcagagagaaataatatagagcagaaatacaaatgggatatcgaggctatgtttcccgatgaagcgctctgggatcaggctgtagcgcagtcacttgaaaaggcagaaagcttcacaaaactttcgggacatctgacagacagcgcagatactcttttaaaggctttcagactgcgtgacgatatgtggcagcagctggaaaaggcatatgtatatgcaagaatgaaaagagatgaggacaacagagtttcaaaatatcaggcaatgacagataaatgctttgccgctatcgcaaagatgtcggcggtatcgtcatttttcacacctgagctgcttgaggctcccgaagataagatactgggatttttaaacgaaaacaaagaccttgaaatctacaggtttgcaataaccgaaacactcaggcaaaaggctcacgttctgtcaaaggcagaagaaaacataatggcgcagcttagcgaggtaacaggcgcttcaggcgatatattcactatgctcaacaatgctgacattaaattcggcacaattacaaacgacgagggaaaaacatcggagcttacccacggcaactacatcacatttatggaaagccacaacagagaggtcagaaaagaagctttcacacatatgtacgaggcttacaaaaatcagataaacactatagcaacagcctacaactacaacaccaaaacagacgttgtaaccgcaagaataagaaaatatgagtcggcaaagcacgctgcgctttcaggtgatgatgtggatattgaggtttacgataaccttattaaagtagtcaacgacaatctgcctgttcttcacaggtatctgaacatcagaaagaagcttcttggcgttgatgaaatgaagatgtatgacgtatatgtccctctcatagagcttcctacaaaagatgtcacatttgaagatgcggtagagcttgcaaacaagggccttgcccctctgggagaggaataccttgagagaatgaacaagggcatagcttcaaggtggattgacgtatacgaaaacgagggcaagacaagcggagcatacagtttcggaagctatgactccatgccgtatatccttatgaatttcagcagcaccctcaaggatgtcttcacgctggttcatgaaatgggacattcaatgcactcaagctatacaagacagtatcagccgttcatatacggaagccactccatatttacggccgaagttgcctcaacggtcaatgaatcactgcttatgagatatctgcttgataacgaaacagaccctgaaatgagaaaatacctgcttaatatgtatatcgaagaattcagaaccacccttttcagacagactatgttcgcagagtttgaggatatgactcacaaagccatcgaaaacggcgaggtgcttacggcagactggcttaacgaaaactacaatgcgctcaacaccaaatacttcggtgatgcgattacagatgatgaatacattaaatacgaatgggcaagaatacctcatttctatactgcgttttatgtatataaatatgctacaggctattcggcagctacggcaatatcttcaaaaatactctccgatggagaagctgcaagagataattatatggaatttctcaaaacaggcgattccaacacccctatagaacttctcaagatagccggagtggatatgagcagccctgaacctatcaaggcagctatgaaagtatttgcatcacttgttgatgaatttgaaaagcttgtgcttgcataatacggcataccttatctatacaggagaattattgtgaacagaatagtaaatattacagcaaatgatactgaactgtcattaaaaacaaagacaagactttcggcaatgctcgaaaaagcaggctttatagtaagcaaagaattcaatcatcacgcggaacttacagtgtgcataggaggagacggcgctttcctgcagacaatgcatgagcataatttcccctctatgcccataatcggcatcaatacgggacatctcggcttttttcaggaaatatcaccggataagcttgatgatttcatattcaactatacacagaatatgtacaggcttcaaaagctgacaacagtaaaggcaacagtaaaaacagaggacggcgccactacagagcacatagggcttaacgaaatagtaatacgtggctcccactcctactccattcacctgaacatatctataggcgacagcttcatagagcgtttcagcggtgacggaatactggtagccacaccgtcaggctctacagcatacaactattcacttggcggctccatagtagacccgaggcttaatctgcttcaggtaacccctatcgcccctatgaatacaactgcctacaggtgctttacctcaagcatactgcttccatcagacctgtcgcttggtgttatccccgaaaacataaaagacaccactatatatatagacaatgacggttatgaaaccagatacgaaaacgttaaaaacatcagaattgagttcgcagataaaatagttcagcttttgaggtttgatacttatgacttctggaacaaggttaaaactaaattcttataggaaaattaaatgaacaaatttgaatatatactgacggaaaacgataaagacattccaattaaaaaaattatgcgcagggagttcggattttcctcaaggcttatgacaaagataaagcagaataagtccgcatatcttaacggagagtcacttcccggctgggttacgggagatgccggcgatgttctcactgttatgctgcctgaggaaacaagcgactttgaacctgaaccaatccctatatcccctgtttatgaggataacgacctgctgattataaataagcagccgggatttgtggtgcaccccaccaaggggcaccctgctcacaccatagccaacggactgatgcagtacctcattgacactgaacagaaattcaagatacggtttataaacaggcttgatatgaatacttccgggcttctgattatcgccaagaattcccacgctcaggacagctttatgaagcagatgaaagcaaacaccatacgcaagaaatatatagctgtggtaaagggaattatacctgaaaatgagggtactatagacctgcctattggaagaccagaccctgacagagttgagcgctgggtaatgacagagggcggatatccgtcggtaacccattacagcgtagtagaaaggtttaaaaatcataccctggtcaggcttattcttgaaacaggccgtacacaccagataagagtacatatggcatatacaggtcacccggtactcggcgaccacctgtatggcggtgaaaatcctctactcatagaaagacaggcacttcactcccagtacctttcattcaatcaccctgtttcagataagcgaattgacgttgaagctccgcttcacgatgatatgcttaaactgatagaaaaacttcgaaaatagaaatcaccctgtaagcaagctactgtttacagggtattctttaaaattaagcatctcttgttattttatccttttttcaaacagcaccagatttacatcaggtatgccgttgaatatgcaagggacaattccagcctcgcggtatcccagtttgttatacagagctcttgctcctgtgttccttgcgttggtgtcaagtctcagagcaatacagttttcctgctttgcgagcttttcataaaaatccacaaatgcgctgcctatgcctttgcctgcggcctttgggtctacagtcagcgtatgtatcaccataattttatcgtcaggagcctcatatatgaaatctccgtcggcatatacgtccacctgctgataatttataattgcggaagcaagtatgctgccctcatcttcacagacgtacatatcatctcttgccactgcatctgctgccgtctgttctaccggatagacacctttaatccagcctgtagtaagcctgccgcagctctcctcattatgaatatgctcgtatatggctgcaatctgtttaatatctgttttttctgctttccttatattaatcatttaaaaacttccttttctttaagttcatcataatcaagtcccagtttttctattatctccctggtatgatagcctgcgggatagcctgcaaatttatattcgcactgacattcactgagctttactgatgttgcaagctgcttaacagttatattatcataggtaggcagtttaacatcaactaccatttctcttgcctttatctgctcatcttcaagcagagcctcattgagatcaagtacaggctgaacacacgcgtcataatgtgaaaacacctctacccattcatctcttgtctttgtcttgaatatgcctcttatctcagcctttacctctgcgatattctctggccatacactgccctctgttaaatcctctctgcctatggcggtgcagaactgcttccaaaacttaggctcaagggaacctacgctcatatatccgccgtccttagtcttgtagaaatcatatatacagccgccgtttaatctctcaccctctctaagaggctgtctgcccgatactaaaaatgctgctccgtctatgctgttaaacggtacgcagccgtccatcatagccacatctataaactgacccctgccggtatttcttctgtagtttacagctgccagtattcctattacagagttcagtgagcctacggctatgtctgcaatctggaaattcataagtgacggaccctctgcctccctgcctgcatgggatattatgccgcttcttgacatatagttgatatcgtgacctgcggcatcacgaagcggacctgtctgtccgtagcctgtaagcgagcagtagataaccgcagggtttacagcctttaaatcctcatagccaagccccagtctgtccataacgccgggtctgaactgctccataactatatcgtattctttcaccagctctttgactatatctctgccctctttagttttgaggttcagaaacattgtttttttgttgcggccaagccacgcctgacttgccgatatatcagtaccctcgataaacggcggatagtccgtaacgatgtcaggtttgctcgcagagcctattttaagcacctccgctcccatatccgccagcataagtgtggcataaggtccgggaagcagcgtggaaaagtccagtatttttaatccgtccagtgagcccatagtttatctcctttgaaatttatttattgcatattaccatagtatagcaaaacctcccctgtatcaagaggaggttttgtatataagagtgtgttttatcttaccggttttggcagacgttctactatcatattcatcagattgtctgtgcattttaacggctctgcaaattttgcgtcagctacagttacaagctgaggctctgcaggagttaaaactccgccgtagacttcataaagctcaccgtatttatatgcaggaagcacatcttccatttcacatgaaatatcataagtgtcctcaaaatcgaattccacttcgtatacgtgtgcgatttccgctgcgatttcccagttgttgaatataacgtcttcttcaatggctgcttctacaggctgaagtcttctctctgtatttgtgaaagtaccgtctgttgaagcaaagcctgtgcctggaagaattacatctgccgcttcagcagttgctgtcatatgagtatcaactaccgccataaactcaagcgcctctgcatcaagcatacctgcgccgacaggatcttcaccgaataccagaagtgccttaacgccatccatagcctctgcacctgctctgatacccatatcaacaagtccctgtgagttgttcttggccttaacctgaagtataccgtttctagggcttccgatatgtcccgaaacaacagctatatcagctataagtgcagctgcttctgttgttacaaggttctgtgcaaatactatcattgaatgttttgctgatatatatgcctgtgctacagctttgatttcatctgcaaccttgacgttttcgaggctctttgcaaagtcctcatagcctgccgcctgtactgcgctgccgctttctattacagtctttgcaatctgtttaagcgcattaaggtcattgtctgtatatacagcctttgcaaaatccatatgctgttcatatcccgcaggattaatcagatatacttctttgcctgcctctgcggcctgttttaatttaaggccgattacaggattgtctgcgaagttaaagccagcagctacaattacatctgtcgaaagcagttcgtctatagtgttaggtgaagcgtcaaatccgagaacctgcgctatgccgcttgctctgttgttgaagcataaagtcttagcgcccataacgcctgcaagcttcttcatcgcgtatgcttcttcatttgtaaatctgtctgaaaccgcaacagctacagcatccttgccgtatttagccgcagcagcctcaagcttctttgcgaccattacaaatgcttcgtgataatcagttgttctgaagccttctccgtctttaatcatagggtcaaccagcttgccctcaagcactgagcagtcaaagccccatttgcccttgccgcatgcaagtcctgcatttacaggagcttccttgtcaggatttgctttaatcagcatatctccgcaggattcaagctcaagtccgcagcctactgaacagtatgcgcaggttgtagctgtaatatctgtttcaacaggaacttcctttgcaaccgactgtctttcctgaagcgctcctgtagggcatacacttacgcactgaccgcatgaaatacagcctgactctgcaagaggtttttcgagagtcggtttaacaactgtatcaaagcctctgtgaacaagaccaagcgctccaacgcccataacctcatcgcatactcttacgcataatccgcaaagaatacacttgttaggatctcttactatgaacggatgatcgtcttcaaattctattttgttgatgtcgcctgcaaatctgtcaggtttaacatcatactcgtttgcaaaatctatgagcttgcattcaaagtagtcgtggcatccgcactcaagacatctgtttgcctccttaactgcctgctcttcgtcatagccgtcaacaacctctgtgaagttgtcttttctttctttagcttcaagctggctcattacaggtctgcattctctttctctgtcctcgaatgttctttctgtaatgtcgtgtctttcaactacgaaaggtttttcatatttaacatcctcgccgttaagatatgcatctataacatatgaggattttcttgcatctgcaatagcttcgattgctattgatatcttgtcgttaccgcagtctccgccggcaaatactcctggaatgcttgtcataaatgtttcagggtcgtatgctatcgcattctttcttgtcttgtcaagaccctcaaacatgcttgcatctactgcctgtcctattgcaagtatcatagtatctatatcaagatattcaaatttgccctctacaggtacaggtcttcttctgcctgaagcatcaggttcgccaagctccataacctgcagcttaacctgcttaacgtgaccgttttcgtcagctataacttctgcagggtttgtaaggttcttgaagataacgccttcttcttcagcctcaacgatttcaaccatatcggcaggcatttcatcct

SEQ ID NO: 3196 - DNA, 10060 bp, Unknown
  16S sequences of unknown bacteria
tatcccgggaggggagtatggacgactggtttgatattgatgtagagccggacggcaccttccgctcccacgactatgctgatcgggtgcccaattgccggaatacctggaaccgtctgtcccaggactattacgatctgggcaagacagtaatggaacttccggatttcccggagggaaaggcctcctttcctgggatctccggggaaagcgtctatgtttccgcccacctgcggttctgcgaccgggagtatcccgaggagtacagcatctttgtggaggatctgaaggtggatggggtctatgacctggcggagctgggtgctgtggctggagagctcaatgtccgggcagtaaacgaggatctcacccccgaaacagcagcctccatcatgctgaaaatccatgaactgaccgaggaggccggtatccggtacgcagtgatggacttctcactggaacggcaaaagaacagccgggaaccagaggattatattgccgcgccgctctttcctgtatcggagatcacaccggatgggctggctgagcggatccgggaggcagacgccgcctacaaagcctgggtggaagccgaagatgccgccgcccaggaagctgaaaacgcagaaaaaggcacggcctgagccgtgcctttttatttaagagggagaatctttctgaccgctttgccgcccacttcctctccacagtcagggagggggcgtttgtgggggaaccgtaggttcctaccacatttgagcgaagcggacgtcccgccgcagcggtcggcggagccgtctgtggccgcaggccacggggcgtttgtgggggaaccgtaggttcctgccgcattggagcaaagcggtgctccctcacaaaattctgttttacaaaagaaaaaggcatccattcggatgcctttttcttttggtgggagaagatggattcgaaccatcgaagtcagtgacaacagatttacagtctgccccctttggccgctcgggaattctcccatatacaaacccaaccgaagctggatcgttttgtggagctggtggacggcttcgaacccccgacctgctgattacaaatcagctgctctacctgctgagctacaccagcttggtttcgacaaatgctattttatcataaccatctaccagtgtcaagcctttttttgaatttttttattcagcagattttcccagttccacactccgatcccggctgggtttttatattctgtatggcgttaatgaaccggcttttcgccttcccgtgcccgctttaccagattgtagaactgggtctcatagtagcggtaaccctcttccccgatgacaaagggattgggtacgccgtccacgatctcccgtaccacccgcagacgggccaggccctgatccagacagggatgggtggcaatttcagcgtccacatgctcttcggcacagatggcgctgaacttttcgagcgatgcctcatagtcgtccacattgctgtccggaagcagtccggaaccaccccagagtgctgctttgtgcggacggccctcgtcggtcaccggaatgatgaaggagaaacagccgatggaatgacccggtgtgaatacgcagcggatcttcacatcgccgaagtccagctcctcgccgtcctccaggaagtgatccacctcaaaggtgatgggcggccaggggaaccgctcgggcatattccgggcaaattcccagtcgatcctggacatgtacagcttggcgccgtacttctccttgaagtagtcacagcagccatagtggtcgccatgtccgtggctgatcacaatggcatacagatcatgaatatcaaagcccagatcctcaaaggccttttcgatgcagttccgggacgccagatcgggatccatgcagtccagcagcacataacccttggctgtttccagaataaagcagctcaccagctcatttcccacaaaggagagctgatcaaagaatttggtcgccgggaagtcaggcaggttctgcttgctgaaatccggcttgatggtatggggttttctccaggttgccataatacacactccttttcgccactcaggcagccagtgcgctgactgccatgcatactaccggaagggtgatgatacaggcaatggttgtgacaaaaatacagatgatgctgtattctccgcagcagccattggactttgccagcatgccaatggaggtcatggtgggcatagccgaaagaatggtcatagtcatagccatttcggtgtccagcagtcccgatgcctgcatcagcaaaaagaacagaaccggaaataccagcattttgatgaccgctgcggcatagaactccttctgacgcaggctctgcccgatatccataaagcagaatacaccgcccagatagatgagtgccagcggcgaagtgatgctgcccaccttggtaagggcttccatcaggacaccgggcatcggcagtccgatcatcaccacgatcactgccagtacaatggcaatggtcgctgcattcaccagccgccgcagattctgtgccggtgccacgctgccccgtttttcagccggggtgagcagtgtaatgcccagggtccacatgagcagctgatccacaatggtaaatgccgcaatgtacagcattccccgttccgggaacagcatggcaatgatggggattccaataaagcccacattgccgaacatggtggaggccatgaataccgatgccttatcgccccgcaggccaaaagcacggctcatgccccagcacagaagcgccagcagcagatacatcacagcggtggctccggtgaccggaagcgattccagcaggctttcccgggtgacgccggatacggtattggtaaacagcatcaccggcagggtgaccttgatcaccacccgggaaacagcgtgcagtcctgcttcgtccaggattccgccctttacggctgccacaccaatggccccgtaaattacaaaaatgaccagctgataaaatacgatctgtgcatactccatgaaattattctctgctcccatcctctttgagattttcctgaatccgttggagcatatccagcagcgactgtctttccctggaagtaaagcccttaaacagtctttcctccagcttggtaaaggtatcacggaccatctgtgccttctgtctgccggcctcggtgagccatacctgactgacccggcggttatcctgtgggatcttccgctgaaccagaccgtcccgctccattttattgagcagcgaagtcaccgatgccgcttccacagaacaggcatgggcaatttccttctgcatacagccatcgtgttccagcaggaattccagcaccttgggctgtccgctggacagcccttcttccgctacccgttccagcagtttccgtgccagaagctgttgattctccaacatcaactgatgataagtcatccggtttttcccctttcctcttatcacaattagaattataacatttaagattctaattatcaagccgcatttcacagatttattataacaaaaaaagccggatacgcatatccggcttttggaaggacgattcagattgcagcggaggtcagctccgtgtggcttcctctgccatggcagaccgcatacccggtacctgagcagcactcatggcagtatgcttgatgggccgccactccaccttgcgcaccagggctacaatggcaatgggcacataggtgaacaggaacagcgggaaggtaaaggtatagaagatcttctgcttggtggtggcagcgatcttcttccactcggtgatggtggtagccgcgccaaaggtgaacaggctgatatagaacatcacaatggcagagatcacagcgccgctggcctcatggaaaatccggcgggcaatataggccggctcggtgaagcaggtcaccagcagcatcaggttcattgccagcatcaccagggtgagcagcatgcccggtgctacggtcatgagcatatcatagcaggagaacttgttggtcttgttggtaaagcagcccttgagcagggacaggccatacttgaagtccacctgatagaagcccttggaccaccgcagacgctgatcccaggactgcttgaaggtgaccggctgctcgtcgtagaggacagcggtttcgcagtagccgatccgctgacccttgagggcacagtttgccgagaactcaatatcctcggtgagcagatgatagggccagccgccgttctgctgtaccacttccgccgagatcaggaatccggtgcccgaaatggcacagttggtaccgatgagcatccgggggaagttcaggaaccgggcttcccgcatgaaccacaggccataaccggcactgatccagttgtcggcaaagttcttggagttgcggtagctggtgagagcctgataatcgccggtatcaaataccttgttcatctcattgacaaagttggggtcaatgatgttgtcggcgtcaaagacaaagaagccgtcatagccgctctcaccgatgtcggccttcagctcatggagcagatagcccagtgcatagcccttgcccttgtgaacggtatcaaaccgctcatagacagtggcaccggcccggcgggccgcgcctgcggtatcatcggtgcagttgtcggctacgacatagatgtccagcagttcccggggatagttctgggaggtcaggctgccgatgagctcgccgatgacttcctcctcatttcttgccgagatcatcaccgcgtaccggtgctgcttctgggccacaaagatccagggcttgcgcaggcttaccagaccatacatcagataaaccagctgatagaaataggccgcgctgatggtgagcgccagcacaaaattaaagtacgaaatcagttccagcattccactctctccaattttcactcatcaggacagttgttgtcccgctttccaaacttgcattccatctttacggggtgtcatactgattatagtgacccgctcccccaatgtcaaacctcgattttcccgtgtttttcccgtaaaattcaggttaattctgggaaaactctcatatttctggaaaattacccggcatttcgccggattcctttgaaaaacagcgcttggttttatgcaatccgcaaaagcctgcgctgtttctttgtcagatgtaaaatttctattattatgttatatgcacataaaatcagatagttttatgtgcatattgcacatatatgagcgtgattctattcccaacggaaggtttcgctgtcgccgaactccgaatcctcggtgctgtcatagacgctgcccagcgccttgaccttggcatagaaccgcttgccctgccaggacgggtccatttcggtgagcaccagctgttcctcgtccacatcggtataaacgctcagcagacggtcgctgcccttgtataccaccacatagtagccgtcattggcgtccacatggctgtactccagacagaggtacccatcttcctcatagagccagacatcttccggcgtgtccagctgcaggctttcggtgtccagcagcgaggcctcgccgttttcgtccgcctcatattcctgatccaccttcaccgggtcggcatagccccgcttgacagtgatgttgtccgggtcgacggtgtactgcacatagtcgctgcgcaccaccagatcctgtaccttgccaaggccggccagggtcagtttggcattggcgtcggcctgtttgatctcggtgccgctggacaggctgatgcggctgttgtagttgacggtaagctgatccagatgcaccgacagcagcgagatattgttcttgatgagaatgccgccgttttccacctgcatattcacaaagccttcgctccgtcccagtgcccgctcccgcagggtggcgctgcacatcaccagggtgttgtcgatctggctgtcccccttgaccatgacattcagctgctggttatcccgctggaaccgggcattcggtacggtcaccgaatccagggtgagcaggtcggagccatagacatagagattgccctcaatggtgacattctccagcgtcacatcgccggtgacttcgtccatgatgaacaggtcgccggtgatggtcatatcccggatggtcacctcgccggtgcggatgaccacctgtttcatgggatcgatgccggcatattcgcccgactgggtaatggtgatcttatcggtcttttccgcctgggaggagctttcggaggactcctccgaactgtcgccgctctcggtctgggagctgctctcctcctccgaggacgaaccggaggacaggctgctgctctccgatcccatggagctctcctgtgccggacctgccggctgcgcggtgaaattctgcactgccagggccaggagcactgccagtaccacagcgcctcccagaatcccgccccagatccgggcagaaccgttccattctcgttttgccatagtctacctcacttctctgcccgccggcagctcctctgctctctatactatcatatcccggcggactgtgccagcggtggttatttccagccgttccggtctgccggcagtgtttcgcctgctggagaatcatccagcacccgttcgatcacaaaccggggccggtgcttgacttccatgtaaattttgccgatgtactcgcccagaatgcccagtgccagcagctgcaggccgccgatgagccagatggaccccatcagggtagcccagccctggacagtatagcccagcagcttctgtaccaggaagatcagcagagccagcaggctcaccacaaagattccgaagcccgccagggtaatgagccggatgggcatggtggaaaaggaggtgatgccgtcaaaggcaaaggagagcatcttccccaggggatatttgctctgaccggcaaagcgctcatggcgttcatattccacgatgccgctcttgaagcccaccatggggacaatcccccggaggaagaggttcacttccccgaactgggaaagggcatccagggccggacggctcatcagccggaagtcggcatggttatcgatgaccggggtgcccatcagccgcatgagcttgtagaagccctgggcagtggagcgcttgaatacggtgtcggtggcccggctggaccggacaccatagaccacttcgcacccctcctggtactttttaaggaagccgtcgatggcttcgatgtcgtcctggaggtcagcgtccatggagatggtgatgtcgcaccgttcccgggcggtcatcaggcccgccagcagcgcattctgatgccctcggttccgggacaggcacacccccgaaaagagcgggttctcctggtgcagccgggcaatgatctcccaggtgtgatccttgctgccatcgttgacaaacagcacccggctctcgggtgagatggtccccgcctccatcagggcggtcagcttttcccgcagccgccgggcggtttcgggcagcacttcctcctcattgtagcaggggatcaccatatacagtttattcggtctcatggtcttgttcctccttcccgtccggggtctccggttcgggctgttccagagccggtgccggggattccggagtcagcacggtctgcgcggactggatgctctcctcccggtgctcccgcaggctgcggaagctggcaggcaccgggtccgcggcagcagtccgccggtcctgacggcgcatcaccagcagatagacgcccagcagcaccaggccgcccgccgatacaaaggcgccggggatcaggcccggggtcatatactcaaagcggatctcggcttcccctgccggtacccgcaccgccatgaagcccacactggccttttcgatcaccacgggttcgccgtttacggtggcgctccagccgctgtcatagggcaccgagaagaacatcagcacatcttcgtccaggtcacaggtggcggtaaagccggtcttgtcaaaggcaaaggtatcacaggtgtactgccggcgctcctccacagcctcctccatgccgctggcgttgagagaggcatagtcgatggattccagctcggtgagaatatcggcattgcgctccatggcctcatccgacagtcccactgcctcgagcatcacattggcccggagcgagagcggcgcggtatccagcaccgactgccgcaccccggtggtatagccaaagcccatggggagatagttttcattctcatagaagtcatacccgaactgggagaagctgaaggtatagccgggcatgaggttttcggcgtccttttccgactgggatactgccaggtacttcaccgagagcagcggacgcagggcatagttgttcacctccggcttggaggatacgtcccgcttgacgcccacatagggatagaactccataatggagttggggacaatggaatggaacgcctggatattgggcacatgccagtacatacccaggttgtccagggtgttgtagagatccaggcggaagaattcgtcctcgtcctcaccggggaaggcgatgctgtcatagccagccagggcgcgttcccgcaggaagctgccgctggtgccgtagagccgtccgctgccgatgaagaacatgccatgcagacagcccactgccgccgtgagggcgatggcagtgcgtacaaaggcgggatttttgcgcagctggcgcacgatccacagggtgagcgccacacagcacaccgcaatgaggcagaccagccagaagcggatgggttcctccatgaggccgagtttccactctccctcgctggttttggagggggtgaggccgcaggcgaccatgaacagcaatacaccgccggcataccagcgcacaccccggacatagtcgatgtcccggcgttccagggcggtggcagtggccagacacatgagcagcaccggcatatagaaccaccgggcatagtaggagttattgaagaggataaaggcgctgttgagtcccggcaccagtgccatgaacaggcaggtgaacaggagttttttcagccagctgcgccgggccgccagcaggaaggctgctgtccccgatacgccgaacagcggcagccaggccgacagggaactccacttggcgccgccgtccgggaagaagttgggacggctggggagttccggcgggaagaagagggtctggaggatctggggaatgcgctgcaccgtggagtagatccagaagttccagccatagagcaggttatccgaggtggtgcggggattgcccatgatcgccagcaccgacggcagcagcaccaccatggcaaggcagaggcccagcaccgattccagtgccacggcacagaaccgcttgactgtcataccccagctgcggtcggtcatgcgcaggaatacatacagcaccacaaagaccacttcgccgatgaagaaccagtagttgacgatgcagttcaccgccacagccagcgcaaagacgccccggcggcggttctggaccagttcctccacaccgatgagcagcagcgggaagaacaccatggcctcatggaagtggttgaagaagatattataggtggcaaagccggaaaaggcatagcaaaggctgccgatgatggcatactcatcggtgcgcacaaaccgccggatatagaaataggaagtcagagccatcgaggcggtcttgagcatgaggagcggcgccatcagatagggcaccatctcgctggggaaggggtgggtcagccagaagaaggggctgaacagcagatagaaactgtacgacgcaatgaagttcgcgcccaggtcggtatagctgttccagagcacttccccggaacgcacggcatcatgggccatgcggtagaacgggatctgctggacattgaagtccccgaagaagaaaaagttccccttttcatagatgatgaagggcaggaacatgattcccgccgccagcagcgcaatgccgaaggccagcagccatccgggcagcttgcgg

SEQ ID NO: 3197 - DNA, 4436 bp, Unknown
  16S sequences of unknown bacteria
tcaaggcatccaagccctcgatgctcgaacctttgggcggcggcgagatgcccgtgggcctctacttcacgcaatggctgctcgtcggcgtgctcacgttcagcctgcctcagtcggtcgttcgctgcatggggttcaaagacgagcgctcgctcaagaacgcgctggtcatgggcacggtgatcctcggggtcatgatgattttggtcacggcactcggcgtcctcgcaaaaggcgtgctgccgggtacgctcgcggattacggcgggtcggtcgacaacatcatcccgatcgccatcgcgcagtgcctgcctccgtggctcgccggcatcgccatcatcgggccgatcgcggcttccatctcgacggtatcctcgctgctcatcagctcgtcttcttccatcgtcaaagacgtgtacctgcattaccgcgcgaagtcgctcgatgcggacatcgagctgcgcgacacgaagatcaacggcggggcgccgagcgacgacaagcgcgtctcgcgcctgagccaggtattcacgctcgcgctcgggctcatcgtgttcgtgctggccatcgtgccgcccgatgtgatctggaagatcaacatgttcgccttcggcgggctcgagacggcgttttgctgggtgctcgtcatggggctgttctggaagcgcgcgaactcggcgggcgcggtgctgtccatggtcggcggcgtggtcgtgtactgcacgctcatggcgctcggcatcaagccgttcggcctgcatcagatcgtggtggggatcagcctgtcgctcgtgctcatgctcgtggggtcctggattgcgggcaaggggagggccgttacgcccgaccccgtcttcttcccctaggggcttccccgcaccctccttgcaccaaaagcgtggcactgccacatttcccgtgcggtgaacgcgagatatgtggcactgccacgtttcccgcgcagaaatcatgagatgtgtggcactgccaccgttttcgtgcagcacgcgcgggatgtgtggcactgccacgtttcccgtgcgcgtactttggggctgcgtgctaggcgagaacctggaccgccccttcgagctttccgaacgtgtcacgccaatcgcgcaggtacgccccgatggtgtgcttgagcgggtggcaggggaagtcgtcgttgcagctgcgctcccagaagcagcttccctggcacacgggcaaaagctcgcaggcgctgcacttctcgtcaagggtcgcgtcgaagaccacctcgtgcaggtgcctctcgatgccgtcggaagcgtcgaggatgttgcagatgcggtggcgcttgtctcccatccatccgtcgcaggtgtacacgtcgccgaaggcgtcgatgacgaagtaactctccacctggccgcggcagaagttggggaccggctgaagcatggcacgcaggttctcgggggtgagaagcccgcttgccttttgctcgtcgtggatggcctgcgcgtactcgtcgtgcgtgaacagctcgaaatcgggcgcgcagaacgcgccctgcccaaagaagtgcccgtagtcgttgagctgctcggtcaccatctcgatgccgaactgctcgcgcagcatcttgcgcacctcgggcagctgtttgatgttcaccttgtcgacgttcatgttcgccgtcacgcggatgccgcgggcggtgagcaggcggatcgcctcgatgttcttcgcgtacgagttgctgcccgtggcagagacgcgccgcttgttgtgctcgtcttcgagcccgtcaatcgtcacgaagacctcgctcacgcgcgcgcctgccagcagctcgaccgccgccgcgtcgatgaggttgcagttggtgagcatcatggcgtcgtagaagacgtcgtttgcctcggcaaacgcgataaggcgctgggagaagtcgcgcacgatgtcgaggcacaggctcgggtcgccgccgtaccactcgacgtacagtctcccgaacggcgcctgcgcaaaacgctgctcgacaaatgcgtagatggcatcgagcacctcgcgcgacatgatccccttgctcgtggcgtgatgagcctcgtagcagtaggggcatttgaagttgcaggcgtaggtcggcgctatggtgagggcgagctcgtcggcgctcgtgcgctgcacgcggtgctgctttttgacctgctcgagttcttcttctggcgaaagctcggtgaaaaagcccgcctgcacgagcttctcgtcgggacatgtgccacgctggcaggcagctgccgcttccggggagagtgcggcaaacgacccgtttgccgtgttgtacaggagcgtctcgccgtcaggcccggcggcaacgacgttgtagcgcgaaggattcatgggtgctcctctctgttctgcttgagattctagcctcgtcggcgcaagtcggcacgcgtaaagcagaaatgattcggctacaatcagccgcatgaagtcgaacgcggacataccgctgccgcccgaggcggacctgcccaagggaccgtgggaacgccccagctgggcgccgctgtacctgtacttgggctgtgtcatcgccttggcgctcgtcgccatcgcactcgaggcctctggctggggtgctgccgcgacgattgcgggcaccgtgctcgccatcgtgtcgctgttgcttctcgtggccggctttgccgtcggaacgtttatcgtcaggcgctttgtgtcgcatacgcccgattcgttccgcgctgcagacccccaagaacagccgctcggcgccatgctctcgtgccctctggagcagtttcccatgacagcgtttgtcaagctgctctctgacgagcagaaacagcagctcgaaaagcatcgcgcgcaggagcgtgatctatcgtgggcgtattttgccgacgcggaccccgcacgaatggtcgagaacacttcttccgacggcacgaagctcgtcgcctacgcgctcgagcccaatcccggctcgcacaagtgggtcatcgccgttcacggctacaagggggattggtccgagcacctgatgcacgcgcgcaggtacgcgcagcatggctacaacctgctctttcccgtgctacgcgggcatgcggcaagcggtggtgccttcatcgggctcgggcttctcgatgcggcagacctttgctcgtgggcgcgctggctcgtcgatgcgggtgcggagagcgtcgtgttgcacgggcactccatgggcggtgccgccgtgtgcatggcaggtgcagaagagactcttccgccgcaggtcaaggccatcgtcgcagactgcgcgtacagcgatgcgtggaacgtcgcgacgctcatcgcgcgcgagggcatgcacatcccgtgccacccgtctttggagctcgcgcgttttgtgctcatgcatgccaagggcggctacgatatccagaaggtagatgtcgccgcggtggcgccccagatgcgcgtgccggtgctcgtcatccacgggcaggcggattgcgtcgtccagccgtccatggccgcgcgcatctacgaggcggcgccggcgggcagcaagctcgtctttgttccgggggcggggcactgccttgccgcgctcaccgaccccgagctctattacgacgcgttgttcggttttctccacgagcgggaatagttcatttccgtaatctatgccggtaggctacaatctttccatcgaacaaacaggagtttgggggagagcagtggaaacgctgattggcatcaccgacaccatcgacacgtacatgtacacgtatttcctggtgtttctcttgattgcaagcggtctgtacttttccgtcaggacgaagttcatccagtttcgcggcttcaaggacatgatcaagaacctgaccgagaaaaagcacgttcccggcaagaagaccgtctcgtcgttccaagcgctcatggtctcgaccgcctcgcgcgtcgggaccggcaacatcgccggcgtcgcgaccgccatcgccacgggcggcccgggcgccgtgttctggatgtgggtcatggcctcgatttccgcagcatcggccttcatcgagtccacgctcgcgcagatctggaaggtcaggggcgagggcggcgagttccgcggcggacccgcctactacatccagcaggcgctgcactccaaggtgtggggcaacgtctttgccgtgtcgctcatcctgtgcttcggcctcggcttcaacgggcttcagacctacaacatgagctcttcgctcgcggcctacatccccaactacttcgatacgggcgccccgattgcgctcggcatcgtgctcgccgtgatcgtcgcgttcatcttgttcggcggcacgcgcatcatcagctttctgacctcgattatcgtgcccatcatggcaatcggctacatcctgctcgcgctcatcctcacgggcatgaacatcacgcagctt

SEQ ID NO: 3198 - DNA, 11857 bp, Unknown
  16S sequences of unknown bacteria
ccggtgatgaagatgccttcgccgtagacgtccatcaaaacgccgtgccgggtgacccggggggccaggcagccgttgaggtaggcgatgagggcggaggtgaaattggaagtcgtctctgcgcaggagaggacggagatattatgcttccgggccatttccaggcactcgggcagcggttccatattccgggtgatgatgagcgcggggatcttataggagagaaagtgctcgaagatgatgagccgctcctggctggagagcttgcggaggtagcccatctcgaccgcgcccagcacctgtaggcgcactggctcaaagtaatcgaaaaagccggtcagctgcataccgggacggctgacgtcgtcaacggtgatgcagattttttcgtaatccgttgcctgaaagacgggcttcaggtggaagacctccaccagctttgtgagctttacgttatacaaatttgccatagcggccccctcgctgtgtcgtccgaacggtgaatggtggaaaaggcgggcgttgccgccgcgctctgcggcagctgcgtccgtgcatttgtactacaagagaattataacggatttttcccgtgttggcaaccttgggataaaaaaagtaaaatattttgttgtacccccttgcaatttttgcgtttttttgctattataactaccggcgcgtttgagcgcgctgaatttctgcttattttaccgatggataggaggtgcagctagtggctaagtgcgatatttgcggcaagggcgttacttttgggatcaaggtctcccattctcacagacgctccaacagagcttggaagccgaatgtcaagcgtgtcaaggcgattgtcgacggtactccgcgccatgtatacgtctgtacaagatgtctccgttccaacaaggttgaacgtgccatctgatgattgtaaaaaagagaatcgggagattctggctgcaaaagctggagtctcctgttccttttttcatagatctcaacgggaggaatcggaatgctggatcgcgccaagctggaggcgcagctgacgcagctgccgctttatcaatatgcgtttttgaagccagaggagctgccgttttccccgcggctccagacagtctgccgggagaattgcccgatgtatggcaagtcctggtcctgccccccggcggtggggacggtggacgcctgccgtgccagatgcctggcctacccagaggcgctgctggtggtgacggtccaggaggccgcagactccgccgatcttgccacggggctggcgaccaagccgtttcacaaccgccaggtgcaggcagtgcgccaactgctgcaggatgcgggccagcggacgctctgcctctccggcgacgcctgcgcccgctgtgacgtctgcgcctatccggccccctgccgccttccggcgcagcagacgccgtgcctggagggctatggggtcgttgtcagcgctctggcagagcgctccggcatcccgttcccgccggagccggggctgattttctggtatgctgtgatcctgttcgggccagaggatgcatagaaaaatgaaaaagcacgccgcgcgttccctgcaaagcctggggatgcgcggcgcgtttttttcaatttctcaatttttcatcaacctggtctctttttccgcggcgcggcgcttcttgagccggtgggcgcggaagacaaaatagcgctggccgaagtaattcaaaatgcaataggccagggaggaggagacgagggagatattgttctccaggtgtacgatatccgcattgggcagcagacgctgcagccggaattggaccgagggcgacagcaggaccaggtccagcacgtccttaaaaaagaccttcgtgaggatatagcagacgatgacgcacaggatgaatttccagggccaggagacgccggggtgctggtcgcggaacgtgacgaaccggttcaaaatcagcgagacggtactggacagagagtaatagaccagaaaggcaatttcctgcgatgtgttcccgtagttatacaccagcagcattgcgccggtgcagacaaggaaattcacaaggccaagcgccatgtagatgagcaaggtcttatcaaaatactttttcataaacgaacctctttgcaaaacagcaaaacaaaaagatgtgcgcatggggcgcactagcggatcgcgcgggcgtattccgtcggcgtgaggccgaacttttctttgaactggcgggagaaatggtgcaccgtcgaatactgcagctgggcggcgatttgcgtgaaattcattttcccctcgcggatgagctttttgctctcctccagcttgatacggcggatatattcccccggggagatctgcatacatttgtggaacagcgcggtgagataagacgcgctgacattggctccgctggcgactgtcgcaacggagagccgctcgtacacgtgattgccgatataatccagtgcccgggcgatgatctcgttctcgttgttcacggcggcaggggttttgagggcggcgggctgggcggccttttgatcatcgcgcagcatggtcagcaggacctgctgcaccttgcagatgatcatatcgctgctgaagacgtcgtccttctcgtattcctccagaatctgcagcagcaggcgctttgtctgctggctggcctgaaatttgcggttgtagagcaagtcggcgtagctacagtctaggtccatcgtgatggtgatgaagctggtagcactgtcaatatccgcatactgcatgtgccactggttttcgctgtagagcatcagctcgccctgcttgaggatgcggtccgcgccgccggcgacggagtgcatgctgcccttgtcgatataggtcagctccacggcgctgtgctgctcacccttgaagaaaaagccgggctccttctcctggtaaaacagggtgtagatgtccttcacgcacaggtgattcgtaattttgaagctctccagcgcattgagctggcggacggccggaagctgactgtcactgccggtgcagacccgaaccgtgcactgggcctggtaggggatcagggcaaaataaatgccggttttcagcaagaccggtttatccaggtaaaagaacgcaagctgctggctgtcgtgggagacggcgaggatggtcatccccgtttcgaagtccagatacagcgggccgctttgcaggcagcgcagctggcgctcctggtcggtaatggtccagaaggtctcttgccaggtgtccccctggggaaagccgcggttgggcagccgatcctgcaggacttttccgtagccggaaaaggtcagcttattcaggttccgaatcactggctacccctccgtgtgtcatttcggactatatcataccacaaattttgtctatttcaactatttttttggcagggcgcataaattttacttctagcaggcagtcaaatcgcacctgcgctttggctgctagcgggacgaagtacagacgaaaatccggcgacccctcgttgggatcgccggatcgcgcggagcgatagctcctgctatggtacgccagaagggactcgaacccccaaccctcagaaccggaatctgatgctctatccattgagccactggcgcatcgctttgcgtattatagcaaaattttttcgcgttgtaaaccctttgcaggaaaaattttcggaaagaggctgcagctgccggaatttttgtggcgtcagattcctggggggatcggcgttgacggcgcggccagcaataagcgctccaatatgagtacggaggtcaagagcatctatgtgctccagaacggccgcgaggtgcagcggtgcaccggccctggggagcagctggaggcagctgcactatcgccggaggatgtgctgactcttttcctgcagcggtcttggccgcggtgggcgtgtctctgtattttttgcgttaatttttacttcctctgtcaggagatgaacagcaccccatttgttagacggtatggtatagagaatttctttggactgctcaagagtgaacttttgtatcttcaagagtttcggtccatggaacacttcaagcaggaattcattgaataactggattactgcaacaaccgcaggatcaaggcaaaactaaaaggcttgccgcccgctcttcacagacaacaagccctttcggtcgcttgaacaattcttatattctatatttgtctaactttttggggtcacttcacttgtgggcggaggggctttgtcctatgtggcgggtcttagcggaacactgcgccgtcgcggtcgaaaatctcgacgcggtggatctttgcaaagctgggggcggcgtccggcagatagtgcgcgatggcgttgagcaggagctgcgggttcagggcagggtcctgggcgcagacgaggcagtcggcctgcagcaggtgatcgcctgcaaccgtcaggtcaaagcggcgcagcatggggagcagatcgacctctgcttcgccgcgctttgtctttcttgtcaaaagcaggctgggacgctggaacagggcggcgatggcgtcccggcaggccggggcgttgccgctgtcatactccaggtccagccgggcctgcaggaagcccagtttcccggcttttttctcgctttcatagcttgccagaatgcggatcccggcgggcagacaggcgttcagctttgcagggatctcggcctccggcgtcgtatcgccgggatccagctcatagtctaagacctcacactggcttgagacgccgacggacatcggtagcaggatggagacataggcgtggggcgtgtagccctgggagtggcgcagcagcatcccggcccggcgaaaggctcgctgaaagacccgcatcaggtccagatgggaaatccagatcgcgtcgccctctttggcaaatagcagccgcttatgcatcacagcaccctcccttcaggagcgtatttgcgccgcagccgctgcactgggtgcggcagtccggcgtgacctggcccgcataggcctgggcccgttcctttgccaggaacgctttgctgacgccgacgtcgatggtgtcccaggggaggacttcggcctcctgatagccccgggtcgtatagaacgccgggtcgatgccgcaggcggcaaaggcggccatccaggcgtcgtagtcaaagtattcgtcccagccgtcgagcttgacgccccgggctacagcggcttccaggacgcggcacaggcggcggtcgccccgggccagaacggcttcaagctggctcagcttcgcgtcgtgccagttgtactccacgctcttggacggcatggcgtttttcaaaagctgcgtcttgcggcggtattcttccatcgtatcctgccgttcccactgaaatggggtaaagggctttggcacgaagaacgccgtcgagacatggacccgcaggccccgctttttgttggacgcgtgggccttccaggtcttgatgaccttgtagaccagctccgcgatgcccagcacatcctcatccgtctccgtcgggaggcccagcatgaagtagagcttgacattgttccagccgccggcaaaggcggtggcgcaggtcgtgaggatctcctcctcggtgacgtttttattgatgacgtcccgcaggcgctgcgtcccggcttccggggcgaaggtcaggccgcttttgcggaccttctgcagcttttgcatcagagaatccgagaagttgtccgctcgcagggagggcagggagatattgatcttccggggtgtgcagaagtccagcaaatcgctggtaagcggctccagctgcttatagtcggaggtggagagggaggagagggtgatctcatggttgccggagtcaagcagcatctctttcgcctggcgcagcagtgtcgcggcgctgcggggccggacggggcgatagcagaagcccgcctgacagaaccggcagccccggatgcagccccgcatgacctccagattcgagcggtcgtggacgatctccgtcgagggaacgatggttttcgctgggtaatacgcggcgtccaagtcctgcacgatgcgcttgcggacagttttcggggcgccgggcgccggggtgatggcggtcaaggtgccgtcaggagcgtaggtatgggtgtaaaacgcgggaatatagacgccctccagcttggcggcctcggccaggtactgctgcttggtccagtgatctgcctgggcggtttggtagagagaaagcagctcccgggtcaggtcttcgccctcgcccaggctgaagaggtcaataaaatcggccagtggctccgggttataggcgcaggtgcccccggcgatgatgagctggttgagccccggccggtctgcagagcgcagcgggataccggccagctgcagcatattgaggatattggtatagctcatttcatagccgatggtgaaggcgatgaggtcaaacgccgtcagcgggtccttgctctccagggcaaacagcggcagctgatgcgcccgcagggctgcgtccatatcgccccagggggcgaagacgcgctcgcaccagacaccgggcatctcgttcatgatgccgtataaaatgcgcatgcccaggttggacatgccgatctcataggtgtccgggaagcagaacgcgacgcgggtcgtgacggactgcttgtctttgatgatctcattatattctccgccgacataccgggcgggtttctgcacgcccggcaagatgcgggccagttgatcggtcatggctgctccttttgccgccgcggggggccgcggcgtgatttcttgtgtgtttgcttttattgtagcggcagccaggtttttttgcaaggaatttttcgctttgcagggcgcggcctgcacgaagctgcaggctggcggccaaaagcggcggccaaagccccagatgcaggcggcaggcagcaaaaatcgccagtgcccagcaaagcgcgagggtgagggcggcacagatgcggcttagccgctgtgcttgggccagcgggagctgctgcgatgcgacggcaagcagaatgcgtccgccgtccagcggccagagggggagcaggttgcccgccgccagcagcaggctcatcagcgccgcccgggggagcagccgcggcagcagcaggcagacaagcaggctggcggcgggcccggcggccgcacagcacgcctccgcgcgataggacatagcccctgtctccaggatgcagcccagtgccgtgatgcgcagcgctgtgacggggacgcccagcagacgcagcgctgcaagatgccccgcctcgtggcaggcaacgcccagcaaaaacggccaaaacaacccgcccggctccaggcacagccagcagcagcccaggacgatggcggcgggcgtgacgctaaggcgcaggcgtggtgatctcatcgtaaaagacggcgaaggcctccgcgaccgggcggccgctgcgcagggcctggtcaaagctgctgacggcgacctgtaggggctcctgcccggtgccgacgatccagctgcgcagagtctggcacccggcgggatagaaaaaccgacaggccagcgcgccgcagcacagcagggcgcagaccagaagctgcgcgatccaggggtggctgcggagcggggaagcgggcggcctgtccggctcgccctgtccatcgaatgcatcattaaaatggaacggttcttgcggcggaagcaggggccggtcataaatttttgtggcggctagggccggatcttcaagctttacgggggctggtgcaggggttgggataggatccggtataggggtcggcatggaggtcggcatgggaatcgtttccattggcagcacttcctttctgaaaaataaaggccactgctagcctatggcctacggacgaaaaaaagacggcgaaaaaatgaaaatttcacttgaaaaatagggagggacgtgataaaataccatagtctgtgaatctggcggtcctctgctgcggccggcatggaacatgcagcggcatgacttttgcagtaagaacgctaaattatgaaggaggacaacccaaatggatctgttgaaagctgtatccgacaagtacctgaaggaagagctgcccgaaatgaacgtcggcgataccgtccgcgtgcatgtgaagatcaaggaaggcagccgcgagagaatccaggtattcgaaggcactatcatcgcccgcaagcatggcggcatcggagagaccatcacggttcgccgtttgagctatggcgtcggctgcgaaaaggtgttcccggtacactccccgtccatcgtcaaggtcgagacagttcgccgcggtaaggtccgcagagcgaagctgtactatctgcgtgaccgtgttggcaaggctgccaaggtcaaggagagagtgtaattgctgtatgcgtaaaaaaagagggcatttgccctctttttttatttgggtttttcatgtataatagatggcaaatgattttcacgtgctgtgagggatcctattatggcaaacgaatttgaaacaaaaaaatcgccgaaggcggcgccgaataaattcgcgcaggatatttacgtgatgctgcacgatcttgtctacatcctggcggcggtgacggtcctttttacgctgctcatccggctggtgacggtctccggcccgtctatgacctcaacgctgctagaccgggactatgtcgccgtgctttccaatgtgctgtaccgggatgtgaaaaatggagatgtcgtcgtggccaaggtcccggggttcgaggatgagcccatcgtcaagcgggtcatcgcgacccaggggcagacggtggacatcacctacgacgccaccggcgtcggcacagtgatcgtcgacgggcaggcgctgaaggagccgtatatcaatgaaccgatgctggagccgggctatgccacggtcagcttcccgctgacggtcccggagggctgcgtctttgtaatgggcgacaaccggaaccactctgccgacagccgctatacccagatcggtgtctttaacacgaagtatattttgggaaaggtcctgctggtcgtctggcccggccgggagaacacctggcagaaacgggacttttccagacttggagccgtatcataatggaacagaggatcaatattcagtggtaccccggccacatgacaaaaacacggcggatgatggaggccgacttgaagctggtagacgctgtctgcgagatgatcgacgcgcgcatcccctattccagccggaatccggatatcgccgccatctgcggccaaaagccccggatggtcattttaaaccggacggacctggcggacccggagatgacccgccggtgggcggactatttccgcagccagggcctgaccgtcgtggcgacggattgtaagtccaaaaaggggctgtcgaacttcgtcccggcggtgcggcggctgctttcagagaagctggagcgctatgctgccaaggggcagacaggcagaccgttgaagatcatgatcgtcggcatccccaatgtcggcaagtcgaccctgattaaccagctggccgggcgcaagggcgccaaggcggagaaccgccccggtgtcacccggggcaagcagtgggtcaatatggacggcaatctgctgctcctggatacgccgggcatcctctggcccaagtttgaggacccggaggtgggcattcgcctagcctataccggggccgtcaaggaccaggtctttgatgttgaagagctggcgtgccatttgatcaaatgcctgtgggaccgttaccccgccgcggtgcaggggcggtataagatcgagctgccgccggaggcccaggggtgggagcttttggaggcagcggcccggaagcggggcttcctgcttgccaggggcgaactgaacacagagcggatggcccatgtgctgctggaggaataccgcagctgcaagctgggccggttcacatttgaagggccggagatttatacacaggagtgacatatggaactggatttatggagcatcgagcgggcgcattacgctcagggctgcaaggtgatctgcggcgtggatgaagctgggcgcgggccgctagccgggccggtgtgtgccgcggcggtgatcctgcccccggatttagagatcccggggctgaacgactccaaaaagctctccgacgccaagcgccgggcgctgtttgacgtgatcacggagcaggccgtggcctatggcatctgcatggtggatgaaaagcgcattgacgagatcaatatcctgcaggcaaccttcgaggcaatacagggggcgctggaccagctgactgtccggccggagctggcgctgatcgacggcaatcgggcgcgggactttggcctgccggttgagacgatcatcggcggcgacggcaagagcgccaatatcgcggcggcgtccatcctggccaaggtcacccgggaccggtatatggagcagcaggcggagctctatccccagtacggctttgagacccacaagggctatggcacaaagcgccattacgcggccctgaccgcctatggcccgtgcccgctgcaccggcagagctttttaaaaaaattctatgaaggaaagtaacctgctgggccattggggtgaggcgacggcggcggcctatctgcggcggcggggctatgagatcttagcctgcaatttccgcagccgcttcggcgagatcgacctgattgcccggaagaaaaactatgttgtcttctgcgaggtaaaaacgcggaaggatgcgtcgtttgcccaagcgctggaatttgtggaccggcgcaagcagcggcgtttgcgggacacggcggccatctggcttgcgcagaacgacgggccgtggctctcccgctttgatgtgatcgaggtctacgcgccggagggtgtgcagacgagaaaaccgaaaatcaggcagatcgaggatgcgtttgaatgaaagcttttcctgtctttgatgcccactgcgatacggcgctggagctctgggagcgccaggcgtcgctgtggcagaacagcggccagtgggaccttgcccgggcggcgcagctgccggggtgggcgcagttttttgccttttgccccatttgctcgccctttgcggcggagctgggggccgaggcggtgttggcgcgggcctatgctcagtttttgcagcagctggaggcgtgccaattgccggtgtgccgggatgcagcggaggtcgagcggcagctgcccaccggggcggtgcttctgagtctggagggcgcagagggcatcggatgcgacccgggccgcctggagcctttgcggctgcagggctttaccatgacgggactgacctggaattatgaaaattccctggcgggctcccatatgacgggccaggggctgagcgcccggggcgcggattatgtccgcgcggcgcagcagctggggatgcttgtggatgtgagccatgcctcggacgaggcgttctggcaggtgtgccggatgacccaggggccaatcctggccagccactccaatagccgcgccgtctgcccggagagtcggaatgtcacggacggcatgtacgccgccatctgcgagacaggcggcgtcgtggggcttaatttctatacggaatttttaggccgggggcaggtggactttgaaacggtctggcatcatctggaccacttcctgcagctggcgggcgacgatcgccatgtggcgctgggcgcggacttggacggctgcgacagcctgccggacggttttaccggcgtggcgtcctacccggccctggcggcgtatcttgccgaccgcggcctggga

SEQ ID NO: 3199 - DNA, 31577 bp, Unknown
  16S sequences of unknown bacteria
ggaagaattgcagcaaacccggcagctatcgacttttgcacaacataaaggtataattctgttacaaactaattatatatattacttctaaaaagtatattaaatcaacagactgtccggaggaaatattatgatatcagatgaaagagtaacagatatataccatattgcagagcgatttaaaaaattatgtaaacaggcatatgaagtgtatttgcccttggttgagaatatctgtattaaggaagcgtccgaagacgaagtggtgcatcttcttgactatttgatggattttgcctatgatgaacaaatctttgaactgttcaaaaggatatgcatgagatatctggacgtatatccagagtgcattaaattttacatcgaagaatacagggaaatgtggtatagcgaaagtgaacaagcagattaaattaccttaataaggatgtttattataactgacagttgtacgtaaagtgattttgaataattaacaggacttaatgatataaaccagaataccataatcgaggagggactctaattgaagaaaaaagaagaaataaccattcgctccagcgcagcagaatatttaacctatgttgcctctgttggtgatcagcaggacagtattgagatgcgctatgaggatgagaatatatggttgacacaaaagatgatggcccagctttatgatgtgtcagtgcagaatattggtcagcatattaagaaaatatatgaagatagggaactgattcaggaagcaactataaagaaattctttatagttcaaaatgagggtggtaggcaggtcaatcgcggagtaactcactacaatcttcagatgatcattgcagttggctttaaggtaaataatgagcgggcagtacagtttcgcaagtgggccaatggtattgttaaggactacaccattaaaggctgggttatggatgatgaaagacttaaacgcggtacatatcttacagagaaatattttgatgaacagcttgaacgtatccgggagataagggcaagtgaaaggaaattctatcagaaaatcacagacctttatgctacagcaatagattatgacaaagatgcgctggcaacaaagcgcttttatgcatcggtccagaacaagatgcattttgcagttcatggtcatacagcagctgaactgattgtagaaagagctgatcacaagaaagaccatatgggacttacaacatgggcggatgcaccggacggcaaaattaaaaagagcgatgttacaattgcaaagaattatctgagtcagcacgaactgaaacagcttaatcgtatggttactgcatatctggattttgctgagagtatgacactaagacatatatcgcttggggagcatttttgatgattacagtaaagaaatgttccccaattgatgttgattattaataagcattacagtacaattattgtaataaatgttcccaacagattagagacggtgtctgcacaatatagcagaggtaatattattagttttggagtacaatttatgaacagtacagaggaaaaatacaatattggaaggcttgagtttgcaatattctgtatcgaaaatattgcagtaagactgaataaagatgcaagggcagtttatgctgctttagtggaaaaaagcgatattctttacggatacattgttccggagtttgaaatcctgcatacacaaagcaaggactatattattgatgacattattgatgttatgaaagaaagaggtgttgaagtatgattttgtatcatggttcctggcttgaaatatcaagaccggctctaatatactccagaccgaatctggactttggaacaggcttctacactacacctatttatgagcatgctgtaaactggtgcagtaaatttaaacgacgcggaaaaaacggaattatatcatgctttgagtttgatgaaatcgccttcagcaggcttaaactgctgaaatttgattcatattcagaagaatggctggacttcattttgaattgtcgaagcggtaatgataaaacagactatgatattgttgtcagtggtgttgcaaacgataaggtatttaatacggttgaactgttctttgacggactgatagataaaacagaagcaataagctggctgagatatgaaaaaccaaacctgcagatatgcctgcgttcacaggaatccattgataaatatctgcattttgaagggagtaaacaggtatgaatgcaaatcctgtattgttacagaaaaagtatgctcggatagtcgagaagttcgctgagaaaacaaatattacattaaaagaagctttggatattttttatcattcgaagctgtatgaattaatgagcgagggtgtatctgatatgcactgtatgagtgatgattacctggtgcaggaacttgcagatgagcaagccgaaaaataagaattaaaagcaaatggtcatcggcaaatcagctataactgatacggagcccatgcaggaagatttcttgcaaatctgcagaaggaaatcagcagattaaaacagttaagatatgatttataatgtgatacaaacagaaacggaggtactgatatgcttgaaacaggaattaaagcgccgggatttgagcttcccgaccagaacggcaaaatacatacgctggatgaatacagaggatgcaaggttatcctgtatttctatccgaaagacaatactgcaggctgcaccaaacaggcctgcggctttgcagagctttatccgcagtttacagagaagggcgcggtgataatcggagtaagcaaggacagcgttgcatcacacaagaagtttgaagagaaattcaatcttccttttacacttctgtcagacacagagctttcctgcatcacagcttatgatgtgtggaaagaaaaaacaaactacggtaaaaaaacaatgggagttgtccgcaccacatatctaattgatgaaaacggaataatacagaaagtggcaggcaatgttagggccgccgacaatcccgcaaagactctgaagctgctctgatggttttagaagcgattgttatatatcttgcggcggtaaatattattacatttataatgtttggtgcagacaaagcaagagcagtaaaaggcagatggagaatatcagaggcgtcgcttatacttgcggcgctgctgggaggctcaataggagcgctggcaggaatgagggtttttcatcacaagacaagacacagaaaatttacagtaggaattcctgtgattttagtacttcagattgtttttatggtgctgtattacccgtatatacctgcgccgttgtaagaaaaagcagctttattgtgacaaaacaataaaaaaaataaaattatttgtggattttatcaaaaagcactttatttttaacacattgtttgctataatagcccttgtgttttggattattaaatcatttttttgaaaagtgagggaaatgtaatgaaaaaaaatgtagttatagttggtgccggacctgccggaatatttacagcgcttgaaatgttaaacaagggcagtaaaaaaagcattatgatccttgaaaaaggcagagctatcgaaaacagaagatgccccaaggaagtgaccggacagtgtgtcaactgtcagccctgccatattacaacaggattttccggagcaggcgctttttccgacggcaagctctcattaagctatgaggtcggaggagatctgccgcagcttatcggcgaagacaatgcgcaggaaactattaactatgcagataaaatatatctcgactttggcgctgacagcaagatagagggcatcggcagcgaagaagaggtaaaggcaatcagaaaacgtgcaatcaaagcgggactcaagcttgtagactgtcctatcagacatctcggcacagagaaagctcaggacatatatgaagcaatcgaaaaacacctgcaggcaaacggcgttgagattatgttcagctgtgaatgtgtagatataatagttgaggacggcagatgcgcgggagttattgcatctgacggcaaaaaagaattcagcattgaagcaggcagcgtcgttattgcagcaggcagacgcggtgcagactggcttgacagactgtgcgacagacacaatgtggcgcacgagccgggtattgtagatgtaggcgtcagagtagaggtcagaaatgagattatggagcatgtcaacagcgtactctatgagtcaaagcttataggttatcctaacccttacaaagacaaggttcgtactttctgccagaatccggggggttttgtaagccaggaaaactacgatgacaatctggctgtagtaaacggacattcctacaaggatttaaaatccggcaatacaaaccttgcaatacttgtatcacaccatttcagagagccttttgacaagcctatggtatacgccagaaaggtaggagagcttaccaacatgctcggcgcaggcagaataatggttcaaagatacggagatatacttgacggcaagagaacctgggagagagaacttgcaagatccaatgtgaaaccgacccttacagatgcggttgcaggagatataacggcgggactcccatacagaacaatgacagatataatcaatttcatacaggcactcgatcatgtggtgccgggatttgctgctgcagaaacacttctttattctccggagattaaattctacagcaatagagtaaaaatggataaagacttcaacacaagtatgccgggtctttactgtcttggtgactcaagcggctggaccagaggtctgatgatggcatcagccatgggcgtactgatgggcagaagacttgtatgatttactaaacagaatttctggcggggtatatgatatttaccctgcctgttattatattaggaggtacacaggatatgaagataacagatattattaaacaggacagactgagcctgtcgtttgaggttttccctccaaaaacagacgacaaatttgaaaaagtgaaattcgccatagaagaaatcgcagaccgcaagccgtcttttatgagtgttacatacggcgcaggcggaggcacatcaaaatatacggttgatattgcaagagatatcagagaaaaaggtgttacttcaatagcgcatcttacctgcgtgtcctcgagcaggcagcaggtaaggggcatgctggacaagcttagagaaaacggcatcgaaaacatacttgcactcagaggcgatatacctgaggggcttgaccgcagcaggatggaatacagatatgccagtgaacttgtaaccgaaatcaaagagtacggcggcttttgcataggcggagcatgctacccggaaacgcaccctgaaagcagttcaagtatggaggatatagccaacatcagaaagaaagtggatgcaggtgttgaatttctgactacacagatgttttttgataatgatatatattacaacttcctttacagactgcgtgaagcaggtgttgatgtacctgtaattgcaggtattatgcctattacaagcgcaaagcagatagagagagtagtatcaatatcccagaacgcactgccgcagagatttttgcgtatagtagacaggttcagagataatcctaaggctatgaagcaggcaggaatagcatacgccacagagcagattgtagccctttatgccaacggagtaaaagccgtacatatttattctatgaacaatccgtcggtagtagaggcgcttcagaataacgtatcggagattataggatgacaagggtttcaaatgacaaaatcgtcataaatccaaaagaactcaaagcaaggcttggcggtgcggatgacagcgtctcaagagcatttacagacagcgtggcagatgagattttatctgtaatgaactgttcatacatcttaaaaaagacagatatcagctttaccgacaacggctgcaatctgggcttcggagaaatttcaagcgccaatctcaggagaaatcttacaggctgcggcagcgcgtatgtgcttgcggcaactatagggcatgacgtggacagagtgctgagaaatgcatctcttgtttcgactgcaaagcactttgtgcttgatgcggtggcatcctctgcagtagaggcgctctgcgactatatacaagacagcctgccggagcagaccaaggccagatttgctccgggatacggagacttcaccctcgaaatgcagggcagactcctggaatttgtagacgcatacaaaataggcataagcgtaaatgattcatttatgatgacgccgatgaaaaccatcacagcaataatggggataaagtcatgaatattttagaagcaattaaaaaaagaaaaatatattttgatggaggcttcgggactgtgcttcaggagatgggacttgaatccggagagcagccggcgcagtggaatatagaccatcctgacaggataacggcaattcataaggcctaccttgaagcaggctcggatatagtaacaaccaatacctttggtgtaaacagccttaaattcaacaatgccgcagaatatgcggaggctgctgttaaatgcgcaaaggaagctgtcaaaggatatgagaacaaatatatagcctatgatatagggcctacaggcagactcataaaacctatgggtaatatggagtttgaagaagccgtcagcatttttaaagagtgtaccgaatatgctgtaaacttcggagcagacctcataattatagaaaccatgaacgactcctatgaaacaaaggcggctctgcttgcagcaaaagaaaacagcaatctgccggtgtttgttacaaacgcctatgatgaaagacacaagctgatgacaggggctgatgcaaagactatgattgcaatgcttgagggccttggcgccgatgccataggtatgaactgctcctttggtcccgacaaaatgctgcctatagttaaaacctacgcagaatatgcttctgttccgattatagtaaacccgaatgcgggacttcctcagataaaggacggacagacagtctatgacatttctccggatgcgttcgctggtattatggcagagattgcagaacagggcgcaacgatacttggcggctgctgcggcaccacgcctgaatatatcagaaaaatggcggatagagttaaagaagttccgttcaggcctgcagtacctaaaccgcacagtcttgtttcctcttattcgcatacggctgagcttggcaggctccccgttataatcggtgagagaatcaaccctacaggcaagaaaaaagtaaaagaggcgcttagaaacagagattacaactatatacttacagaagcgataaagcaggaggaggcaggttcccacatacttgatgtcaatgcgggaattcccgatattgatgagcctgaggtactgtcagagcttgtaagagagcttcagacagttacagacctgccgcttcagattgatacctctgataccgctgccctcgaaaaagcaatgcgtatatataacggcaagcctatggtaaactccgtaaacggcagcgccaaaagcatgaacgccgtatttcctcttgttaaaaaatacggaggagtagtagtggctcttactatggacgaggacggtattccggagaccgcagagggcagatttaatattgcgcagagaattgtaaacaaagctgcggaatacggcatagacaaaaaagacataatagtcgatccgcttacaatgacggtatcttcagacgataccagcgcggctacaacccttgcagcggtaactatgataaaacaaaagcttggagtatccacaagccttggtgtatccaatgtttctttcggacttccaaacagaagcataatcaactccgcgttcttcacaatggcgctttatgcgggacttgatgcggctataatggacccttattcgcctgatatgatgaaagcctactattcctacaaggcgctttccggcaaggacaagggctgtatggaatatatagcgtatacagagggcagagaagagaaaaaacaggaagtaaaaacagaagaaataacgctttcatatgcaattcagaagggcctttcggaggctgccgagaaaataactgcggcgcttcttgaaaatacagcgcctattgatataataaatacagagcttatacctgcgcttaatgctgcgggagaggaatttgaggcaaaaaaaatatttctgccccagcttataatgtcggctgaagcggcaggcagagcttttgacatactcaagagcagaatgccttcaaataccgatgagagcaaaaaaatagttatagcaactgttaagggtgacattcacgacataggcaaaaatatcgcaaaggcgcttcttgaaagctacggcttttatgttgtggatctgggcagggatgttccgcctgaaacagtgcttgaaaacgcaaagggctgcagtctgataggcttatcggcgcttatgacaaccactgtgccgtcaatggaagaaactatcagactgatgagagagcacagccccgagacaaaaatcttagttgcaggcgcagttattacagcggattatgccgagcagataggagcggactattatgccgcagacgctatggacactgtaagaattgcacagatggttataggataggaatatgatacaggggttatacgaaatcagaaaaaacgaaagcgaaaaactgtttacaatgtggcttgatgcatttcacgattatcccaagcttgcggaggcttttccgcagatggacaaaaaacttgccgcaatggaggcgaccatcagattttacggaatgtatgatttaaaatacggccaagcctttgctaccgatgagaatattgatgacggtatagtgattgtggactcggaggatatgcagtacactacttcaagatacattgaagcaggctgttattccgacggctacaatgccgcaatgaacaggcttaccgaggaagaaaaaaacagacgcatcgctgtatttgatgagcttgatgagctcgaaaaaacaatggatataccgtatccgcatatttatattgatttccttggtgtaagaagaagctgtcagggacagggcagaggcagaaagcttatacacaaaattacggaatatgcagacggcagaaacagacctcttatgctgtttaccaatacatcggacgatgtggcattttatcagaaagagggatttaaggtaatcggcgttgccaaatcagacaaatacggatttgagaatacatatatggtcagggagtcgggaaaatgagcaaacatactaagacaaacgtaatgagaacgctggaaacagcgggtatcagctacgatacaatggaatacgatgtttcaaaaggctttgtcagcggagttgatgctgcgcacaaaaccggcagagatgaggctgtggtttttaaaacccttgtaacgacaggtaccagcagagagcattacgtctgcgtgatacctgttgcagaggaacttgatttaaaaaaggccgcaaaggttttcagcgagaaaaaaatagaaatgcttcacgccagggatataactaaagttacaggatatatcaagggcggctgttctcccgtaggtatgaaaaaacagtttaaaaccgctgttcataattcagcctgcgagcttgataaaatatatgtaagcgcaggtaaacccggaatatcggtaggggttaacccccatgaacttgtgcaccttataggcgcacagtttgcggatctgattgtatagataatctttccagtttctagttttgggtataaaagcttgacaagtgtggcaaaattgtggtagaattagtgctgaaatgagataaaactagtccaaactagaaagaaaggaatatctatgagatttagatggatcagtctgtttgttgcagtaatgatgatcacgatggggttttcaactgtaactggatttgcagacgacgaaaacaccttatcccagcagacagcttccccaagtttagaaactattgcagatgaagatttactgactgccgatgatgttgacacgcccgataatgtcaaggctaaaggcatcagcaaatcaaagattaaagtaagttgggactccgtagacaatgcggacggatacaaagtatacaggtacaacaaatcaaaaggcagatatacctgtatcaaaactataacagatgaggacaaatgttcatataccaatacaggtcttgataccaacaccaaaaagacctacaaggtatcagcatatgcattgagtgacaatgacggctttgtagaaagtgacctttcaaaaaaagcaaaggcgactacacatccgagaacaatcagggttaaggcttatgcatattcaggcggcggcacaaccgccagcggcaaaaaggctgccaaaggcgtaattgccgtagatcctagagttatcaggcttggcaccaaagtatatgtaccgggctacggatatgcgacagcggcagataccggtggaatgattaaggggaatatcattgacgtatatatgaacacaaattcacagtgcattaaatggggagtaagatatatcacaattaaggtgtatgattaaaagaattgccattaccgcaacaggtagtggcttttttgcgggcaaatatattacatagtttttgtagatgaaatatgcaaatggtagtataatatatagataatattgtagatatcaggaggatatgatgcttaaagataaaacagtggtactaggtattacaggtagtattgccgcatacaaaatggcttctgtagccagcagcctcaggaaactgggagtaaacgtcgaggttataatgacctgtaatgcgactcagttcataactccggtgacctttgaggcaattacaggcaacagatgtattacagatacctttgacaggaattttgactttaacattgaacatatatcattagccaaaaaagcagacctgtttattgttgcgccggcttcggcaaatataatagggaagattgcaaacggtattgcagacgatatgcttacaacaacatttatggcgtgcacctgcccgaaacttatagcacctgcaatgaacaccaatatgtataacaacaatattttacaggacaacctgcgcagatgtcagaactgcggcatcagaataatagagcctgcaagcgggctcttagcctgcggcgatgccggcagaggcaagctgccggagcctgaattactggttgagcatatattgagtgaaatacagtatgccaaagacctgagaggcaaaaaggtgctggttacggcaggacctactatggaggcgatagaccccgtgcggtatattactaatcattcaagtggcagaatgggatatgccatagcaggatgcgcagcctacagaggcgcggatgtcgtacttgtaaccggcagaactcacatagagccaccgatttttacaaaggtgataaaggttacagatgcagaaagcatgtacaacgccgtaatgagtgaaatagatgacgcagatataatagttatggcagcagccgttgcagactatactcccgctcaggtaagcgatgagaagctcaagaaaaaagacggagatatgtctgttgaaatgaagcgtaccagagatatccttaaagaagcgggaaaaatcaaaaaggcaaatcagtatatatgcggatttgcaatggaaacccagaatctcatagagaacgcaaaggcaaagcttgaagccaaaaatgcagatatgattgtggcaaacagtctgaggacagaaggagcgggctttggaactgcaaccaatgttgccacactgattaattctgaagaaataaagcagctccctataatgagcaaggaggagctggcggaaataatacttgatgaggcaatcaaaaatattaagcggtgaggtgacagatgaaccgaaaaaactgcgtggcggctctgtctgctattcttgcggcagtgttttatgcgattaatattccggcatctaagatactgcttggaagtatagagcctgttatgatggcagcagtcctgtatcttggcgcgggcataggcgtaggcatcatatatatggcgagaaaaaacagagaaacagcccaaaacagcagccttaacaggagtgatctgccttatgtgctgggaatgattttgcttgatatagcagcgccgatatgccttatgtacgggcttggcgcaacaacagctgcaaatgcttcacttctcaacaactttgagatagctgcaaccgcagtcatagcgcttgttatatttaaagaggctgtatctgttaggctctgggccggaattgcactcataaccatatcgagtatgattttatcctttgaggatatgtcgagcctgcagttttcgtggggctccgcatttgtactgctggcggcggtatgctggggatttgaaaacaactgcacccgcaaaatatcatcaaagaacacatatcagataattatgctaaaaggcatattttcggggcttggttcatttacaattgcgatgattacaggagagcccctgccggatataggtcttgtgcttattgtgcttgcactggggtttgtatcgtatggactcagtattttcttttatatcagagcgcagaggaggcttggagcggcaaagacaagcgcatattatgccatcgcgccgtttgtgggggcatttttatcgtttgtatgtctgcacgagacgctgtctgtaaactatttcacagcccttgtaataatgctggcaggctcggcattggttgccgcagatacgattattgtaaaccatactcatatacacacccatattgtgactcacactcacgacggcagtacccatacgcatataatcgaacattcgcatggtcacaagcatatgatagacggcagcgtgcacgagcatacgcacagtgaggaaatagcagtccattaattatatagatttggagaaattatgacaaaaatacttataagcgcgtgcctttacggtcacgcagtcagatatgacggcaaggcaaaacgcctttcagatgatatatttgaaaaatggcagaaagaaggcagactgataccggtatgtcctgaagttgcgggaggcctgcctgttccgagagcgccgtcagaaatcacagggaacaaggtaatcaattcagacgggatagatgtaacggccgaatatacaaaaggtgcggaatacgcactggagcttgcagatgaacatgagatagcatttgccgttatgaaagagggaagccctgcatgcggcagcagcagaatttatgacggaagcttcacaggcactaaaattcccggtgaaggcatggcagtaagactgctcaggcaaagcggctatgaagtgtttaacgagcttcagcttgaacaggcgcaggcgcttcttgatgaaattgaagaagctgacgagcttgcggagcttctgttcaatatacaattgtagttctaatttgtccacctgctaaatattatttactatgtttaacaggaggacatctatgagatacagaagacccagatacaacagaagaagatcctctgcaagaggcagaaacgaaagaataggctttaatgcagttctgcttatccttatagctgcagtaattgcaggctatcttaccacaagatttgttctttaccctctgctgggatttgaattcccgtcacttgaaaccatatgggacaaataccgtccgtctgtttccgaggacaaaaacagcaataaggacaagacggaggacagcagatccgaaacaaaggagcagaagacaatcgttgaggacaaaaaagatgcatcagaggagggctatgtgatacagttcggcagcttttcaacaaaggctgcagctaaagagcgcgcctccgagcttaaagacgagggcatcaaaacctcggttatagaaaaagacgattgctacaaggtggtaggagagatattcagtacaaaagacaaggcaaaaacagctatggcagacattgactatgacggcgtgtttgttacagagctcaaataagtgaggattaatatgatacctttatctacaagaatgagacctgacagactggaggaatttgcagggcagacccatttcctctacaaaggctctctgctttacaattcaatcaaaaacaagacctttgactcggcagtgtttttcggaccgtcgggcacaggcaaaacaacacttgccagaattgtggcaaaggaaatggacgcaggctttgttgaaataaatgcttcgaccacaggcaccaaggaattaaaggagcttatcgaaaaggcaaagcttagattttacggactccagcaggaaacaacctatgtatatgtagacgagtttcacaggtggaacaagctgcagcaggactcgcttctcaaggctcttgaggagggtgtaattaaatttataggcagcactaccgaaaatccgtatttttcaataaacaacgcggtgctgagcagagtgcgcaacatatatgaattcaaaagactgtcggcagacgaccttatgaaaatcctgaagaacgccattaacgataaagacaaaggctttggaaatctggatatcagatatgatgaaaaaacacttcggatacttgccgaaatggcagggggagatgcgaggatagctttagacacactgggctttataatcgacaattcagacgatgagcttgcagtgacagaggaactgataacagaggctatgcagaggcagactgtgttttatgacaaaagcgaggacaagtacaatctgctgtcggcgcttcagaaatccataagaggcagcgaccccgatgcagccatacattatcttgcaaggctaattgaaggcgacggagacatcaagatgataggcagaagactcctggttatggcaagcgaagatataggtatggcatatccgagcgccatatcaatagtaaacggctgtattcaggcggcaatgatggtgggacttcccgaagcaaagcttaatcttgcgcaggctgtgatacttcttgcatcatgtcctaaatcaaactccgcaagcgcagccatcgaagctgccatagctgaccttaacagccgaaagatagacgatgtaccgcctcatctgtgcgactcacactacagcggagccgccaaaagaggacacggcataggctataagtatcctcatgcctacggtggctatgtaaaacagcagtatcttccggacaacctttacagagagggcgttaaatactataaccctacagaaaacggaagcgagggcgcatttaaaaaatttttagaagggctggacaggctttatgaaaaagacaataacaagggctgattattcaggtttctgcttcggagtcaaaagagctctcgaaaaaaccaatgaagcaatcgcagccagaaaagaaaacgaaaagatatataccaaaggcccccttatacataacaaggctgttacagacgagcttgaaagcaggggagtcggaataattgacagcttagattatatcggaagcaatgccgcggttatagtacgctctcacggcgagccggaaagcttctacaaagaagcggaggcaaagggcgtaaggcttattgatgccacatgtccgtttgttgaaaaaatacatacccttgttaaaaaagcccatgatgacggctatacaataattatagcgggagacagaaatcatccggaggttacaggtaccaacggctggtgcggcaacagcgccgtagtggcagaaacagcgcaggaggcagcggaaagtatttgttgttgctcagacaacggttacggaagaaatctttgataaggtctgccggaatataaaggcggcggaatgtgttacccggaataccatatgcagcgcgaccaaaaacaggcaggacagctgcattgaacttgcgaaaaaatcggatataatggtaattataggcagcaaaaacagctcgaacactcaaaaattatacaatgtatcaaaaaaacattgcataaaaacctattttgttgaaaatatcgaagatttaccattgaaacagatagaaaaatgtaataaaataggtattacggcaggtgcatcgacacctgaacgtataattgaggaggttatttctataatgtgtgaaatcactaaagaaacaaatttaatgaatgactacatggatgagattgaaaagtcattaagattaccaagaggcggcgaaatcgtaaatggtaaggtacaccaggttactgaaaacgaagttatagttaatctaggctgtaaaaaagacggaatcattccgaaagaagaagtttctctcgaagagggacaaaaattatcagatgtattttcagaaggggacgaagttcaggctaaggttattaagactgatgacggtgacggcggcatcttactttcaaagaaaaagttagaagttaacgagcattggaacgagatcattaatgcttttgaaaataaagaattagttactgtaaagattacaagagccgtaaacggcggcgtaatcggcgcgtacaaagaagttaccggctttattcctctttcacagctttcagacaagtatgttgaagatcctgcagaattcatcggacaggaaatggaagttaaaatcacaagagttgatcagagaagaggcaagattgtattctcaagaagagcagttctcaacgaagaaaaagaaaaaaaattagctgaaatctgggctaacattcacgttgatgacatcgttgagggtaaagtaatgagatttactgactatggcgcatttgttgacataggcggtatcgacggacttcttcacatctcagaaatttcatggggcaaattaagacatcctcaggaagttcttcagattggcgacactgtaaaggttaaggttctttcaatgaacgaagaaaaaggcaagatttcattaggtctgaagcagactatgcctgagccttggtcagtaatcgatgagaaatacgaagttggtcaggttgtaacaggcaaggttgttcagattaaggaatacggtgcattcgtagaacttgaacctggtcttgacggtctggtacatatttcagaaatcgctcacaagagagttaatgacatcaacgaagagcttacaatcggacaggaagtaagcgctaagattcttgatatcgacaaggataagaaaagaatcagcctgagcatcaaagctacaactgctcctgaagcagaagctgatgatgcagaggaaactgaagaataatatttccgagcattcagagagaaatcataacggtttctctctatttttgtaattgtaaggtacatattttagatatacgatggactaaagtgctggatttgacatgtaaggttgaaattgcaagccttaattagtataattagggtcgtgactatatgacgatgagaggatatgaagctttatgaataaatttgaatgcagaattgcacaggtttttctttatataggcaaggcctttataaagtggaggagacctgagcttgtcaaaggcgcaggcagctgcggtacccttgcctacaatattctggcaaggggtattgacaacgtgctggttgtaacaggccctaacatcagcaagagagggcttgcagacagcatgtacgagtcctttgacaaaaacggcattaaatacagcatatataacaggactcagaacaaccccacgactgcaaacgttgaggaaggctatgacatttaccgagaaaacaaatgtcgggccatagttgcttttggaggcggctcacctatggactgcgctaaggctataggggcaagggtgtcaaatccaactttaagcattatgagtatggcgggaatgttcagggtaaaaaagaaaactccggtgttctttgcagtacctacaacagcaggtacaggaagcgaggctacggttgcctccgttataacagacgaaaatgaacatcacaagttcactataaacgaccctaagctcatacctgatgtggctgttttggatccgtgtcttacagtgaatatgccaaagcatctgactgcgacaacaggcatggatgctctgactcacgctgtcgaagcatataccaacatattcagcggtcccacagacagaggagcaaaatacgctgtcagacttattttcaggtatcttccgcaggtttacagggacggtgatgagattgctgcaagagaaaaaatgctggaggcttcttatgaagcgggtgtagcctttacacgttcgtgcgtcggatatgtgcatgccatagctcatacacttggcggattgtacggcactcctcacggacttgccaacgcggttatactgccgcatatactggagctttacggaaaagctgtgtataagccgcttgcagagcttgcagatgctgccgatatttcaggaaacagcgacagagagaaagcagagaattttatcggcgcaatcagacagatgaacaaagatatggatattcctgagcatcttgagataaaggacgaggatattcctaagatgattaaatgggctatagcggaggcaaaccctgtatatcccgtacctgttatctggaacgaggctgatttcagaaaggccatagacaaaataagaggaaaaatataactgacagggatatcaggtgcgtctgatatccctgaaattttatcttctaggtctgtggtgatgatcgcggcaaggatcgcaagggtcctcgcagcattcgtcacagcagtcattgtgctttctgccgcaagggtcgcattcgtcctcaaaatcatctgcgcagatttctccgcagttttcgatagtgtcgctttccttaatctgatgagggaacagagtagggaatgtggtgcatattgtgttggcctgaggggaaagctgaaccatacctgttgacagtacacacatctgcacaggtacaacgattttcttttcacatgttacgcacagagcgatgataaggtttccggatacatctccgcaaggagaaatacacaggtctctgcccatgttgtttgtcgcaagtcttgtttcacacgcgctgttgcaaaactccgtaaaccttggcaggaatgcagtatctgaagtacttggcatacagatttcaaagaagtttgtaagtaccagcggctgctgctttgtagctatgttaacctgcgcgcagaccgtaaaaacagactcgttgttgcatctgtcgcacagcagcagatccatttccacaattacatctcctgtgatttttatgttctgggttccgaaaatcggcgtacccatacatttgtcgtcacagtctgaagtgttggcatacaggatcttttcagaaaatgtaccgtcagctccgactacctgcagatcttttccgccgggattttgcaggaatgttgcgcctgaaattgtagtatcaagattaagctttaaatttgcaggatcttctatgttttccggattgaaaaatcttctgcatcttatgtctattactcttttaactctgtgtccttcgggaattgccggtgaaaaagcctgatttgtcacagtgcgcataccctgcagattaaacagcaccgcatcatatactttctgtacatatataggctcggtaacgacattttcaagatttccgtcaaattcacagagtgtattggcattacagcagttctgatacatatccggtgataatcttccaccgaaacagctcatataaatacctccttttatagtactttatctaaagtagtatatgaataaatccaaaaatgtgttacaataaccttgttgtttaaaaggagagcggcgaaatgaaaagaattgacaacaaagagaagcaggacaatgacagcagagtgtacaaacgcgcaagccttgcgatatttgtttccgtaattttactctttgctgctgtcatgttcgttaccgaaatggtagacaggttttttggcaggacggccggtacgattgcacttgtaataatcgcggcggcgatagccataatattatacagaaaggaaattgcggcctttttcaaaaagaacaggtcataggtttattatgattaaagtaagagatttaagctgcggagcaagacttgtaatggaggagataccatacgtcaaatcggcagccataggtatatgggttaaagccggcgcagtaaacgagcagccggagatttcaggcgtatcccactatatagagcatatgcttttcaagggtacagacaacagaagcgccaaagagatagcggcagatgcagacagaattgcagggcagataaatgcatttacaggcaaggaggcaacctgctactatatcaaaaccctgtcggagaatatcgacaaggcggctgacatactgctggatatgtttcttaattcacagtttgaccctgtggagatggataaggagcgtatggtaatatatgaagaaatgaaaatgatagaggactctcccgaagatgatgctcacgatattatatgggaactggtatttgacggcaatcctcttgccaaatccattataggtactcaggaaacgctggcggggatagaccgtgatgtaataaagaaatatatcagcgagcagtatacaaccgacagcatagttgtttctgttgcgggcaatttcgatgaggggcagctggtttcagtatttgacggcagatttgacaaattcgccagaaccaaagagcatatagagtattcggatatttcctacagaccgcattatcgttccaaggtcaaggatatcgaacagagccatatctgtcttggaaccataggcatagccagagatgacgagagattttacgctctttcactgctcaacaatataatgggcggcagcatgagttcaagacttttccagaacatcagagaggaaaagggtcttgcatattccgtatactcaatagcaagttctttcatacacacaggctactataatatatatgcgggagtaagccatgataagatttatgctgcaatcaagggtatagaggaggaactcaaaatcctcaaaaacaagggaattacggcagatgagcttgaaatatcaaaatcacagctcaaaggcagctatattttcggcatggaaaacgtaaacggcagaatgtttaacataggccgaaaccttacattgagcggcagaataaacacgccggaggaggttataggtaaaatcgacagagtgactttagcagatatcaatgagacagcatcacttatctatgattttgacaattattccgcagtagtaatatccgataaggaaacagacgtcgaaaaatatataaaggaatagactatgaaaattaagataagaagtatatcaggaatacttccctcgtatgaaacagcaggggccgcaggtatggatataagagcatttttgagagagcctgttaccatagagccaggccaaagagcgctgatacctacagggctttttacagaaatcccggcaggctttgaagcgcagataagagcaaggtcaggtcttgccattaaaaacggcatagggcttgtcaacggcataggcactatcgacagcgactacagaggcgagattaaagttcctcttatcaactggggagatgagagcttcaccgttaatgacggtgacagaattgcccagatggtaattgcctcatatgaaacagcgcagtgggagctttcggaggagctttcggatacagagcgcggaggcggcggcttcggacatacaggagtataataacgaaaacaggactgtcatcatatattaccttaggagagtgatatatgatggcagattttttattacttagcagacttgaagaatacataaacagaggaaaaatcctccccgcatattttcagaagtctgccggcgcctacggagtatttacaccctatgcttcctttgcagactgcacctgcgcggaatttttaggcgataatgcagagccctcggaatgttttgtcaagtttgccccgatgtgtgaaaaagcaggcggagccgactctgtgagggatataagggggatgtttacaaggttttttacaggtgagggtcattatgatttactgtgtcaaagcttccccgtgttttacataaacaggcttgaaaagctgcagggtctgctggaggcgctgggagagagtgcggattcaaatacgagagatgaaagcaggctctggcagtttgttgcagataatcccgaaagcctcagccttataatctacctttattcggacagaggaactgttaaatactatgtgaaacaaaggtattacagctttttttcatcaaaatggattaacagtgagggcagagattattcggtcagataccgctggataccgctctgcggtgaggaaaccataactgcttcagaagcggagtttcttgcaggctacgacagagactgctgcagagcagatttatatgacagaatagacaagaaaaactaccccgaattcgagcttcaagtgcagctttcggatacagcctgtaataagagctgcgaatattcccataccgagatttgtgaggaaggcgcgggccggtatattccggcaggtagactcaggcttacaggcagacccgcagaccatataaacgaggtggacagcattgcgtttacgccttttaatctaattagtggcatagagcttgaaaaggatgagctttcagagggaatagcatttcttttttcaaactgcggcaggcagagaggaggtcgtttttaatgagcataaatcaggcaagagcagaatattattcaatgaccgccgaagaaaaagagcattttacagctaatctctgcgagagcatattttttcttaacgatgcccttaaagaaaggataatagcgcttatgggagagatagacagggaacttgcgcatacgctggcggaaaaaacagattaggagaaatcaatgccgggtcttgctttgctgattttaattacagtcgctttgggctttgaatttataaacggatttcacgatactgccaatgcaatagcggtttcaattcatacaggggccttgtctgcgggaagggctgtggcgcttgcggctgttatgaatctgctcggagcctttgcaagtgaaaacgtagcaaggacaatatcaggagagcttatatcggctgcaatcgacgaatatacaataatagccgcgcttattgcggcgataatatggaatctgtttacgtggtatctgggtatgccggcaagctcctcccacgcgcttataggggcgctgataggagcttcggttatttttacgggaagtacggacgccgtgctttggaaaaacctagtcttaaaagtggtgcttccattgtttttatgtcctccggcaggctttgcagcaggcgcgctggcatctttatttataaaaaaggaaaacaggataatgcagatagtggcttctgcctttgttgcgttttcacacggagaaaacgatgctcagaaaactatgggaataattactttagcccttgcaggcagaggaatactgtgtgataatgatagcataccgcctgtaattaaaatagtatgcgctcttgccattgcggcaggcacatcgataggcggcttcagaataatagatactatgggcaagggtcttgtcagactcgaaaagacaacaggacttgcggcacagctttcatcggcatttgtaatacaggccgcatctgctgcgggaatacctgcaagcactcagatagttacagcctcaataatgggagccgggcgaaagcagcgacagaaaacagcaaagcctgtatttgtactgctgttctggcttatgactatgcctgtatgcgcattttcagccggcgttattatggctgcaatcagatatatataaggggatgcacagatgatattaagagaggacttagaaaaaagagaatatatgatttactgcgaggccgccgcaaaggcagacgcttcaagaggcagagccagagcagaggaaaaatgcagactcagaaccgagtttcagagggacagagataaaatacttcattccaaggcattcaggagactgatgcacaagacacaggtgtttctggctccggagggcgaccatttcaggacaagacttactcatacgctggaggtgtcgcagatagccagaaccattgcaagaggactggcgctcaacgaggatcttacagaggccatcgctctggggcatgatctgggacatacacctttcgggcataacggagaggctgttttaaacagtatacacagcgatggattttctcacaatgtgcagagtctgcgggttgtggatgttctcgaaagccacaacggtatgagaggaatgaaccttacagaagaggtaagggacggcatactaaatcatacaggcaagggagtgccgtttactcttgaggggcagatagtaaagataagcgacagaattgcatacataaatcacgatatagacgatgccctgcgaagcggcgttatatccaaggatgacctgccggcagagtgcatcagatatctgggagacactcacggcaagcgcatagacacgctggttacggatatgatagagaataattccggcaaggacttcatatcgcaaagcgaggaatgcagacactatatggataagctgcgaaactttatgtttatcaatgtgtatcacaacgaaaaggttaaaaaaacagagcagcttatgaaagtggagcagataatcgtgtcgctctacgagtattttatggacaatcccgataagctgccggaggactacaaggagcttatacctgaattcggtacagatgaaatggtcaaggattatgtggcaggtatgacagacagatattccataatgatgtacgaaaagttgtttgaaaaatagacggcagacgaaagagggtacaatgaatataagcagaaaaagacttaccattttattactgattgcatttatactgcttgtcgctctgtgcttcagaacggcatggcttcagattgtaaaatcagaagaactgtctaagatggcatctgtgcagcagacaagagatttaaatgtcacagccaaacgcggagccatatatgacataaacggtgaaatgctggcggcaagccttacaaggtatgcggtgtggctgagaagcggcagtgtaacaaacaatgcaggcatcaaagacagagatgaatatgcggcaaaaatagcaaagaccgtggctgatgccgctgactgcaggagtgaagatgttcttaatgaaatagattttgataaataccttgtcagaattgccaggaaccttaccggggagcaggcagacaaaataagggaagcggagcttacaggcatagagcttgccgaggagcctgtcagatactacatacagggcacctcacttgctcatactctaggcggtgtcaatgatgacggaaacggactgtttggacttgagcttcaatataacgattatctgtccggtatatcaggcagagcggtcagagttacagacggcggaggcaacctgctgacaggaggaaccaaacgggataatcaggtttctgacggatacggacttatgctgactgtcgatgaggtcatacagactcatgtcgaaaccgcaatagcaaagacaaaaaagaaaacctcaagcgataaggtttccgctattgtaatgaataccaaaacaggcgacatacttgcaatggcgcagactccgggatttgacctcaacaatccgagagtgccgcttctgaaatccgaaagagcaaagcttgataaaatgtccgagactaaaaagggagaatactggagttcaatgtggagaaactcacttgttaccgacctgtatgagcccggctctaccctcaagcttcttacaacagctatggctcttgaggagggaatttcaaatgtaaacgaaacattttactgcaatggtttcaaaaagataggcaatgaaactctcaagtgctggagctatcagaagcctcacggaacccagaccctcaaagaggctgtgggaaattcgtgcaatcctgtttttatggagctgtcgctccgaataggcgcacgcaagtcatatgaatatcttgaaacctttggtgtgacacaaaagacaggaatagactttccgggagaggcagagtcgattatagcaaaaaatgtgggaaatgttgatttggcggcaagaggctacgggcatggagttgccataactccaattcagctcataactgctgtttcatcatttggaaacggcggcaaaatgatgaagccaagacttgtaaaggcgctgcttgacagtgacggcaatgttatagaggaaataaagcctgagataatacggtatacggtttctcaaaaaacagcgcaggaagtttgcgatattatggagtatgctgtagacaagggcggcgtaggtactgctaaggtcaagggctaccgcataggaggcaagacaggtacggcccagcagccaaaaaaagacggcagcggctacagcaataaaacatggtcctcgtttataggtatggcgcctatggaagaccctgaaatagcagtactcgttattacagacaatccaaagggagtaaggtacggaagtcagaccgcagcgccatgcggcaggctcatattcacagagatactgaggtatcttgaattttaatgtaaattgtttaaaaataaaaaaaaggaacaggcattgttttgtcgaataagaatatgtgattttttcgcaggaggtaagaatgtctgtttacgagaatgcagttgaagaaattaaaagcaggtgtaatatcgttgatgtcataggacaggttgtcaccctcaaaaaagcggggagcaactacaagggcgtttgcccgtttcataacgaaaaaacaccttcttttgttgtttccgaaagcaaacagatatttacgtgcttcggctgcggagccacaggagatgtgtttgaatttgtaaaacgctattacaatttggactttaacgaagccctcgaaaagcttgccagggaatacggagtcacgcttgaacacaggggcggcagaaacaccgaaaaaaaagacagactgtatgagataaacaggcttgcggccagatttttctttaaatccatagcaagcgccaaaagtccgggatacagatatatgacggacagaggcattacatatgaaaccatcaaaaaatttggcataggctatgccgatgacaaatgggacagtctgtacagatatatgacggagcagggaattgatgcggatactcttgttgaaatcggccttttatcaaaatccaagggcaaatattacgacaaattcagagatcgggtcatatttccgataataaatacaagaggcaaggtcataggctttgggggaaggattataggcgagggtatgcctaaatatctcaattcgcccgagtcacccatattcctcaaaaaaaacaacctttacggtctgaaccttgcaagacaggagatatcaaaagaggactgcgccatacttgtcgagggatatatggacgtggtatcgctttatcagagcggcattaaaaacgtgtcggcatcgctgggtacggcgcttaccgaaaatcaggccaagatgctcaagcggtacaccagaaacgttgtactgtcctatgactcggacaatgcgggacaggcagcggcgctgcgtggtatagacatacttcacggcgaggggtgcagagcaagagttctgcacgttacagacggcaaggaccctgacgagttcgtaaagaaaaaaggcagacaggcatttttggagcttgtagacagctcccttgcatatgcggactacaaaatcgaggttctaaaaagccgccacaaccttaacgaaaccgacggaagaatagaattcgtaaaggacaccgtagcggcgcttcaggatttaagacctgccgaaagggatatctatatcaaaaaaatagcggcagaggcaaaaatatcggagggcgctataaggcttgaatttcgtggcaataataaagatgagcagacgcagcgcagcagagcgccggagagaggtcacagggagcaggagcctgcagagaacatatctccgatggaaaaaaacctcataaaactgattataaatgacagcagaacttttgagacaatacggccctacagatacatattcaaaagccgtgagggcgagaatatattcagcagtattgaagcgatgtatacagacggagaggatatagatataaacaagcttgcagacagtcttgacgagcagactatggcagtattcaggaatattgtcgataatgtttatcttggcggcaaggatcaggaaatactcgaggactgtattattaccctggaaatagaaaaactccgggacagatatgaagagataagcacaataatagagcttgccgatgaaaccgaaaatcaggaaaaaataaggcagcttatgacagaacaaatggaaatacagaaactgatgcagcagatgaaagaaaggggatagaagcatatggcctacaatgaagcagatgaaaacaaaaagaaagagtgtataaccctgctcaaggaaaaagcaaagagcaagggcggcaagctttcctacggagagatttcagaaataataggaaatctcgatatggataaggattttatcgacgatgtgtacgaaaaaataatgaacatgggtattgagatagaatccgaaatggaaatcagaaacgatgatacagatatagagcctgatgaggcggagcttcttaaccttgatgtagacgaccttgaacacgatgacgatatggttatagaggacggaagcgttgaccttgaggcctcacttcctaaaggaattacagtagatgaccctgtaagaatgtatctcaaggaaatcggcaaggtgcctctgctttcggcagatgaggaaatagagcttgccaaaaaaatggaaaagggtgatgaggaagcaaagaaaaagctttgcgaagccaatctcagacttgtagtcagcattgccaaaagatatgtaggcagaggtatgctgttcctcgaccttatacaggagggaaacctcggccttatcaaggctgtagataaattcgactggagaaagggatataaattctccacatatgcgacatggtggataagacaggctattacacgttccatagcggatcaggcaagaactatcagaataccggttcatatggttgaaacaattaacaagctcattagagtttcaagacagctgcttcaggaatacggacgcgagccgtcacctgaggaaattgcggcagaaatggatatttccgaagaaaaagtaagggaaatattaaaaatagctcaggagcctgtttcacttgaaacacctataggtgaagaagaagacagtcatctgggagatttcatacctgacgaggaggttccggctccggcagaagctgcggcattttcaatgctaaaagagcagcttgttgaggtgcttgacacccttaccgaaagagaacagaaagtattaaagctccgtttcggtcttgaggacggcagagccagaactcttgaagaagtaggcaagcagtttgatgtaacaagagaaagaataagacagattgaggcaaaggcgctgagaaagctcagacaccctagcagaagcaagaaattaaaggactacttagaataatgatattgacagacaggctgcaaatgatagcagacgagataaatacaggggaaaccatggctgacataggtacagaccacggatttctgcctatttatctgtgggaaaacagaatatgccctaaggttataatggctgatgtcagcagaggctctcttgacaaggcaagggacaactgcgccatgctttatcccggcgaagtctttgatttaagactgggaagcggacttgaggttctggaggacggtgaggttgataccgttgtaatagctggtatgggaggcatactgatgacgcagattatgtctgctgatattaataagaccatgagcatgggcaaatatgtactgcagccgagaatatcgtcaggaaggctcagacactggcttttgtcaaacggcttcagtattacaggcgacagacttgtcagagagggcagatttatatgcaatatcataactgccataacgaaagcaggcagaaatctgacaaagcttcaggagaatatatcgtttttctcatcacttgccgaggatgacatacgccttgagatgccgccatggcttgcagaggagcctcttggcagggaatttatacagagaagaataaattctgagaaagatatatcagaaaagctcaaattcagtaaagataacggcaaacaaattattgtaaaccgaaatatagagtatctggagggactgttaaatgaaactgtatgaccttataaacaggctggacagcatagttcctgaggaaacacaggagagctgggacaacagcggaatacagataaactgcggcaacagagaaatcagaagagctcttgtggcgctggaaataacctttgaggttatagaggaggccgtaagagaaaaagccgatatgattataactcatcacccccttatatttacggggcttaaaagcgttgatgcggatgaagtcaggggcagatacataatagaccttataaacaacggcatatccgtatattcactgcataccaactttgacaaggctccgggaggaaacaacgactatattgcgaatatccttgaccttgacgaaatatacccgctgattatagacggctgtgatgatgaaatcacaagaacaggctactgcaggcagacaagtcttctagagcttgcgcatacactggctgatggacttggaatagacagaagctttgttacaattacaggcgagcctgatactccggtaagcaaggtgggaatatgtagcggcgcagggtctgaatacatagagcctgcaatgaaaaacggctgtgatgtgtttgttacgggagatgttaaatatcacgaggcgattaatgccagagaaatgggaatgtgcgttatagacgcgggtcatttcggtacggagaggatatttgcagatgcttttacagaactgatgtattcaaatgaatttacagaagtggattttatcataagcagtatagatataaatccgtttgaaaaaatttgatattattcgggcaggcagacaatcgcaggccgtaaggcgtgaggaaagtccgggctccacagggcgaggatgccagataacgtctggtgagggtaaccttaaggaaagtgcaacagaaacataccgccgaaacagtttggctgtggcaaggttgaaatggtgaggtaagagctcaccggcagtatggtaacatgctggccgtgtaaaccccattcggagcaagaccaaaagcgggcataaaaggcggctgcccgtcgctgcccgggttggtgggtcgcttgagcctgctggtgacagcaggtctagatagatgattgtctgatacagaacccggct

SEQ ID NO: 3200 - DNA, 7678 bp, Unknown
  16S sequences of unknown bacteria
aggaaagtccgggctccatagggcaaggataacaggtaacgcctgccgggggtgaccccaggaaaagtgcaacagaaagataccgccctgccttgcagggtaaggatggaaaggcgaggtaagagctcacccgccgcatggagacatcgcggcgctgtaaactctatccggagcaacaccgtggaggagataaggctggcccggctgtctccgaggaggtggctggagcgcacgggcgaccgtgcgcctagatagatggctgtccacgacagaacccggcttacaggcccgattgcaaaaccggcgcgcttctgcgccggttttcctaaaaattatcccgcgcaagcgaggtggcaccgtggcctcttactatatgttctacaagccccgcggctacctgacggcctgccgcgacgcccaccgggcgacgatcatgccccttctgcccgccgcgctgcagcacctgcaccccgtcggccggctcgaccgggataccgagggtcttctgctgctgacggacgacggcaggctggataaccgcctgctgcagccccgggcgcatgtggaaaaagcctatttctttgccgccttcggcgcactggaagaagacgcccgggccgcgctgcaaaccggcctgctgctgcccggcgacccaatcccgacggcccccgccgttttgtccggcgtgcagcgccgtcctttgtccgaattccaggcctggctcccggtgggctataagcgccgcgtcctgcgcctgccccagcggcagatcgtcacagggacgctgacgatccgggagggacgcaagcaccaggtccggcggatgctgggcgcctgcggctgccagatcttttacttaaaacggactgccatcggcggcgtcacgctggacgcgacgcttgcccccgggcagctccgcccgctcaccggcgcagagcgcatcctgctcggcgtcgccgcagacagggaggaacctttatgaagcttttgattgcatccgatatccatggctcggccctctactgccgccatctgctggacgccgcggaccgggagcagccggaccgcatcctgctcctgggcgacctgctctatcacggaccccggaacgacctgcccgacggctacgccccaaaggaggtcatctcccttttgaatgaccgccgcgcccagcttttctgcgtccgcggcaactgcgaggcggaggtggaccagatggtcctcaccttcccggtcctggcggattactgcctggtggagttggacgggcatcttgtctttgccacccacgggcatcacgccagcgaggccgcgccccctcccctgcagcccggcgacgtgctgctgtgcgggcatacgcatatccccgcctgccgcgcctgcggcgagctggtctacctgaaccctggctctgtctccatccccaaggcaggctcccgtcggagctacctgctctatgacggcggcgtcttctcctggaaggacctgtccggcaagacatatcacacctggcgctggggagagccttcccaatggtgacaaagcgacagggcgtgctgcttgccctctggctggcactggcccttattctgcggtttgtctgcacagcctgtgattatcttgcgtacagcatcgtctttggcgtcctggtctgggcggcgtatcgcgcgcttagacaccttgccgcgacaaaggccgggcttgcccgccatctgcggcgggcgctgagtctgctgctggcgctttgtgccgtctggtttttggggacagaggtctatctgatctccggcgcccggacggacgatacaacgccgtgccaatatatcgtcgttctcggcgcgcaggtccgggggacgcagccctcccgcgccatgcgggaccggacagacgccgcagccgcctatctttctgcgcatccggacgtcatctgcatcgtttccggcggccaggggcctggggagaagattacggaggctgcctgcatgcgccgtctgctgctggacgcgggcatcccaggcacgcgcatctggctggaaccgaaggccagtgatacggcggaaaacctggccaatagtcttgccctgatcgaagcgcagaccggcacgcggccggaccggctcggtatcgtcagcagcgaatatcacctgcgccgcgcccagttggttgcatcccgtcagggctgccgaggcgtcgccatcgccgcgccgacgagtcttgtctatatgcaggtcaattatttcatccgcgaggcctttggcctctggtattattggctttttaagtaactggaacatatatgaaacacaatggaaggaggcacaccatgcaagaagagattcggcaggacgccacagcccagcccaaggctacagcagccccgcctgcagaaactgcgctcgatacacccaaggcgcaggacagcgctttggacaccgcagaagaggtcacagaggaacccacagaagagacgctgccggaggaggaaccggtctttgtcagcgattttctcctcgaccccgacggcttttatgagacggcatcctttgcctatctccgagtgacgaacaacgcctggatcctgctggggctctatgttatctatttcgtcgccagcctgattgcggggaagatcacttccctgctgcccatcgtcggcgtcatcatcgccgttgtcacgtatatgctctatggcaacacgaagcagcagatcaaaaatgcccacgcgcggcagatctacatcaccaagaccagcgaatcccggtatcacatcgccctgggcgagcatatccgcatgtcggtcaacggcctgccgatggtccagtacgattacagcgccatccgctctctctgccagacggcccactattacctgctgtgcatggaccagcagatctatatcgccgtcgccaaaaccggcctgcagggcgggacggaggaggagctgctgcagttcctattccacagctgcccgtacctgaaaaacaaaaaggtccccacgaccgagggcaaagaacgcatggccatgatcgcgaccttcgtcaccgtcgccgtgaccctgcttagcctgatcccgctgtttctctaaaaaacgccgccctaacggcacacaagcccccgccggaattttttccagcgggggcttgcaatttggcgaagaatcaaatcaaaatcagatcacagatccaatgccgggttcatatagtagacattcttctggtcgagccgctcccgcagcttctgcagcgcctcaccgaagcgctggaagtggacgatctcccgctgccggaggaatttgatgacatcattgacatccgggtcatcagagagccgcaggatattatcatacgtcacccgggccttctgctctgctgccaggtcctccgtcaggtccgcaatgggatctcccttgacggccatactggcggcgttccacgggaagcccgaagccgccgtggggtagacccccgcagaatgatcgacaaagtacggcgcaaagccgccctcctgcatctgcttctctgtcagcgagcgagtcagctggtggacgatactccctaccatctccaaatgccccagctcctctgtaccaatatccgtcagcagccccttctgctccgcaaacggcatcgaataccgctgactcaaataccgcagcgacgcacccaactctccatccggtccaccatattgactgataatgatcgcagctaggcgggggttggtgtttttgatcttgacggggtattggagtcttttttcgtagacaaacatcgctcagccctcctttttgctgcctgacgcattcttgcccgccgccgggtattcccagggccaggggccgcgcaaccattcgtaggcgccgtcgacgacgccgtccatggcaaacagtgggccggactgctcctgcagcagcgccatgcccttctgatatagggcgcgatatgacgccagcagctcggcggcctcccggtcgtcactgtgggtatcgagatacagcaccagctcgtcgatggcaaagcccagcgcctgcagctcatgcaacggcgtagacggcaggtcggattcgttgaccatgcccataaacggcaggtccagccccgggaacagtgtcccgcgaaccaagccctggggcagcgcgtaatgcgccgggtcattttgctggaagggcacatatggattggccagcggcgcgcagctgggcagatagccaaagccctcacggcgctcgggctgcgtttgatctttttgcatgaaattgaaacctccgttccggcggatcgcgtccgctctggttcatcttatgccgcagattccgcgctgttccaacaaaatgggcttccatctcaagatcgcgaaaaaatttctcccatttcttgatttttccgccggggttgtttatcataggagcagatcttaggacgaggtaagacactatgcgtattgtggttaaaatcggcacctctaccctggcccatgcgacaggccttttgaatattcggctggtagagagcctttgtaaagttttgagcgatttaaaaaacgccgggcacgaggtcatcctcgtctcctccggcgccatcggcatgggggtcggcaagctccagctggcccagcggccatcggatatgccgacgaagcaggccgccgcggccgtcgggcagtgcgaattgatgtacgcctatgacaagctgttttccgaataccaccataccgtcgcccagctgctgctgactggcagcgacctggaccacgaggaccgcaagcagaacatcgaaaacaccctcttccgtctgctggagctgggcgcactaccgatcgtcaacgaaaacgacaccgtcacgacggaggagatcggcatcggcgataacgatacgctcagtgccatcgtggcgatcctagtcaaggcggatttgctggttctgctctctgatatcgacgggctctacaccgcggacccccacaaggacccgaccgcgcagcgcatcaacgaagtgcctgccatcacgccggagattctggccctgggcggcgcctgtggctccagtctcggcaccggcgggatgcgaacgaagcttcacgcggcggagctcgtgaccgccgctgggacggatatggtcatcgccaacggcagcgcgccgcagctgctctatgacattgccgccggccgccgcgccgggacacgctttcttgggaggaaagacctatgacaacactggagatcatgcagcaggccaaggcctgccggatgcagctgacccaggcaacggggcagcagaaaaatgacatgctcctgtccatggccgacgcgctcgtggcaagccaggatgcgatcctcgccgccaacgcccaggacctagccgccgccaaggggcagatttctgatgtgatgctcgaccggctggcgctggacgcatcgcgtatcaccgccatggcgacggggatgcgccaggtcgccgccctgccggacccggtcggcaagacactgcggcatgtagagcggcccaacgggctgcagattgaccgggtcagcgtccccctgggcgtcgtagcgatcatctacgagagccgccccaatgtcacgtcggacgcggcggcgctggcgctgaaatccggcaacgcctgcattctgcgcagcggcaaggaagccttccgctcggcggacgccatcgtccgtgccctccaggatgggctggaccgcgtcggaatgccccggcagctggtgcagctggtgcaggataccagccgggccagtgcgacagagctgatgaccggcgtcggttatatcgaccttctgatcccccggggcggcaaggggctgattgcctcctgcgtcgccaatgccaaggtgccgtgcatccagacgggcacggggatttgccatctttatgtggaccagtctgcggacctcgcccaggcactggatatcatcgaaaacgccaaggccagccgcccctctgtctgcaatgcggaggaggtcctgctggtgcatcgaaagatcgcggcccgcttcctccctgccctgcgggcacgtctggtggacgcgcggcaggcggcggggctgccgccggtggagctgcggctctgcgaagaagcgcagaagatcatccccggcaccccggcaggtccggcggattttgatacggaatttttggattatattctggccgtccgcgtcgtcggcagtgtcgatgaggccattgcccacattgccgcccactcgacgggccacagtgacggcatcctgacccaggatcctgccagcgcggaaaaattcacgacgctggtcgacagcgcagccgtctatgtcaacgcctccacccgctttaccgacggcggcgaatttggccttggctgcgagatgggcatctccacccagaagctccacgcccgcggccccatgggcctggaggagctgacgacttacaaatacatcgtccgcggcagcgggcaaatccgttaaaggagcggcttatgaaatttggatttatcgggacaggcaatatggccggggccctggtccgggcgctggccaagcaggagcgcagcatcgccctggcaaaccgcactccggccaaggccgaggcgctggcggcggaaacgggcggcgtcgtctggaccaacgaagaagtggcggcgcactgccagtatattttcctgggcgtcaagccgaatctgctggaaagcgttcttgcacccctggcgccgattcttcagacaaggccgcaggatttcgtccttgtctccatggcaagcggcgtgaccatggcggagatccaggccatggcgggcgggccttaccccgtcatccgcatgatgcccaataccccggccgctgtcggcgcggggatgattctctactgctgcagcggcaatgtcacggcggcgcatcgggcggaatttctgacggcgatgcaggacgcgggagcctttgactgcctggaggagcagctgatggacgccgggagcgccgtttccggctgtggacccgcgtttgtctatctatttttggaagcgatggctgacggcggcgtcgcctgcggcctgccccggagcaaggcgcagcagtacgcggcccaaactgtcctcggggcagcgcggctgctgcaggagacggcgcagcacccaggcgcgttaaaagacgctgtctgcagccccggcggcagcaccatcgccggggtccacgcgctggagcgcgccgcattccgcagcgccgtgatggacgccgtccaagccgcgtttgaaaaaacaaaaacactgaaataaacagcataccgggggacgggccacgcacgtgtgcccgccccccgaaaaatttttaaaaagcggcaaaaagcatttgacaaattccacttccaatgctatactgtgcaagataactaagctgatcgaaccgcagccctggctgcacgccctgtcttttctgcagggctttcattttgaggagggtttcccttgcgcgatttactgagagaactgaacgtctacgaagacggcaagatcaaacgtaaggcagtctctttttccggcggcagtattcgtgtttctgataacgcggcagctgctgaagaattgcatcactgttatttatttcctggctttgctgatgtgcatgtccatctgcgggagccaggtttttcttataaagagacgatcgcctccggcacccgggccgcggccc

SEQ ID NO: 3201 - DNA, 7319 bp, Unknown
  16S sequences of unknown bacteria
ctcgacttcctttggggcatgggatgggatttatgatttagtttttgatatgttttcacaatcaggttgacagggtcttcacgttcgggtaaaccgtcgccggggtgaactgcacccagtcgagaagcaatccgggtgtgttcatacgctcaatctgcctgagctcggtgttgttcgtgatgacgagctcgccggtcttcacctcgtatctgtcccggttcactgcccactccatctctcccgagatcacccgcagtatcttcatgtggtcgtctatgtgcatgcgctcatcaagctcacccgacattgtctgccggcagtagttgcacacacatccgcgcgggtcagagctctccgagagcgagtatatacgttctatatgtgtcatagctttatgtaagcgccgtttccgacaaggagacggcgcagtttgtttgtgtcgagcccggtgtttgagcagtcgtcttcaacgcacacagccgccgccgcgccagccgcctgacccgttatgaagcagcccggaatgactctcaccgatgcctgcatcgcgtgatccgctccgacgcaccttccggctacaaaaacattttcgagtccgcgcgggacgaggcagccgtagggaatgctgtacgactcgccgtcgccgagctttctcgagacgtttttcgagaaatcacgcatgcccttctcgtcgggcgtcatcgggtggatgtcgatcgggtatgagtagcgcccgatctcgtcgtcatatgtgaagtcaggcgagaaattcccggcggaaagcgtctttaaacagcgtatccgccttgactcgcgtatgccggggaagttcgctgagtcaatcagtaccgcgttctcacagcccggaacataatcgcggtagtatttttcgtactcaccgagcgtcctgcgcccgaagatcatcgcgtcggtcagcgacttcgcgtcacggtcgtctacaccgaagcagtgcccgacatttccgccgcctatgccgatttcgggaaaattcgcctttatccccgacagcatcatgtcatactgcgtgaatacgccgtcatcaaaggcttttctgagattgatatagtcgattcccttgcgatcaaagtcgactccgccccagagactgcaaaccgacgctgacatcgcgacgccgttctcatcgccgtagtcgtattcagcgcccgcgagcgcgcagagacttcccgctccggtgcagtcgatgaagtatttcgacccgaccgccgccattccgccgggatcggagatgaccgcgtgcgtcactctatcgccgttggtcagtacgtcaaccacccgcgtacagaagcggaaatttatccccgattccgtaatcatccggtcgtacaggcactttatctcctcgacgcggacgttgtaccacttccgtccgccgaaatccttcccgaacagcgagtcgtgcacctcgcgcccgattcctccggcgagaaagttcaccccgtcgtcgaagttcattaactccggcactctggcgagcacgctcgcgccgccgaacgcgcccgactgctcgatcagcattatcctcgaagggtctggcgagaccctcgcgcacatcagcgccgccgcgatgcccgccggtcctccgccgaccaccagcacgtcgaccgaatactttacctgaagctttcttgtgtaaccgagttccattatcagtcaagctctccgtacttcccgacaatgtcgtcgaactgtttgatattgagttcttcagctcctcataggacgagacgagcggcttcttcgcctgaatgcagcctgccatgaactgcgtcgccagcgggtactcgaactcaacgctgcctcttattatgtcgagcatgtccttcgtgtcggcgtcgcgcgagtacttttccttgagcgcgatgtcaaaatataccggtgagagctcgctgtaaccgtttatcgagagcacgtcgagaacccgtcccgagagctctgcgtcggcagtgcgcggaattccgagcacagtcacgttctcgagcaggaatgtcttgtagctctcctgctcctcgtcagctttcgggaagggaagtatgccgaaatcaaacgagctgtcgcgcatcttctcggaggtcgagagcacctgcggatagaatagcgtgtttccggtgttccagatcttcataagattctcggtcgccttgagcgcgtcgtggtcgttgtcgacatagtaaaatgtgctgttctgctcgtttatgaagctctcgacacggtcgtagcccgagatagagcgctcactgagcgagctcacaacatacggagtgccatctgatttacgctcgatgtagtggtgtcccatgcctacaatctgcgcgttgaccatgttgctgtaggtcagccagccgatgcggtcggtctcgtcgaactttccgtcgccgttgaggtcagctccgctgtccttgacgagtgagttcatcgcgtcgaaggtccactttccatcgcgcaccgcgtcatacggcgcttcatacgacaggtcggtcatcagatccttattgaagaaaacaacgcacatgttctgcaagaagttgagtgaagccgagcccgcgacaagatagagctttccgccgacgcacatgttttcgatgtaattccgcgcgtaccacggctcgtttatctgaacgccggggcaggacatcagatcccggaaatagccctcggtcgtcagcgagagcatgtagttcgcggcgctcgcgacgagatcgtatgcgtgatcctcggcgaggacgctctcggctacggctttcttgaaggtcgactgattcgagaacgagccgggcaggctgacgaatccgagcttgacgccgagcagctcctcgaccatgatgttgcgccggtagaccgcgtcgtcgacgatgtctccggtcgattcctcaatagcgaactcatccttgaactcctcgcgcagcaggatcgtgactttctttccgccgtagtcagtgccgcggtggtatgcgtagagatcggtttcgaaaaccggcgcttcggtagtctcaccggcggtagtgttttcggtgtcaggcgaagtctgaccgcagccggtcgagagcagaaaaagcgcgagcaggagcgaaaaagagcgttttgttttcattgtctcattgtctttcggcggacaaccgctgaaagttctccttattttattcgacgataacgtctgatacaattataacacataatactcaaaattttcatccactttttccgcccggctgtgcactattatcggactttgccgcggtatccgcgcggcgagacggcaaacagcttcttgaactgccggctgaaatagagcgggtcagggaatcccacacaagcggcgatctcgtttatcgggcggtcgctctcggtcagcatgactgacgcggtcgagagccggacgcggttcaaataagccatcggcgagagtccgaaggtcgagcggaaggcggcgtagaagttcgactccgacatgtgcgcgatcgacgcgagcttcgcgacatcgatgtccgagtcgtagtgtctcgcgatatagtccgagacctcgagaaggtcgccgcggacgcgcttcttttcctcgccaagttcaagcagcgtctcgagcagcaggtagacctcgctcatccgcgcgcagatgctgtcagccgaaaagagcctgtcgaagcgctcgttcagcctggcacgccctggctcgatcaggcagggaaaatcaaagaccgagtcgagccggtacgacccgtttataacggcttcaagaaatacccagcgcgccgccatcctgccgcttgcgggggcgatgtggtggtttatgtactgcgtgacctgcccgggcgcgatgaagaagccgcctggcctcacctcaaactcctcaccttcgccgagtctgatggtgtagctcccgacctcagcctggacgaccgagagccatgggagcgactttatgtgccttacgttgtcatagtcggcgcggtcatgccgaccggtcgagaggtagctcacgctgatgcttgttatgttcatatctgacctccgaaatctcacactaatagtattatacatgttttgagtagaaatgtcaattcctttttcggaaaaagtgtggtataatttatacaacactaatcagtctggagaaaacaaatatggaattcatcacattatcaaaagaaaaacgcccggttaggctttccgagccgacgcgtaagttcgcatacgattctttggcgcatgtctacggtcttgacacaaagaagaccccagcggtcacgctcgatgacataccgggcttcgcggagctccccgcgataaagcgctatgacaccgctatccgccgcattgccgaggaggcgccgatacgcatctgcgacggcgagctcgtctcgggcgcggcgacgctcggaaaggcgatctcacactgtgtccccgccgactttgacgggaaagccgttttcgcgagcataagccacttgaccgtcgactttcccgacgttctgcggcgcggtgtgtcggcgctttattccgatatagaaaaatccatgtcggggcggaccgacccgcgcgagatttcctttctcgaaagcggtctgtcatgccttgactcgttcaggatctggcacaaaagatacctcgatgaactcggaaagtgcgggatgaccgcgaatctgaaacttcttgagcgcgtgcctttcgagcccgcgcacagcttccgtgaagccgttcagagtctgtggttcacctttgcgttcatccgcctctgcggaaactggacggcgatcggaagaattgatcagatgctcggcggatacctgaaacgcgaccttgaggcgggcgctgagacgctcgattcggcgcgtgagttcctcgcacacttctttataaagggctgcgagtggatctgcggcggaaactacggcagcggcgacgcgcagcactaccagaacatcgtcctcgcgggcattgactctgacggaaacgaggtcacaaacgaggtaacttatttagtgctcgacatcatcgaggagctcgggataagcgatttcccgataaccatacgcctgagccggaattctcccgagttgctgcttacccgcgcggctgaggtcatgcggcacggcggcggagtcatcgcgctctacaacgaggagctcataatcgactcgctgacgaacttcggctacccgctcaccgaggcgcggagcttcgcgaacgacggctgctgggaggttcagattcccggaaagacctatttcatctacaatccgttcgactcgctcgccgtcttgcagaagaagacgctgaactcatatgagaatgtcgatttcggcagcttcgatgagctctacgcggcttatatttccgatctcgacgacactgtcggacagattttcggatggatcgccgaccggtttgacggcgatgtctggaagcccttgacgccctgcacggtcgtttcgctctttgagcgcggatgtatcgaaaacgcgcgctcctaccttgagggcggtccggtctacaacatgatctcgccgcacatcggcgggttccccgacacggtcaacagtctttacgccatcaaaaagctggtcttcgacgaaaagctcgtaggcttcagggagttcatgtcaatactgaaaaacgactggaaggacgccgaagctctgcgtctgcgcgctctgaaccgcctgacttactatggtaacgactccgacgaggtcgacttcatcgcggtgagactgctcggcgatttcgcgtcgatgtgcgagaagcgtgacaaaaagtgcgcttatcgtttcccgggcggtgtcagcacattcggaaggcagctcgaatgggcgcagcggaggctcgcgactccgtacggtcgccgcgccggagagattttagcgccgaacatgtcgccgactcccggaaccgaccgcgagggtgctacggcgatcatccgctcctactgcaagcccgacctgaagcgcattccgaccggcgcggcgctcgatctcaagctcctgccgacaagcgtcgagggtgaggacggactcgacgcgctcaaagggctgatgcgcggattcgtcgagctgggcgggttcttcatgcagcctgatgtcgccgacgccgcgattctgcgcgaggcgcaggaacatcccgggaactatcagacgctctcggtcagggtctcgggctggaacgcgcgcttcgtgacgcttgcccgtgagtggcaggacatggtgatcggagaggtggagagttaaatgcttgtaacttctgttcagcgcttctgcatgcacgacggaccgggaatacggacggtcatcttcacgaagggctacactctccgctgccgctggtgtcacaaccccgagactcagtcgaagcgccgcgagatattgttttacgagacaaaatatgtcggctgcggcgggtgcgcggaagtctgcgaaaagcagactcagagatttgaaatccgccactcaatcgaccgcggactctgcacagcctgcggaaaatgcgccgaggtctgcccgaccggcgcgcttgagccagcggggcgcttctacagcctcgacgaactgctcgggatagtcaggcgcgacagggatttttacggagcggacggcggcgtgacgctctcaggcggcgaaccgatgcttcaggacgaagccgcggagttcctcgcgagttgttcgagcaccgggataaacaccgcggtagagacctgcggacagttcgctccggcggcagtcgacaaactcgccggagtctgcgacctgcttttattcgacatcaaggacaccgactccgaaaggctgcgccttaacaccggcggaaaccttgacctcatcctcggaaacctcagaaaagccgataatctcggcattaagtcggtaatgcgctgcatcatcatcggcggcgtcaacgacaatgatgagcactaccacaggctcgccgggatcttcagcggacttaagaactgccgttacatcgagcttctgccttatcacgaatacggctgttcgaagtcgctggcactcgggagggagtacgagaccttcgaagtgccggacagcggcacgctcgaagccgccgcgcacctcatccggcagatcgctccggtgaagctgcgctcgaaaatctatccacgaaaggaatgacgataaatgaaaaaactgaccgcgatactctgcctgtgccttatcctgacctcctgcgggagcactgaacagccccccttggagacgaccgaaagtaccaccgcgaccgaggctgtgacgaccaggacgcgttacacgcccgagcttcccgccggaatc

SEQ ID NO: 3202 - DNA, 32759 bp, Unknown
  16S sequences of unknown bacteria
ccgccctgctgaatttgtcgttcagcagggcggttttgcttgtccttttgggattattctcttgagagtaccgggcggacacaaatagtatcaatccagtatcaagagccttatggacgggcaaaaaagcctgtattcatgtgggtttgcgccgtttcgagcgtcattcccactcgccgagttaaattcgtttctaaacttttttgtatagaggatttgattcggtgttatttgttttgatacagattatccttatcctatggtctatccgaaattctgctatcaaaaatctatcagccttgtgctatcagtggttattcttgatagggctgtgcagataacttagatgtattatagcctacttccactgtatttgccagacagcgattggcgcttcctcccaagccgctaaaaagcaaatttttcttctcgtgcaaagccaacaaagtcaatgcattcaatttgatatgcatcacacacatccggtattttgggcgatttgacatttcttgtccgggattcttctgtaaccaccttgcaatgttcctgttttgccaacgcaattacgaatgggtcggccgagttctttttgcttccgccttctactaatccacgatgggacaccaaaattgctcgaacttcttgctgcacaggaacactggatggaagaaagcattctttccgagctttcgcccatttttccaagtcgtccccgccaatcataatctcgtcataaacctcttggctggatatgattgtaccattctccatcaaatctccaattttgctccacagagatggataaatatcaataggttggcgccgttgtaagttaataaagatattgctatcgaacacatatttagccatcaatagcaccacctttcgatagctccgaagtgcttaacacgcagacccaaaagatagttacttgcttctctcggactaagtttttctgcgtgataggctgttataacagttttagtatatagcttgccaacctgcgttcccttatccaatgcaggaggcagaaaaccgtctttctttttccggtttttgtaagccatatactcttcggaatacctgttaaaggtatcaaaatatgttgttcgatcgataacaccaatatcccacaaccggtgaagaatcacttctttgcttactgcaaaatctcttgcaatagcatttacataggcatcgtcaaggccatactgttgaattaaagatatatttctatttttctttaattgaggagtcgggactaatgtcaatcctgcaatcttattgcaaaacaattctattttgctaatctgaaccttgtcttgactcatatcattgcagataccggaggttctggataaaatgtgcaccaattcgtgtatcagtgtaaacagccttgcgcttggctcgtctttccgatttagtgcgataattgggaacatatcataagctatcgacaagccgcgcatttcctctgtctgaatttttgccgcttgaaaaacaagaaagtcctgttcctccaatctggaaatgcagaacgatagtgcagcttccggcttccgaaattttatttgtatttggtcagtcaaggacaaaaagtttcggatttgagttgcaaacacggcctccgcagtgtcgaccgagatgttcaatgtaaatggaactggttccatttctgcttctttatatagctcaatcatggtatctctgcgatcttcgatgtctcttagaaaccatcgcaattcgcgagacatttcgcccacgccccagttgccaaaagttctgtaatcaaccttttccaagcgtttggttttttgcggagtatcgggcaaataaaaataagcaaatggcacacgatattgcttagcaagattttttgcttgtatcaaagagggatattcactgccgttttcccatgcttccactttggcgacttcaactttcaatttcagtgcaatctcttccaaagtgattctatccaggctacgagcccattgaagcacttcgggagtcacgattgcaggaatactctttgccattgctgtcgcctcctccctttatcaatatgtttcacaattcacctattctactgtaagttctcccgttatgaactctgtaggatatgataatctcataataacctgttggaacacaatgacatatgcataaactgtaccctcaccaaaccgatcatgcagcagatttttaccatcagggcagaaacttacctcatcgggtaacgatctcagatatggcaattcaatcgttttggcccgacactcggggaaattggcctcaagtgcaacaacttgtccctccccaaatgctacatggcgcacaatggcccctgccggaacaaggggggcttcggagcctctgtgagcaacagttccgttggtgatttcaagcgatttatctgcaacagtggagtcaatatattgcttccaagctggagcttccagaatatccctgcgagattcgcacttaacgatcaaatctctgagcttttcgggagccgctttgtttgcctcaaacattgcaacaaagtatttctgaaactgcgccaaggttagagggacaatatcaagccgttgcttcacatcatctttggtataccaaatgccatgcctgaatgtttctgctgtgttcgtatcgatgcggatagcaataaacataccatacacaggtttatcatacttcaacacggcatcggagacatgacgccttaccggctcaccctccattgcttcctgacgagaagaggtggacattgtgacttcggtcaaaatagtgaaatcttcaaattcgcaatacagatcacccttaccgccaccagcagccgaaacaggcaaaaagtcggaatccaatttgaatccacgaacttcataaggctcgttgatcatgtgatcgattgctaacgcagcgcgccaaagaatccactccaaatatgccggcatttcatctttaggtacttcgatcgcattgtcttcatcatagacaagcttaccgccgccttttatgataagcgacatataatctcgaatttcttgccattggttgcactgatctttcgcatattggatttcatcagtctgtgcaagtatattttcgagcctacgccttgcaatattgatttctgctgcggtgtccagtggtagatcggttatatcaaacagaatgtggcgctctttcatctgcttcatcagatcatccagcaatgttttcgccacatcgacattgtcggtaggcagcggagctccgccgcaaagcaatctatattgttctataatcggccctttgcttgctgttacttttgcaagcttttcagccaaaatgtgctttgtgggaacaatcataagacctctgcccttgcgctgcaatacgccggaaatgcggaggtatctcatgttcatatcgctataatccaaaaaattgtcggattttttgtcatagttttcgcctcgcttggcgatttcttttttatcgaacgcacgctttgccggggcggctgctctccgctgccgcaaatcaagaatgttgtcaacaacgctttccagatcataactcgggttagtggtgtgaccccacaaggcaaactcaattctgcttaattcagaggaacctgtgcgcttttcaagctccagcataattgccaaaagccatctcagcggagaaaagtagtgttcaccgtccggaaggggaaactgttccacgctcatagcgcgaagaaagcattcttgaacagcagcataagtgtcagcgtttagaaaggctctcccgaagggagtaatatcgtccagctttccgagatcttcttgctgcccatctttctttttgacttgcgggtaaataaaaccgttcttagcgaacatcagtcgccatttacgggcatggcttcctgatacatccttgccatcttcgttctgaataatccctttttcgtccagaagacgcataaagccaagctcgttttctctgccgtgaagtttgcccacgaaggaggaactcgcaaatacagaaaagccttcttgtatgcggtttggattgcgcaggccggtgttgccaaccagccaaatatcaatatgttcgctcacgaggccacctccatcttagaagccgacaaacaaatattcttgtacggaatttctatgcgtttttgcgtcgccttgattaccgaaggaatatctataatctaccggtataacttccacatgttctttatactttgccatcagcgccaccatttcatcttgtgtgggcaagctattggaggaatacgaaacgatcagcacactgtttgcaaattttttgaatagccgatcaaaggcatctgctgccccttttctggtagaaaaaggggtcggataggatttgaacttcttggtctgtgtgtgctgctgaatttcaacacctttccaatcacgggcaagcccctccacaaagtggtatctgcggacatattcattatcagacaacggcgaataataaggcggatcgatatataccaaatctgcctgttcgacacgcaaatccatcgcgtccccatttctggatttattgggccttccgttatcaaacacagccttgtttacagcctcaactgcttcaagaaactgctgttcaaggcttttttgcaaatcttttcgtccatcattgtagcgctgtccggtataggtaaaaataccgcgtggacgctttttagtgcaggcccgaatcagtgcagtcatagcgattgcgtatttgtatgggtcgcggatttcagctatatttgtgcgcaaagtatcaatcaagtcgttttcttcgtcggtatagtacaaacccttgaaagtatttgccacgaaatggtctgattctttgctggctttcaataattgttttgcttcctctatcggtaatgttacagtgttgttctctatcatcgccttggtaaaagtcgcggacatcgccatatagtcgttgctgattacggttttaccctgcgccttaaacatgtatccgacgatgccagagccagaaaaaagatcgacaatggtttccgcctgaaattgagatgctacagcccaaatttcagaaagcaacttgctctttgaccccataaatcgggtggggggatatgctgatacctgcgcaggcaaaggttttggtgcgagtttgattagtgtatgctgcttgggagggatggtgacaataacatcctcccccttacgcgtacttccattacaagaaatatgcctctttgtctggataacatcaatcttaaagggcgcgtacagctcatgcaccaagggatggttggagttggtcagcaagacatggcatcccttttcatgcaagctcatgacgaccttggccaattcaatatgatcttcttcataaaattgctcttttgtatatctcttaaagtcagaatactcggagatcggaaggtatggcgggtctaaaaaaacgaaatcgcctggctgcgcgtaatattccaatacaagaagatagtcgccgcagataatatcagctttttttagcgtctcagatgcagcccaaagggcctcagcatcacaaattttgggatttttgtacttcccatatgggacattaaactgtcctttcttgtttacgcgataaagaccattgtagcaggttttattcaaataaattgttcttgcagcagcttcggccttgggaagtgtttcccaatctaaaccgcgcacagaataaaacatctcgcttgtgttttcgtactttttaagataagaaatcacatcgtcaacatgttcagctacctgccgatacatattgatgagttccggattactgtccgcaataatagctttttccggttgtaacgcaaaaaagagcgcacccccaccaaaaaacggctcaatatatcgcccataggaggacggaaccttgggcagcaattcacttagcatctgcgtcttcccaccggcccattttaagatcggttttgcaataacagtggaaagttcttttgctgtgctgctttgcatagtcgccgcctcctttcatttcttagtatctggaacaagctccataatatcgcctatgtcgcactgtaacgcggtacatatctttacaagaacatctgttgtcacattctcgtttttcccgagttttgccatcgaagcatgactgatacccgctgctgcgcaaaggtccttcttcttcatatctcgatcaatcagtatcttccataactttttataacttacggccatacaattcactccacaaaggattatatcacaaagtcaagaattgaaatcagcgttcgctgaatccgaattcagtatagcatatttcaaaggtgatcgcaagcagagaggaaacattttctgcatttcaagcaagacgccgcccgcagggaaccgctctccccacgggcggcgtgccgtcacttcttgccttgctgcaaattctggatattcttctttgccagctcgctggccgccttccggcgctctgcgctgtatggggcattcagcttgaaactgaaccgccctttcctgatttcaaatgtaaggcaaccgttttcatcgtcatccaccaatcggcactcagacggatactttcccgaatactcgctcaaacggttcttgagcgatgtgttgtaggtagacacttcaatgatgggacttgcctcgtcaaaaaagacgctggttgtcttttgcttcttggaaagacctgttctcataaaacctccgtattttcataaattttctctggctctatactggcaaaagtaagcggattttcggataggaagcacccaaacgatacatgattcggctcagatgcctctatccgcaaaaatccttttttctcagctctacacgggattaccgcgcatcccggtcatgccgccgcttttgactgcgtttctgctctttctccgcctgttcctgctgcttgacagccgccaccgtttcggctacccgctccggcccataggcccggcacagccggtgatagtctctggcagtttcctgcaattctgcatttttacccttgacctcgtccaactgctttttcaaatacgggacctccgtatcatatttgcgctgcaacaactcgaacttctgacagacatccagataagcccggtaaacggagcgcaccaccttgacgatcttttccaacagcggcttggactttttctcccggtaagatttggcggattccattctgtcggggagcggcagcaggtcctctggatcggaagaatactcggccgccaatttctccatgtgttttagtttaggcgctaatagacggagttccgtctgcacttctttggccgccttctcggcttcggccttatctgtccgaagctggccgatctccgcctgaacctccgatttttctgtttgcaaatccgccagccgtgcctgttctctttccaccttaaactgcgtcaccgtcagatgctcctcagagctgccgcgttcaccgcgttccacatcggtgtacccggcctcacgcatatgctggaagaattcgtcctgcaacacactatacgattttttgaggacaggcttgccctttgccgttttcaatggttcgccagtggcctcatccagcaccggcttggaggcccacttcttgctcatgctgacctgcatgaccgtttcttttaccttgccaatcaacgacttgtccttgcaccgtttggaccagcggatctgcttctccaccaccggtacatagactacatggaggtggtagtggtacacatcctgccccaacgcctcggacatagcccggttgcgctcgtcggcgtgcatgaccgccgacagaatgtactgttcgccgcccacgattttgattgcagcttggtaggcgttgtggtaaaattgttttgcgaagtcatatccgccatggttgaaaaagtaggcggagttcacatcgaagatcagctccccatagcggaaagcgtcctctttgatgccccgtgtggagataattccgtctgcctccatctgttcaaactgttccagatagccgctgtccggttgcttgaagtgaacattcagatgggagcgttccgggactatatcctggttgacatacgattctttttcacgctcgttgtgttgctgcgcgtttttcagtttgggtgtagtcagtctcatgtttcttgcgctggtacgatggataccgtcgcctcttgccatagaactcctttctcgccccacaagggcggttgagatgcgggtagcttttggggatgcacttctgcggaagtgtaataacccactatgatactttcatcctgcggctgcaaagtatcgtgggctctccgaaggggagtgcggctcctgcgggagcctcgccgcctttttcggcttgcaggtgatacccacagcctcaaaatgcggtgtgaccggcggacttttcgctaccgtgtttgctccaattccaccgtccacaggccgggaaaatccaccggattctcccggccttagccatctccaaatctgcggatttttcgatggggacgggggatgcgggaagcgtgtgctgccagtcaatttgccttgtccgccagccacaggagcgtgtcacgctcctgtccatgccaacagaggggaaatttactttggtgctaatttcatttgcgagattagtacgaaagtaaattcctgttaccagcgaaaatccgggaatacgccgcgccggtccaggtacgcttgccgggcctgttcccgttcttccgcgctggaatcagttttatatttggcgtacagctcgtgccgcaccaaggcgtccagtttctgctccaatccctgccggatttcatcctcgtattcgtcatcatagccgaggtgatactccaccagcgccacgaacaggtcatagggaatctgcacattcttcattcgcttccgttcctctccgcgacggctgcgacgatagcgacggttgtttgggtggtagcattttcaccgttgcaaccgtcgctaccgtcgcgcccatcctcaaccacttcaaaagccggagcctccaccagcatataggtgagtttcacctgccgcccggcgtggcgcgccctgttctcgtagcccacatgatattcctccagcagcctgccggatttgacattcagatacttggtcagcgcgtttgcagccatattaacctgcgctgctgcggccagctccgagggagagcccgtccactccggttgaccggcattgaccatccgggccaccgcttccaacacagggtccgccggttccttgtgcggctccgtttccatgcgctccaaattccaaatctgggtttccgggtcctttttcaagtagagaatctggtcctgctggtcgcggcccaccacatcaatggtggcttccaacgcggtccgctttttcttctgcatcagcaacgagccatcggcgcagcccagcaggcccgtggtgccggagatcatctcgaaagcgtccccggcaggttgcttccgggtatgatgaacggtcaatacgcagatacaatgtttgtccgcaaactgcttgagcttgccgatgatttcatagtcgctggcatagctgtatgcctcgcctcccacctcccggattttctgcatggtgtcaatgatgatgagcttggtatctgaatgttcccgcatgaagttttccaactgctcgtccagaccgttcccgatttttccggcagcggtggcgaagtgaagattcggggtatcgttcacgctatacatcataaacatccggttctgaatgcgctggaagtcatcctccaacgcaaggtagagaactgttccctggtggaccttgcagccccacagcgcctgcccggtgctgacatggtaggcgatctgcgccaccaggaacgactttccaatcttgggcgcacccgcgaggagatacgcccccgaatggagcaaattttcaatgatgggcgggcggcttttgtaggaggtctgaaacagctcggtcatggtgagcgtgtgcaggtatcgcgggtcggccatacgctgcatcttgcggtacatttcctccagactttccgtagaattttccgtttccccgttgcgttttgcctctgaaacgggtatactgttgtcagaatctttttgaatggactgcctctcatctgcgccaacagatgtgcttcgggcagtcttttcttttgcgtcaattcccatagacagtgtcctcctgcatcccgttcataatggttgcgatcatttggatggtgtccagcagctcatcgttcacgccctgtccggcctcaatgcgccgcaactcgtccagcacagcggccaattcgtcccggagggccttatagactctgggattgccctgcaccacgacctccttttccagcagccgccgggtgatgtaatcctgtttcgtcaggccggacagcttgacgaagatttccagctgctcgtcctcctgcggagacactcggaaagccaccgttttgttccgccagcggttgtggcggtcaagatttttcatagacattgtttcaagctcctttctcagttttcagtgagtccaacttgtcagccatttccacctgacgggtggggaatagatgagcatagcggtaggtgatgtcgatactctcatgccctacccgttctgcgattgccaaagcggtaaatcccatgtcaatcagcaggctaatatggctgtgtctcaaatcatgtatgcgaatgcgttttaccccagtttctttacagccccgatccatctcacggtggagatagtttttactgacagggaaaatacggctgtccggttccacaccatagagctgcttgagatagtcctgtatctcatcgcacagaaattgtggcatctggataacacggttactcttgggcgtcttaggtgtcgtgatgacatcctgtttgttaagtcgctgataagatttgttgatggtaacggtatgcttctcaaagtcaaagtccgcgggcgtcagtgccaacagctcgccttcccggattccgcaccagtaaagcatctcaaatgcatagaacgagaggggtttgtccatcatcgcctcagaaaatttggtgtactcttcccgcgtccagaacagcatttcccgccgttcttctgttcccatatttcccgccctttgtgccggattgacttgcaggccgtaatatcggattgcatgattgaaaattgcacttaactggttgtgaaccgttttcagataggtcttggacaggggctttccgtgacaatctgtaagattgcgaatttcattctgccagtcaatgatgtccttggccgtaatctccgacagcttccgcttggcaaagtagggcagaatcttcttcttgatgatgctttctttggtgagccaggtattgagcttcagtttgggtttgatgtccttctcatatagagaaacaaagctctcaaaggtcatatttacatcggcctgtttctccatcaggaattcccgttcccaggccaacgcctcttttttggttgcaaaaccgcgtttaagcttctgctggcgctcacccctccagtccgtgtaacggaactgaacataccatgttccgttgtctttatttttgaatgcggccatattcagccctccttccttttcgtctcagtcctcgtaccgtagaatttttcatgaaagaatttccggtcaatccggccagcaatcgtgatacagccagtctgtgccagttcctcattcattcgcttaatgagtttataagcgtagggtttagatactcccagctcctcagccacttcatccacacgcataaaaatctgtcctgccatacgcaaaaataccttcctttccttgtcgtaattgtttctcgtttgccgtttcacccttcagactctgacaggcaacccttcccggcgctgtgtcgtttgtttttctccttggcacgctcatatcatcgcctgcttccctggagaaagtatctgtcggacggtcattcagttttgcttcgtctgaaattccccctctcaccttacaacggacatttttttgccgtttggcgggtatttaatttgtaaaatttttatgacttaaacttatttgcttatttcatcttcattatactaagcataacggttaaagtcaagtggcttacagaaaaatattaaataaatttatttagatttctcttgactatcctaagcatttctgctatgctaaaattatcaagaatccagattggagttggccgttatggcgattggagaacgcattcactttttccgcactctgcggggcatgacacagaaatatcttggtatggcgctgggcttcccggagaagtccgccgatgtgcgccttgctcaatacgagaacgggtcgcggacgcccaaagcagacctgactgctgcgctggcacagatattggatgtttctcctcatgccctggctgtgccagacatcgactcctatgtgggtcttatgcacacgctgttcacgcttgaggatcgctacggactgaaaatctgcgagtgtgatggagaagtacatcttcgggtggatgtgttccagggaaaagaagcggcccggttccatgagatgctctgcgcctggggagaacaggcggccaagctgaagtcgggagagatcagcaaagaggactacgaccgctggcgttaccgctacccggagtttgataccacaggccattggcataaggttatcccttctcagggcctcagcgatatgctggtagaggaactgaacaaggacaagaaaggaaaataaaaaaaggtctaaccgacttgcaaaaatcggttagaccttttctcttggataagtttttaatctgcacctgcaaaccgcccgttacctgccaaaaaatcagcaagtatggattcgacgagtgctatcaatctgctatcaaatggggaatttgaaaatcaaaagcccagtgtttatgcacctttgcgggccctcatatccactttttgcttattcccactcgatggtgccggtgggcttgggagtcaggtcatagcagacccggttgacgcccttgacttcgtttacgatccggttggtgatgtgctgcaaaagggcaaaaggcacatcctccacagtggcggtcatggcgtccttggtgttgacggcccggatgatcaccggccattcatcggcacgcttgttgtcccgcacacccacgctcttgaaatcggggatcagagtgaaatactgccagaccttgccctccaggccgtttttggcaaactcttcccgcagaatggcgtccgattcccgcaccgcttccagacggtcccgggtgatagcgcccaggcatctcacgcccagaccagggccggggaacggctgacggtagaccatgccggccggcaggcccagagcatcgcccacaacccgcacttcgtccttatacaaaaggcgcagaggctccaccagctcaaattgcagatcctccggcagaccgcctacattgtggtgggccttcaccgggccgctttccagaatatcgggatagatggtgccctgggccaggaaccggatgccttcctgcttgcgggcttcttcctcaaacacacggatgaactcggcgccgatgatcttccgcttctgctccggctcggccactccctggagcttatccaggaaacgatccaccgcatccacatagatcaggttggccttcatctggttgcggaacacttccaccacctgctccggctctcctttgcgcagaaggccatggttcacatgcacgcacaccagctgctggccgatggcccggatgagcaacgccgctaccaccgaggaatccacaccgccggacagggccagaagcaccttcttgtcccctacctggttctggatctccttcacctgctcctggataaactgttccgccagggccgctgtggtaatgcgttccatattctccgggcgtttgttgttgtccatcgttcttcctccttatatattcccgttttcgccacgattccttagaattcagctaatataccacaggggactttgtttgtcaatccgcaaaaggctcagttttcgctgggcagcttgatggaaacggtgctttcctccatgacatactccgaatcggcggccacacgggaaaggccggagacatggacaatgtagccggtctcttccttcacctgggcgcaggcggtttccagcacatcgcggtagttgttttcggtcttaaaatgggtggccagtttcagctgggtctccccccgctggatggcatcccggatctgctgggtgtaataggccagggcttcctcctgtgtcatattgctctggacgggatactcgatacgggccgtggtgacccgggtgttggcattgattttgggtgcatacagcacatagtccactttggagacaaagctgcccacggtgtagccctccaccgccacctgacggacggccttggaggcatagtagcttttttccttgtcgggataattccccggctgcagctcaatgtgctgacggccattgcggatggcttcctcgatctgatcgatgtagcgctgggtctcattccggccccacttgtagttggtgatggcaacaatgccccctgttttggcggtgacattgtaatccgaagtggtgctggatgctgcataagtatagccgctgaagatatagcccggggtcttcatgttcttgcaggccagctggatggccccatcggtgtaaccggtgagggtgatctgataggtttcgcaggtgccgcttgcaatggcctgctccaggagcttctgaacctccggggcgttggcagcatcctgggcctcctgctgatccttctcctcttccttgatatcctggcggcgcttcttttcggtcgcaatatccgagcggtaaaattcaaggtgcttttcatcggagcggaaggagccataggcaaactggggatgctgggccacgatggtgttgatcacttcacggctgtatttgctcagggtattggaatcccagccggagtccgacaggtcgatgatgaaatacagctcctcatccagctgctggtcggaaagggcctggatctccgcctgggtccaggtgggcaccttctccagggcgggagcgcaaagggccaggatggcattcacctgcttctgacgctcatcggccgtggcctggtccacagaatccagcaggtcttcatcgtatttggtgctggtgcaggagtgaagaacttcccagttccggtgactccggttgaccatcaccttgtcgcttttgaggaaatattcatagcggatgtagtcgccgccacgggtggtgggatcgtcccaggtggcatccacatggtaccactccccatccacctgtaccaggttccaggcgtgatagcccccggcaaagccggtgatggtctcgcagggaatgccggcggcatccagcagaatctcgtaggccttggcataaccggagcacacggcagttcccttgagcaaggccccttcggcctggtgggaaatgaagggcatattgccaatgtccacccggatatcgtaatcgcaatgggtaatcaggtaatcgtgaagggttttgaccacatcgtaatcgctcatattgctggtgatcaggttgcccaccacccgctgggcctcggcctgggcggcggcagacacatagcgccagtcgctctccgccacggtggcagaggacgcagtgctgctggtataggtcaccgacaggtgcttggcaaggtttccatcctgctcaaaggcatggatgcttttgatgccataggggttcttgccgtccagatcggcaatcttccgggccagctgttcggcctgggaagcctccaggttgaacggactgatgtcaatggcagctttccggtccaggaaaccggtggtgatggtcagagtggctccggtttcatcgctgagaacgggctgctcctctgtttccccattgtctcccagctgctggaacaggcaatagaccacatcccggcggggacagcctgccttggctgagaagctcagaccatcggtcaggccggtttcttttgcccagctgagagcggaagccgaccagttgcttcccagggcatcttccccggcaaagcgacacagaaaggccaggatctcatcgtaggccagggtgccgtaggggtcgaaccggccgccgcccacgccgttggtgatccccttctccagggcccacaggacgggcttatagtaataggcgtttttgtcggtcacatcgctgaaggtggagactccagcgggagccggagacccggcggcccgccacaggaaggtgacggcctctgcacgggtgacggtgctctccggtgaaaaagcgccgtttccggtgcccagggtgatcccctcttccgatgcccagataacggcgtcggcatagtaggcgccctccggcacatcgtggaagccggtattggcggccgccaccggcaggatgcccgctgtcagcaccagggccaacagcagggcaaaaacctgtttgattttcttcatcgcaaatacctccttttatttctcccagggaaccggttgaatccagctccctatgcaaaacaggatcatatgaaaaaagcgaagatcaggatgcgtggtcgctgatgcggacgaactcatagtgggccgggtcgtctactgccagatcccatggaatctggatcgtccggttcagatccggcggatcgacgatattcactcccaggagcaccccgtcatagtcctggggcacccggacagtgtaggtcacatcctgccaggcgtcgatggtgatctcccggttcaggccaggccggctgctttcctgccagtcgccgtagtccatgccgctctgccacaccttctcataggagatggagaaggtctttccctcgtgctccacctgggcctcccctttggcctggacctgtccgccgccatccgaccgctgatcgggaaaataaagctgaccggtataccagtcgtaaaggctgtattcctgggtgacgatggtgaaggccagggaggcattacctgcattgcccatgaggacctgggcggtgttgctgtaacggatggtataggttacatacccttccccatcgggctcgctcaccgcgatggagggctggctcagcccgccggtggaggaaacggtttccagggctgtatcaccggtctgggtggtcaacgggatatcctcataggcccgggggtctaccagggtgaagccatggagggcgccgaaagaggtgtcctcctgttcctcctgttccgcctgggagttctctggcggagtgggcgcctcctccttctggccgaaacgggagaacagttccagggctgcgccgccgatgaccacggccccagccaatacggcggccaccatcttcacagagatgcccgcagccgccccggttccggcggaaacaccggcggccgtttctgctgcggcggccgctgtgcccgaagcggcgtttccggcctgggagagcacctggctggccatggcggcagaagcggcgctgtccaaagcggtgctttccccctcccgccgcaggaaatacagcagaagcagcacagggctgaggccatagagcttgacgccacggcgttcgtgctcctccaccccggccttgatggattttctggcatagttcagccggcttttcaccgtgccttcgctggtgcccatggcctgggcgatttcttttacgctcatttcatcgtaataatagaacagcacgcacatccgctgttccggcggcaggttgtccaccagctccagaatcatccggctggtttcttcgttgtccagggcctgctccggcaccagcgtttcgtccaggctcggggccttgtccaatagcgagacgccttcctcatcctccgggatctgccactccttgtggggagcggaaagcagatggcggcagcggttggccgtgatgccgttgacccagccccagaaagcggcgggctcccgcagtttggaaaggctgctcagcatgacgatcagcacatcctgggtggcatcctgggcgtcctcttcttttttcagcatctttttgcagtgataatacactttattctgcaccgcctgcaccagggcttcctgggcctcttcctccccctggatgcttcggcggatcaattcctccagcttttcctcatcaattttcataggttccctctcttattgcaaaaatggcctgggcccagcacattcccttctataaatagtgtacaggatatggaatcaaaaagaaaccatccggcggggttttttgaaaaagtttggaaagcgcccgggccatagaacagaaaccggcccacctgtaaaaaggtgggccggccttcgggcaaatcaaaccaggtggatatcagatcaggcggcggcccccagctgcttccacaggcagtagaccacatcggagcgggggcagctggccttgggagtaaagttcaggccttcggtcaggccgctggcctgggcccagttcactgcggcagcagaccaatcggaaccggaggccgtttctccggcggcccggcagaggaaggtgaagatctggtcataggacagggcgctggacagaccgaaaacgccgccgcccatgccatcggtgatgcccttttcggcggcccacagaacggcattgtaatagtaggcgtttttatctgtcacatcggagaagggagaaacagaggacgcaggcgccggagaaccggcggcacgccacaggaaagtgactgcttcggcccgggtgacggtgctggcgggagagaaagtgtttgccccggtgccggtggtgatcttctgatccacggcccattgcactgcctgggcgaaataatcgccggtgtccacatcggtgaagccggccaccggctgggcaaagtggatggtggcctggtccaggccatcgttcagaccgcccatctcgatctggctccactggagggcggtgccgccatagtacacatcggtcaggctgtcacagccgtaaaaagtaccgctgacaatttgggtgacgctgtcggggatggtcactgttttcaggttggtacagaagcggaaggcgtcgttcatcaaagtcacgccgtcgggaatgacgcagctttccagattgatgcagccttcaaacagccgcatgggcagagtggtgatgccggagggcagacgcacgctggtgaggctggtgcagttgctgagggcccactcccccagataggtgacgctgtccgggatatacaggctttgcagctttttgcaattggacagagaggagttggaaagggtggtgacgctattgggcagggtcaggctggtaatgccggagccggcgaaagcgtcacggccgatggtggtgatcccctccggcagagtaatgctggtgagagaggagcaagcggcaaaggtatcccgggggatggaggtcaggctgcggctgaaggtgacgctcttcaatccgctgcaaccatcgaatactccttgatccagggtggtgacactgtcgggcagcaccacctgctccagggagctgcaagcgccgaaagcctgccgcccgatggtggtgaccgtatcgggaatggtaatgctctccagctgcttatgctgattgaagacataatccccgatggcggtaacgggcacaccgtagatctcagcggggatatcggcttgggtaatggtttcgtcggcccgggtgatggtaccggtggctgcgtcaaaatagagcttgccgcctgtgacttcgtaggtcagttcggccgcctgggttggcaggaacaaagtcagagccagtccaagagctaagacaaagggcaggagtttgcgtactttcatgggatctcttcctttctgtttttttggtcctattggatagtgccggttgggcgccggttggttttataaaaaagaaaaaatttttagaaatttataaataccggaaaccagcatcaccggctgggcaaaagagcagttccctctcccctgtttgccccctccctgccggaagaacatggcccattttcagtggggcccgtggctgttctctggcatgacggcccggtcatcaccaggccgtctggaaatagtaacctggaaatagtatagcacagacggatttctattgcaccaggtacttgcataaaaaaacaccggaggccctgatgtatcaaggcttccggtgttttgtttttcttactcccattccaccgttgcggggggtttgctggtgatgtcataaacgatgcggttgatatggggcacttcgttgacgatgcggttggagaccttctccagcacatcgtaggggatgcgggcccagtcggcggtcataaagtccgaggtgaccactcctctcagggccagagtataatcataggtgcgctcgtcgcccatgacgcccaccgaccgcatatcggtcagaacggcaaaatactggttgatgtcccggtccagcttggcatttgcgatctcctcccggaagatggcatcggcctcccgcaaaatggccagcttgtccgctgtgatctcgccgataacccgcacggccagacccggtcccgggaagggctgacgccataccagctcttccggcaggcccagctccagacccaaagcacgcacttcgtctttgaacaaaagccgcagcggctcgatgatctccttgaagtccacatggtcgggcagaccgcctacattgtgatggctcttgatgacggcacttttgcccaggccgctttccaccacatcgggataaatggtgccctgggccaaaaagtccacggcgccgatcttgcggctctcttcctcaaagacccggatgaattcctcgccgatgatcttccgcttctgctccggatcggtgacgccctggagcttcgtgaggaaacgatcctgcacattggcccggatgatgttcatatcgaacttttcacccatgatcttttccaccatgtccccttcgtccttgcggagaagaccatggtccacaaacacgcaggtgagctggctgcccacggcctggctgatcagggcggcggccaccgaggaatccacgccgccggaaagggcaagaagcacccggccattgcccaccttctggcggatttcttcaatggcctgcttggaataggccgccatggtccattcgctggaaaggccgcagatcttatagaggaagttctccagaatcaaagtcccttcctcggtgtgcatcacttcgggatggaactggacgccatagagctttctctccgggttttcgatggcggcggtggggcaatccttggttttggcgctggtgacaaagccctcgggcagctgatccaccgaaatggtatggctcatccagcacaccgactgctggcgcacgccctcaaaaagcaggctgctggaattgtgccaaagctcggctttgccatattcccgcacagtgcctgccttgcaggtgcctcccagcatcagggtcatcagctgctggccgtagcaaatgcccagaacgggcacgcccatctcaaaaacggcgggatcgcatttgggcgctccctcttcatagacggtggaagggccgccggtgaagatgatgcccgaaggggcaaactgacggatctcctccatcgtggtgttatagggtttgatctcgcaatagactcccctttcccgcacgcggcgggcgatgagcagattatactgcccgccgaaatccaggatcaaaacgcggctgcgttcactcattgtgcatcctcctgttggcttaaatcgattacttttatcatctcacaaatgatcgataatttcaacctttttctggcttcctggcaacatttatcacccttttcaagggaatattccccctttccagggggacattatctccaaaggaaccgagggacgcttttgcccctcccttccatttttgcatgactggaggaaacaccttatggataaacgcacatggaaaatacggtgcgcggccttttgcagcagtctggcggcctgcgctcttctgcccgccgctttcgctcttttggaaaaggaagaccccgctccggcggtgaccaccttctccaaagtggaggacgccggaaaaaccgtcactttctcccaggaggacttcaccacccgcctgacaggggaagacaccctggagggcatcgtggtttcggctttgcccgacaccgccgcaggcaccctgcttctgggcggccagcccctttcccagggggaaagcgtctctctggatggcctgagcgccttgtcttttgaaccggcgggacaaagcgacacccaggccagcttctcttttctgccggtgtttgccggttatggcgccggggaagaaagcgtgcaggttaatatcaacctgagcgacacccccaacagcgcccccatcgccacttccctttcctttgagacctatgtggatctgcccctcaccggacagctggaggccagcgacgccgaaggagatgctctgtcctttgccatcatggaaaaaccccagaaaggcaccgcggaggtgaccgaaagcggcgcattccgctatacccccaaagagggcaaaagttacgaagaatccttcacttattatgtcaccgatgcccagggaaactcctccaacccggcccaggtgaaggtaaccgtgaaaaaacaggaggaaaaagagaccatccgctacgccgacctggaagatgacccggcccattacgccgccatcaagctcaccgaagccggagtgttttccggggagcagatcggaacggattacttcctggacccggaggaaacggtgacaagagctcagttcatcgccatggccatggcggccagtgacattcccctgccctccatggcggtgcccagcggtctggccgatgatgcccagaccccggattgggccaaagcggcctcggcggcggcgttggcctccggcgtggtggaaggcagccccgacggcagcggcagtaaggtgctgcgtcccaacgaacccatcacccgggccgaagcagcagccattctggaccgggccctggatgtgcccgccggggtgaatctgcccatggacctgaaagacgccgcccaggtgccccagtgggctgctcaggcggtgcaggatgccttgcaggccggtattttgcagaccaccgacgggaatgcgcgccccaatgacaacctgacccgctcggaagcgatgcagatggtctacaaggccatggatcttggtgatgaggaagaaaagagcttctgggacttcctgaaataacagcggagtgcctccgccgccatactctccccggctgtatgggttgcgggcttcgatgctccggctccgccggaaggggctattgtgcaatcctggcagcgtgcaaagaaaaaaagctctcctactcaggagggctttttcttttgggccggtccggcaatagaaccaagggtcgtccgccctaccccaaaataatacctggccttttctgtggcacctggaaccggtgggggccccgcctggggcgcgaaaaaggtcggggaaaaacctagtttttccccgagcgccagcggcggcgtgggctgacggcatgatggttatttcggctttacgccgaaataacacgccgcgggcggcccaggaggggcccgacggctttcgccgccgggaggaagcctggggcaacacccgccgcagcgggtgttctggcgcttctagtcttccagcggacggacgaacagggtcttataatcggtgtagatcaccatgcccggcttggccccggcgggctttttcacatgacgggccagggcgtaatcaatgggggccaggctttgcttggccagcttggaatgtcctgcggcgatccgggcggcgtactccagatcctcccccgtgggggtctggccctgggtgaagaggatcacatgggagccgggagccttctgggaatgaaaccacagatcatttttcccggcggtgcgcaaggtcaactgatcgttttcccggttgttccggccgcaaaggatgcgcaggcccgaaggcgaagtgtattctcttggctgaaaagcggcgggctttttctttttggggtgcttctccttggagcggagatagccgctttccaacagctcttcccggatggcgctgacctctttgatatcccgggcctgctgcaaggccagctggacgctttgcacatactccagctcctgctccccctggacgatctgctcctccagggcctgctgggcgtttttcatccgggtgtattccttgaatagggcctgggcgttctgctggggggtcttgtccccgtccagctccagctccacctggggcagatcgggggaaaaatagtcggtgacagtgactttctccgccccctgggggatcatatggatgttggccataatcaggtcggcccggcgtttcagatcctcccgcttctcggcccggagcaggtcattgcgctggttggccagcttgcgctgtaggcggctttcctggtttgccatcagcttttccagggccgaggacaccgatttccgccgctcttccgaggcccgctccccgtaaaacctttcgatcatctgggaaaagccctcctggggcaggttctgggtgtcctcgcccagatggctcatgggcatgaaggaaaagtccacatattcctccccacggcgcagcaaggtgggctggtagtccccttcctgcacccggcgggaaaggtccatgatctctgcggccagggcttcttccctgcccccgccccggtgccaaagctcccgggcgatgaggggggacaccagatccagctccccggtgagggctttggccccctcttcctgggaaagggcttttttcgccagggcccgggcttcctcctctgtcagggccagcaggctgcggcgcacaggccggggaggcatctggtagcgcagcccgggcaggatgggccgctggggagacatttcgctgtccacctttttcaggcagcccaagatggtgccgtctcccgaaagcagaatcaggttgttccgccggcctgtcagctccactaccagggatttttccgacagctccccgaaatcgtcataggcggaaaaccggaaccacaacatccgctcatgctccggctggctcacttccagaagccgggcggcggtgaggtgtttgcgcagcagcatgcagaacatggggggcgcatcggggttttcggtcttttccccggtgagatacacccggcccccggcgccggagcaggaaatcaccagtttccaggccccccgatggctgcgcagggacaaaatgacctcctcccgccgaggcatgaagatcttatccacccggctgtccgaaagctcctgctgcagctggcggcacaggccgtcgatggtgatggcgtccatggacatattcttctcatccttcccgaaaagatcaaatcaaaggctcaaaggctttggagcagccggaaaatgcgctgttccggcgtgtccgaaagcccggcctgctcctggccccgggcgctggcgccgtacttcgtcagcagcttttccttgtaaagaggccacagcgggtcctgcaaaagggccgttccgaataaatatgcatactcccgggcaccgctctcatcggcgcctttttgaatattcatggctgtataaactttgcgcccttcctttatgacccgctctttttttacattatagccgttctcctccagccactggcgcagcttggggatgttggtcatgggctgcaaaaccacctgtcccccgttgtccccggcccagggggcccgggaaagaatgagggtcatttcctccccgcccatgccggcgatgatcaccgtgtcgccgtccccggggccgaaggcatccaggccgtcggaaagcatcggggtgatcctgctttcaagccccagttccgctatggtgcgccgggcattttccagagggcccgggcggatgtccgaggcaaaggcgtgctccacgccgtattccgtcaccagcagagcgcatagctgggcatggtcgcaccccacatcgatcacccgccgggcgccctggcacaaatcggccaacgcctccattcgcttggaaaacaccatggccctttctcccctttctcaaaggcaaagcaaaagaaaacggcaggcctttgtcccgacctgccgcctttgtccgttttcttatttggactggaaatactcgttcagcttgctcaccagctcgtcctcgttggtgccgtgcaccacgcaggcctcggcgatggattcgccgctggaagaggggcagcccacacagtgcatgccgatttcgaagaagaaacgggcggcgcccatgtcctcagccagcacctcaccgatggtggtatctcttgttacgaccattgtttacacctcccatcccactgacatggaatctttccttattatacacgaattttctctcaatttcaaccccaggcagcgtgacgctgcacccgttcctgtctccggtggggatgcgcatggggccttcctgctccgggtgtgataaaccatcacccggaaggagctgctttgcaatcctggccgattgccgcagaaaagccatgtcggttgtgttttcctgggaaaagatagggaacgccagcggaatttttccgctggcgttgattgtttgatttaaacagaagcagccttcgtcctgttgcccagtgcggcagcggtcccgtggcgggacggccgttcctctctttgccttggagaaaacaaccagccttggttctgttgcccagcgcggcagcgcagtatgggtgcagcgtcacgctgcctaggcctgctgctcctccttcatcttggcgaagcattcgctgcaataaacgggtctgtcgctcttgggctcgaagggcactctggcctccttgccgcaagcggcgcaagtggcagtgaaatactctctggggccacgggcggcagcctttctggcgtcgcggcaggccttgcagcgctggggctcgttctggaagccacgctcggcatagaattcctgctcaccggcggtgaaaacgaattcattgccgcattctttgcaaacgagtgttttgtcctggaacatgatgcgttacctctcttttttctcccattcggatgggattggatgattttattgcgaacaggagtcaatcctgctgtcgcccttgttgcaggtatttggccagcttgcgccggatacggccgatggcgttttccaccgccttgggcgtgcgatggagcgcttcggcaatttccgaagaagtatagccttccagataggatcgcagcacagccgtttcaaaggcagacaacagcccggataacgctttctggatctcccatgccggctcttttgccagaaactgtgcttccgggtcctgggaggccgaaccgtgaggtaaaccctccccatccccttccgcctgctccacatactcgatgtgaagatggccgtccttccgcttgctgcggcggagggcatcatagacctggcggcggatgcacaaagcggcgaaggcttcaaagctctgggagcggccgggatcatattcccggatggccttgagtagaccgatcatcccctcctgcaccagatcgtcataatcgccgccggtgaggaaatacggccgcacacaggactgcaccagacgggcataccgccgggccatttcctcttccccattgggaggggctttgtgaaaaacagagtcttcctgtggcataaaaggggccctcgctgtgcaaaagtgtctaacacgatgccagtatactccatcttttcggcctttgtcaagaagaactatccaaatcttcccgggagggtttcccctatttcaatatttcctccgggtccaccgaatattcgttttttaccgtggaaaggatgacgatggttttggtcatcttcaccccgctgacgcttttgatctggttgagaacacgctccagggtctgggtggagttggtgaccactttgagcataaagtcaaagtccccggtgatatagtggcactccaggatctccttgttgtccttgacgaaattggtgaaacattcgatatacttggggtgctccaggctgatggaaatgaagctggtcacatctttcccggccttgacctgatcgatgatggtggtgtgctgccggatcatccccgagttttccagcttgcgaatgcgctcgatgacggcggacaccgacatgctcaccttctcgctgatcaccgaggcgttttctctggcgttgttcttcaggcagcgcagtattttgacatcgatctcatccatgaattgattcctcctcccggaaggccccgggccgtccggtcaatagtgttgtcgatagtgttacagaaatattatacggaattttgcctgtgatgcaagatttatttcccatttcctttattattttcggcagcgtgacgctgcacccatattgtgctgccgcacgaagcaacagaaccaggccaagcaaaaaaggctccccgagggggagcctttttgattcatatggtcaggtggggtgaatttgtttggtttcacaatccccctgcatggctttgccatgctgtcccccctttgcacaaggggggcttttctttgccaaaatgcatccaaccatcctccgtcatattgcccagcgcggcagcgcagtatgactgcccaggcactgggctaggactgcaaccaggccttttccgggtgatggtttatcacacccggagcacgggggccaacaacgcatccccaccggagacaggaacgggggcccaggcactgggctattcgacggtgacagatttggccaggttacggggtttatcaatatcgcagccgcgatacacgcccatataataggagaacagctgcatggggatgatggacagggacgccgacagagccgggtcgcaatcggggatcttcaccacaaagtcgcagatctccggatcgggctccacttcctcattggtcaccatgatcacgctggcgccgcgggccttcaccgacttcacattggacagagtcttttcatacagcgccttgtcgttggccatggccaccaccagggtgccgtcctcgatgagggaaatggtgccgtgcttcagctcaccggcggcataggcctcgctgtggatgtaggaaatctccttcagcttgagggatgcctcctgggcggcggcatagtccaccccgcggccgatgaaaaagacgctctgccggttgctgtacagagaagccagatactggatctggggccgggtgcgcagagcttcggtgatcagctcaggcagctcgttgattttccggcaatactccttgccctcttcctcggtgagggtgccccgggccaggccggccttgatggccaccaggtacagcgccgccagctgggcggaataggccttggtggtggcaacggcgatttccgggccagcccaggtatacagcacgctgtcggcttcccgggccgccgaagaggacaccacattgacgatggcaatggtgcgggcgccccgcttcttggcctcacgcatggcggccagggtgtctgctgtctcgccggactggctgatgacgatgcacagatcctctttgccgatgatggggttgcgataccggaactccgaagccaccgatgccgaaaccggcacacgggcaaaccgctcgatgacctctctgcccaccaggccggcgtgaagagccgagccgcaggccacgatgtggatgttccgcagatcgtggaagatctcgtcggtgagaccgcactcctccagccggggcagatcgccctcgatccggggggagatggtatcccgcagggccttgggctgctccatgatctccttgatcataaagtgctcatagccgcccttttccgccgaggaaatgtcccagttcaccgtctgcacttcaggctccagcttctggccgaaggcgttgaacacctccacctgatcaggagtaatgcgggcgatctggttgtcttccagcacgatataatgcttggttttctggatgatggcggggatatcggaggcgatcaggttctccccttcgcccacaccgatgatcagcggattgtcccgcttggtgcagtagatctcgccggggtcgtcggcagacagaatgcccagagcatagctgccccgcagatccttcacggtgtccatcagggcctgcatcatatcccccttgaagtggtactcaaacaggtgggccaccacttcggtgtcggtctgggactgcatctcatagccctcttttgtgagcatttcccgcagttccaggtagttttcgatgatgccgttgtggacgatggcgatccgtccattgcggctgatgtggggatgggcattcacatcggaaggctcaccatgggtggcccaccgggtgtgaccaatgccgcaggtggcttccataccgcccacctgctgcaccttgtcctccaggttcttgatgcggcccttggtcttgaccaccttcagtccttcggggcgcagcaccgccacaccggcggagtcatacccacggtactccagcttatacagtccttgcagcaaaacgggcacggcttcttcccggcccacatatcctacgattccgcacataagaatttttcctccaaattaaaatgaacgcctgcggggatgttgtcacggcggtcacccgccctttttctctcctccgcttcatggccaggcgtcaatgcgcagggggcatccgccgaatggttcgatcctcccccacctcgtcaactgcccgcaggcagtcccggcgcttttttctttgcttctgctcttgcgcggcctcaccacctttccattgcttgggcctttgccgccccatatccccggcaaaaaccggggatatgggtgtaaaggcatatccctttcctgcccttcaaaagacagggtttttatttggaatacagctcctcgatgaccttggcggccttctgagccatttcattgaccagcttttcgtcctggccttccaccatcacccgcaccagggcctcggtgcccgaaggacggatgaggatgcggccattttcaccaaagacctccccgatctcctggctgatggcctgcacttccggctggtcggctaccgttttctttttgtcgttgggcaccggcacattgatcatcttctgggggtaatgggcgatctcaccggcaagctgggacgccttcttgccgctgtccttcagcaccttgaggaaggtgacagcggtcagctcgccgtcgccggtggtggcgtggtcggtgagaatcacatggcccgactgctcgccgcccaggttccagccgtccttctgcatctgctccagcacgaaccggtcccctaccttggtggcggccatggggatgcccttgtccttgaggaagtttttcagacccaggttggacataacggtggccacaacgccgcctttcagcttgttctgctttttcagcgccgcggccagcacgcccatgatctgatcgccgtcgatgacttcgcccttttcgtccaccagcaggcaccggtcggcgtcgccgtcaaaggccacacccaggtggtaagacccttcccgcacctttttgcacagggcctccatatgggtggagccgcagccggtgttgatgttgatgccgtcaggctggcagaagatcaggtcggtttcgcactccagccgctggaacaggttgggcgccgtgcgggaggatgcgccgttggcgcagtccacggcgatgcgcaggcccttgagagacccggcggcctcggccacatgggccacatattcatcgcaggcggcgtgggccatgggcagcacccggccgatcttgccgccggtgaccggagaggccccggaaggatcgtcgatcagctcttccaccgccgcttccagctcgtcggacagcttgcagccgttggagccgaagatcttgatgccgttgtgctcaaacggattgtgggacgccgaaatgacgatgcctgcatcggccttgtgctccacggtgaggtaggccacggcaggcgtggggatgacccccagcagcacggcgtcggctccggcggcgcagatgcctgcggccagagcacattccagcatatccccggaaatccgggtgtcccggccgatatagatcttggccttgtgggaaagctcctttgtcagcacactggcggcggcaaacccggccttgaaggccagagtgcaggtcagttcctcattggccaccccacggatgccgtctgttccaaaatatttacccattttctttcttacccctttttgcccctttacagcgtcagctcctgctggccgagaaagggaatattcaaatgatcgtaagcttttttggtgacgcagcgcccccggggcgtgcgggtgaggaagccgatctgcatgagatagggctcctgcacatcttccagggtcacggcctcttccccgatggtggccgccaatgtttccagccccaccgggccgccccggaaattatagatgatgctctccagcatccgccggtcggtcatgtccagccccagcttgtcgatctccagagcgctgagggccaggtcggccatctcccttgtgatggcgccgccccccttcacctgggcaaagtcccgcacccgctttaaaatccggtttgcgatacggggggtgccccggctgcgcatggccacttccagggccccttccggctcgatgtcgatgcccaggatgccggcgctgcgggtgacgatcttttgcagttc

SEQ ID NO: 3203 - DNA, 3877 bp, Unknown
  16S sequences of unknown bacteria
ccggtatcgcgcaacaggatggcccggatataggtaacgaaggcggcaggaccggccgcgtccacaaaggaaacgccgtggtagctcggattcggcgcagcaatgggcttatatttgccggaggctttccagtcaaacttgccgctgtccacgatcacaccacccagcgtagtgccgtggccgccaataaatttggtagcggaatgcaccacgatgtcagcgccgtgttcaatcggacggatcaaatagggcgtgccgaacgtattgtcgatcaccagcggcaagccatgcttatgggcaatggcagcgatctcatccatatcgggaatatcgctgttcggattacccaaggtttccagatagatggctttggtattgtcctgaatggctttttccacttcgcccaaatcatgtacgttgacgaaagtagtggaaatgccatactgcggaagcgtgtgttccagcagattatagcttccgccataaatcgttttttgcgccacgatgtgatcccccgcctgagccaatgcctgaacagtataagtaattgccgcagcgccggaggccgtggccagcgccgccacaccgccctccagcgctgcgatgcgctgttcaaacacatcttgggtcgagttcgtcaggcggccgtatatattgccggcatccgccaaaccgaaacgcgccgccgcatgggcgcaatcatgaaacacataggatgtagtttgataaataggcactgcacgggcatccgtggccggatctggctgttcctgtcccgcatgcagttgaatcgtttcaaaatgatattggctttgatatgtatacatctgtaaaaccccttactaataaaaaatatctctgttaattttgcggcatggccgcattttttatcataaggcccgcccgaatgcttttgcgtatgcttactgcatcgctccgctgtttcctataacaggccgtcgctcacgaatggacacattcgcccattcctgaaattgtggcggagcatttttaatataaaacccattcactgcctccatttccccaatcatctataaatcctatttgttttatgtgttttgtataatacgcgcacaggtactgtttgtcaatgctgatttcaacattttcgctaaaaaagaaatctttggaatccccttgacaaacacgaaaccttgtgctactctttgcctatcattcatatatgcattatgagttttggagcgcttaccatgaaagattctgttgttatgagacgatgtcgccgctgattgctttcgtcactgtgataagagcactataccctgccaaaaatacaggatatccccgcctaattattagaatgacaccttgaaaggagattccacgatgaaaatttatgaaaaaataaccgatttgatcggcggcacccccttgctggaactgaaaaattatgaaacagccaatgatttgcaggctactgtagtagccaaactggaatatttcaatcctgccggcagcgtcaaagatcgcatcgctaaagctatgcttgacgatgccgaggccaaagggctgctgcattccgattctgtgatcatcgaacccacttccggcaatacaggcattggcctgtccgccgtggcggccgcccgggggtaccgcgtgatccttaccatgcctgaaaccatgagtgtggaacgccgcaacctgctcaaagcctacggcgccgaactggtgttgaccgacggcgcacttggtatgaaaggcgccatcgccaaggcaaaggaactggccgaagctacccccaacagctttattcccagccagtttaccaattctgccaaccccgctgtccatcgcgccaccaccggccccgaaatctgggcagacaccgacggcaaagtggacatcttcgttgccggcgtgggcactggcggcaccatttccggcgtgggagaatacctgaagagccaaaaccccaacatgaaagtggtggcggtagaacccgccggctccccagtgctctcaaaaggaacgcccggtcctcataaaatccagggcattggcgcgggttttattccggatactttgaacactacggtgtacgatgaaattattcccgtagaaaatgaggacgcttttgccacaggccgcgcgctggcccgccatgagggcgtgctggtgggcatttcttccggcgctgccgtgtgggcggcgacccaactggccaagcggccagaaaacaaagggaaactgattgtcgctcttcttcccgatacgggagagcgttatctttctacccccatgttctccgaataaaccattttcccctatttcctcctgttcactgcaaagagcggcccggcggagcatttctgttccgccaggccgctctttcttatccgaacatgctccctgcacaatgtccgggttcactttttccaatccagagcgatccttccgctcagatactgtaatcgtcgatctggcgtacctgctcccggtccaaaatatcctgcagcgtaataccgtccaaatactcgcagatcaccttgtgcagtccctgccaaaccggcagcgtggcacagcctgcgctgcgttcacactccatcggcgagcgctccaaacaggccaccggagccaggcttccctcggtcaggcgcaggatctcgcccaccgtataatccttcggcttccgggccagccggtatcctccctgaaacccgcggttcgtctgcaacacatccgaacgattaagaatcggaacgatctgctccagatattttttagagatcccctgccgggctgctacatctttcagcgccacatagccatccttctggtgctccgccagatccaacatcatgcgcagcgcataacgccccttggttgaaattttcactctgcgcgctcccttccgtacgttattaaatttaataataccatgtatttgataggctttcaagtcctcttcctttgatccggcgcagaagcaaaccgaccggaagcaaaaaacggaacgcccgcacatctgtgcgggcgttcctgctgcaatcgatatgctttatttcataacattctggtcaaaattcatcagcatctgcgccacttcggagcgggtagcgttggccttgggcgcaaggcccgtgccggtgcccttgagcacgcctgcacccacagcccagttcaacgccgaaaccgcataaccggagatctcatccgcatctgcaaagccggtcagattttcttccagcgttaccgtatccatccccttgtactgcgcatagcggaacaggatgaccgccagctgctcacgggtgatgggatcgttggggccgaagttgccgttgtcatagccgcttacgatcttctcggaagcggcccagcgcactgcttcagcaaaccactcgctgccgttcacatcaccgaaagacatggcgtagttgaccggctgcttgccctccagattgaagagcacctgtgccatctggccgcggttcagcttgtcggcgggcatgaactttccgttgttgccctgcatcatgcccttgtcggtcacatactgcaccgcatcggcataccaggcatccgcgctcacgtcgctgtagcccgtatcctcacgctcttccacgaagacggcttccaccgttacagcgctccgaggcatggtgaaggtgtactttgtatcgctctttctggtcagcttgagttcgtccccgtccttatccgtcaccgtcagcccatccagttcataacccttatcgggctggaccgtcagcgtaaccgtagtgccggagctggcacggctgcggttgctctccacgctcccgtgcttgctcttctccacgttcaccgtatacgttgcgctggaagagccaccgccggaggaaggcgcggt

SEQ ID NO: 3204 - DNA, 4450 bp, Unknown
  16S sequences of unknown bacteria
ccgacatccgcgccgccgtcgctgaaagaaagctctttcccctcctctccggctccgctctcaagggaagcggcgtcgaacaatttctcgacctcctcgccgcgctcactccaatccccgactacacggacaagcccttcggcgccaaagtcatccgcataaccgaagacggcagcgaccggctcacacatataaaactcaccggcggagttctgaaagtccgcgacagcgtcgtcaccgcgcgcggggacggcagggaaatcaccgaaaaagtcagccgcatccgcctgataaacggctcgaaatcgcagaacataaacgaaatgaagcccggcatggtcgccgccgtctccggtctcacgaaaaccttcgccggtcagggtctcggcgcggaacaggactccggcgaagcgaagctcgaaccggtcatgtcctgctcggtcatcctcccggaaggaaccgatattcacaccgcgctcgacaaattccggaagctcgaagaagaagagcccgccctcaacgtcacctacgacgagcgggaagggaatatccgcttcggcgtcatgggcgaagttcagctcgagatactgaaacgcgtgatacacgaccggttcggcatggacgtcggattcagggacggaggaatcgcctaccgcgagactgtcgccgcgcctgcgctcggcatcgggcattacgaaccgctccggcactacgccgaagtccagctcatgatcgaaccgggagagcgcgggagcggcgtcgtatacgcgcgcgactgcgaccccgaaaagctcgacccgaacttccagcggctcgtcatatcctgtctcggcgcgaaggagcatgtcggaaccctcactggctcgccgctcaccgacgtgaaaatcaccctcgtcgccgggcgcgctcacaaggaacacaccgaaggcggagatttccgcgaagccgcctggagagccataaggcagggactgcggacggctgggtgcgttcttctagagccgtggtacgccttcacgctcgaggttcccggagaatgtctcgggcacgcaatgagcgacatcacgagattcggcggcaaattcgggtcgccggaaaacgacgggacgacggcgcgtatcaccggaagagtcccggtcgcgaagctgcaaggctatcacaaagaggtcgccgcctacacaaagggcaggggacggctaaccgtcgaggcggacgggtatgaagaatgtcatgacgaggaagtcatcgcctcgttcggctacgaccccgaccgcgacatcgcgaacaccgcggactcgatattctgcgcgcacggggcgggttttgtcgtcaggtgggacgaggttcccgcacacaagcacgtcgatctcgaactcgggattgacgacgaacccgaggaagagctcgaggaccgcgccgaacgcttcatccgcgccgccgcgagcgacaaggagctcgacgcgatcttcgagcgcacctacggcgagggcagctttgtcgtcacgagccacgaccccagaaagagagccgccgaaaaacgcgtcaagcgcgccgatccctcgaagacgcccgccgcgaaacgaccgcagtacaactattccgggaaagaatatcttctcgtcgacgggtacaacataatcttcgcgtgggacgagctgcgagaaaccgcgaagaagagcctcgacctcgcgagacgccgtctcatcgaccgcgtagcgaactatcagggcttccgcggctgtgaggcgataatcgttttcgacgcgtacaaagtcaaggagaaccccggaaaattcgaaaaagaaggaaacctcggcatcgtctacacaaaagaagcccagaccgccgacgcgtatatcgaaaagaccgcgcacgacctgtcaaagacacatcgggtcagagtcgccacgagcgacggggcggaacagatgataattctcgggagcggagcgataagagttcccgccgcggcgttccacgcggaagtctgcgaggcggagaagattatacgggggatgctgaagttctgaaatcttcaatgatttctgaatcgctgttgacaatacgcataatgtgtgttataattaatatacactaaatcagaacggagtgaccacatgaagttcaaggagattgaacggctgcttcttgacaacggttggatctttaagagctgccgcggctcgcataaccaatacgtacatccgactaagccgggcaaggtaacgattcctaagcacggcggagacctggatatcaagaccgcccgctcaataatgaaacaagcgggtcttgacccgaaggagggaaacaaatgaaactgatctatccggcggtattctcgccgcttgaagaaaatcccggattctgcgtcacatttcccgacctgcccggatgcgtgaccgagggacacagcctttgcgaagccatcgaaaacgccgaggacgccgcgagcggctgggtactcgatgagctcgaggacggaaaccccgtcccatacgcgtcaaagctgaccgacattccggtgggcgacggggaattcgtcgatctgataaaactcgatatggattcctacgccgcgaaatacggaagcaattccatccggaagaattgtaccatcccatcatggctcaacaccgccgctgaaaagcagcatatcaatttctcgcaggttttgcaggacgctctgataaagcggctcaatatgtcagactgaatacgaaaaactgccgcgggtcgggaaatatctcccctgacccgcggcagtctctttttttatttcacgctgttctcagcaccgcatgcgcggatgacagacttcatcacgtcgatctcgtgccggtaatcgaacatcattttgtcctcgccgcgcaccatcttcgcgaagtggatcatcatctcgtcgtagcggtcgtaaatatcgctcctcacgttctccgcgccgttcgaccactgcggcggattgttgtcgagaagcgtcaccttcgcctcggtgtactgtccaccgggcgcgtgcacctcccacgggcgtatctcgtaggttccgcgcgttcccgaaatcaccagctggcggcgatcgaagccgttcacctcgctcgcgcaggtcttcacgaacgacgggatgccgttatacatcatcaccgcgaagccgtaatcctcgctcgtcagcccctcgttgcccgtacagccgttatatggtattatctcgtccggaatgcccttgaacatacacaccatatcaaccagatgacagccgagataatacatcatcccgcccttatagcgtccgagccaacgacgcttattcgtgtcgtgtctcacgctcatctgcgcctcgaccgagaagacgtcgccgagctttccttccttcattaaatcatacgcctgcttcacgagcgggttgaagcggtacatatatccgagtccgaccgggagatccttcgacttcatcgtgttcatgaactcctcaaacgccctcgcgtcgtggcttccgggcttgtcgagctgaaccgggatgcccttttcggcgaacagcttcgcgtactctatctcgtactccttgcccgcctcgatcacgaccgcgtcgaggtcgtccatattcagaagctcctcgagcgtgaaaacctttccgttcttatacgcgccgtcagttttaaaacgctccttgtactcctcaaccggctccgctatgccgaccacctcgaaataatccttgttcttgtttatgctcgcccacgcggcgggggcgtggtcatgtcctgtgcctatctgggctattcttatcggtttcattattctttctcccaattaaactgcgttatcgggaacgacttctcgttcgcgagccttgcgtaaacctccggcgcgtcgtcgaccttctcggtcttctcgaccatgtccgcgaggttcattctgccgttcctcatcaagcggatcaccgcctcctcgtcgtcccactccgtccaccagccggaagacgaatcccgcgccgggcgggcaagcgtatgcgcgccgatcaaagtgatgcccggtccatgcaccttacggtaataatcaatagtgaaatccgactcacgcgtacaaccaagcagcgccacgcgcccgaacctcgccatgcagtcaagcacctcatcgagcgccctgccgttgcccgtaacctcaatcgcgcaccgcgcaccgccgttcgtcaacttcttcacggtttccgcgaaatccggcgcgaacggatcaagcgcaaaatccgcgccgaacttcaaagccttctcccgccgctcagcgttcgggtcaaccgcgataaccgggcaagcccccgcaagacgcgaaagccgaaccgcaatcagccccagaacgccaagacccatcacaaccatcgactccccgatctcaacccgcgtcttccgcaccgccgccatcgggaaagtagcaatatgtaccagcgcccccgcctcaa

SEQ ID NO: 3205 - DNA, 4418 bp, Unknown
  16S sequences of unknown bacteria
gccgccggagaaaataattttgactttatttgcgcctgcgggcgcaaactctgcgaggcttttttgacagtctgaagagggagcagcatggagacccatgctgctccctcttttttgtagaaagaaaaccatcggccgggccggtggttccaaaaagctttcactatgcctagaaaaaagattctcctacggttatagtaatggtggtctgccagccaccattactatacccgtagaatttgataatcattattaaaatgcactggattgtatactactttacgtagttttctcttattatcgaaaaatcacaacgttctgaattcggtttattttcccagtttcccggctatactggtttcatcgaggtgttccgttaaaggaggtgatgcgcatggtcaaaggtgtttcacggcaggtgatcgtcgtccggccgccggataccaagctgtttgagcaggcgatctttctcctgcgggacggcgcggacggcggcatttccgacgaggcgctgctgcgccaggcccggcaggccgccgggcagtatctgcaggcaagccgcacgccccgtcgccgcattcgcctgcaaaacctcgcctgggcgctagccggcgccgccgccaccggcctcgcctggctgctctccgttctctgaagcaaaaccaccggtcacgaccggtggttttgcttattgcgattatgcgatgattgcggaaaattataccgttccagccttgcaaattcctcgggtaactggtatactgttcctagataactatcccgatatgtaggcactacatattcaatctgggatatgggaaaggacacgctatgaaacacctcaagaaacttcttgcggcattgctggtcgtcgctatggtcatcgccatggtgcccgccgtctttgcagcagacagcggcgatgcagcggaaactgccatggacagcatctgggctgacatcgacgctatgtacgcagccaccgccacgaaggacggcaaggccgcagccaccgccacgaaggacggcaaggccgcagacccggtcgccaccgcgcagaaggctgctgcgatcgtcgagcgggccgacgcctatgtcgacggctccctgtcgtggaacggcaacggtgccttcacctggaagacggaagacggcatcaccggcctgtataacgcgcagctgatggccgaccgcgcaggcaaatctgcctgccagtccaagcttgcgttggaggacatcgtcaaccagtacaatacgatctatgacaataccattacgggtacctatgctctgcgctcgcttgggaacggcatctacaccagcagctacggcagcagcaccgatacaatcgccctcttcgggccctattacaacggccgggacaacaactttaccgacgcgtatctgtccaacgccgtcaaaatggccgaggccgcgcagtgcaacctcgtcgtctatatcaatgaggctgccaacctggataacctgggtaaggccatggcgtcggcaaagctcgtcctgttcgacagccacggtacaacggactactacaatcaggtatcttataccagctatccggattatgcctacaaagttgacgactgcacctcgcgggcaaacgtctcttatctttgcctgacgactggcgattctatcaccagcgcggatcgcaccaccgcccgcggtgcctatggcagctacgaccatgcgctctcaattggcgataatgagtgggcagtcgatggtacggccattgccaaccatatgtccggcaacgcaaacggcaactttgtctggatcggcagctgcctgggcatggcgacaaacaccatccaggagcccctgcggaataagggcgtttccgccgtctacggctacagccagtccgtcaccttctatggcaatatggcgtatctctacaccgccgcagaatatctgtccgccgggcacagctttgcccgcggtatccaggcagccaagcagacctggggcagctgggatcccattaatcgctactactacaccttctgggaagcagatcgctatggcaacaaccattactggtatgactactactacgaaccgacgctgaacggtcaggcttgcggcacccctaccttgacgatgctgcggcgggataagattgccttccccatcaccgtctcggataaggaccgttaccccggtcagcacaaggtcgacaacatccagcaggtctactgcgactggtatctgacttctcccgcttctgtacacgaccgctttgtggacgtgccggatggcgcgtggtacatctccgctgttgactatgtcctcatccacaatatcatgagcggcaataccaacggcacgttcgccccggagaaggcgctgacccgtgccgagctcgtcacactgctctggagcaaggaaggcaagcccgaggctgcgtccgacgtctccttcaacgatgtggccgacagcgactggtttgctgcaaaggttaagtgggccgccgcagccgggatcgtctccggttacacggatggcagctttaagcccaacaagcaagtctcccgccaggagctggcgcagatgatctttgcttacgccaagtataagaatgtggacgtctctgccagcggttctctggctggcttcagtgacagcaacgcagctggcggttgggcaagacccgccctgcagtgggccgtcggtgctgggatcctctccggcagcaacggtcgcctgatgccggcaaactccgcaaagcgctgcgaggttgcctccatgttcatgcgttttgtcgaaaactttaagctgaactgatgcgaaacgatcgctcttaaactcgcgcggcgcgctgcaaatcctgcagcgcgccgttttttctgctgtgccgggaatgcttcaaaagcgcagcagcacccggcgctgcaattgcaccgggccaggcgctgccgcgctctcgtttattctgattccgctttgctgcaatagactgccgttctgctgcggccgccgggcgtgcaggtatagagcaccaggtcatacccgctgtattgcactgctgcaacatcctccggctggactgtcgtcagctgggagacggtataggcatatactcgcccgttcatatcctcaaatttcaccgtatcccccggctccagcttggacagccgtttaaaatgcgaggtatagttatgcgccgcaatgacgaaatcccccgtcgcaggccagccaaattggcggcagggggagcgcttgagccgcgtataatcccactggtcctgcaccggcagctccaatgccagtgcagggatcgtcaacgtcccgatatagccgtagccgtcgatctccaccaccggcaacgccgcgtcctcaactgctgcctcactttggctctcctccggcgtctgctgcctctggagcccctgcagctggtgaaacagctgcagggcctgctcgcccgccgcatggtcctcctgctggttgcgaagcgccaaccccagcgccgccagaatcaatacgataccgaccgccaccagcacaagcccgattttctttccctgcatttatccgcccccgttcgttttgttgctgccatcgtatcacgccccggtcgattttgcaagcacgtgcgggcagcagcgattgatcggacaacctgggtggtccgacacgcaactttttatcttcatttcaggatcttgtcgatcaagccgtagacaagggtctcttgacgggaacgattgctgcttctctgaggtaacggttcttttcttctgcgctgatggtcatataactcctcccatgcataaaaaaataaggccggagcgatcatactccgacctataaatacaggcgctgagagcagcgccctttttgaaataaaaaagggcgccgcattctcagtccgtcaggaccaacaaaacgacacccaaatctttgtgattctttttttgagaaaatgctgctgccagtcaaggaaaatgccgctcaaaaagggcgccggctgaatgcatctgcccgaaaagggaaaacgcccggttcgaaccggggcagacgctttgaaacagcgatttgtatctatggtttgaaagaagaaatccgattctgaaaaatcccagaaatggttgatgcgcctggctttacgccagacgcatctatgccgcttcgttaatatggaggtgacgcccagattcgaactggggaatgaaggttttgcagacctttgccttaccacttggccacgtcaccatatgaagcaggagaccggggcctcctgctgatttggagcgggttacgaggctcgaactcgctacctccaccttggcaaggtggcgctctaccagatgagctaaacccgcaaatggtgcctcgagtcggagtcgaaccaacgacacgcggattttcagtccgctgctctaccaactgag

SEQ ID NO: 3206 - DNA, 15847 bp, Unknown
  16S sequences of unknown bacteria
agacaagcggtcgggcagattcgttggcaaaccagaggtttgtcaacgatcagagctcccctggaatcaggggagccttttggaaagtgctacatcgtggaaaatagcatcgatcaaacattgattgagcaaaacaggaggtatacatagaaaaccattggcaaaacagatgattcaaagatccaataaacaaaggaaaacctttggatagtgtgccttcatgtggcgcggcagcgcccaaaaggctcccctttggggaaaggggagctggcagcgaagctgactgaggggatgcgaaagaatttttgctgttttttcacagcccctgcgaaggctggggtgcgggcgaaacaggcgagggcggtgcgcaatccacccgcttacgcgcgccgaagtcctttggcgggcgtggtgccctccattttggtaaaggcgcggtagaacgtgcgcaggctggcgtagcccaccgcctcggcgaggtcttctagcgacatgctggtctcctgggccagccgcttggcgtggtcgatgcggatgcggttgatatagtccagcacgctcatgttcgtctcctggcggcaatatttggtgatcgtctggggcgaaaggttgagcgcggcggcgatgtggctgatgttcaggttcatatcgctgtaattggcgtggatataatcgcacacgcacttgcccacgcccgcggaagcggccaccttgtgccgcagaatctcgctgcagacgatgcgcaccagcgtgcggatttcttcctccatttttgcctggtcggcgctttgcatcagctcgcccaggcaaatttgcaagcgctcgcggccttcctggccgtcgggcagcgcgtcgtcgtatcccttgcccacgatccgcaggatatcgaaatacaaaaaccgcgtgacctggaaggaaagcgcggatttttccgcgatgtagccaaagagctccgtaagggaggcgtcggcggccttttcgttgccctgggcgatggcctcgcgcaacttgcgctgggcaatgtggcggctggtgttgatgcggtcgttgtgcttgagcacttcgcgcgcgggaatcgcgccgctctctcccgccgcgcacaggcattccaccacgccggtgagctcggcatagatttcattggccagatccagccgctcgcaggggttgctgagcacggccagcagcggcaggggcatttcgctttcgaaggcgtcgcacaccgcgcccgccagcgcgctcgcctcgtccagccaaacctcgttctgctcgctggtgagcgcgaataggtacacgagccagttgttgtcggtcacgcgctggggcatgttcgcctcgcccagcttgccaagcagaagctggtgcacgtgatattgcatttcgtcgaaccggtcggaaaggtacgcgtcctccgcgccgggcaggcagaagacgatcatgcgcagaattttcccctcgaacagcgcggcggcctgccgcgccacgggctggtcggaaagccgcgagccgcgccccagcagttgcgagagcaggaatttctcccgaatataggcctcctgcatgcgcaaattgcccttgatggaggtgttttcctgccggagcgactggcaggcggagagaatgcggtcgtattcgttgcccgcggtggcgtcgtcctgccccaccacggaaaggatgttgctcaccgggctgtagtgccgcttgaggaagagcgccaccagcacgacgcccaccagcagcgcgcccgtcagcgtggcgatggccaccatccgcatgggcaaaagcgcttgcgcgaaaatcgcctggggcgtgaacaccaccaccgaccaatcgttcgcgcgcgcctgtgcgctgagcgcgacgtagttttcgccgcccaaggaaaccgtctgcccgctggcggacaaatcgatgcttggcaaattttgcgcgttgcccgcgttgtcccaggcccgcagcacggttccgtcgcttgccacaacggccagcaggcagccgtcgggcaaattggcgctggaagggagcagcaaatcggcgctgaggcaggcgatcaggtggcaatagcccgcgccgggcacgtccatcttttgcgaaacggcatagcacagcgccgtcttgccaaaggtgccgtttcccatccaatcggaaaagaaataaccgccctgcgccacagccccattgagttcggccagataatcctcgtaagagacagaaacgccgttttcctcgcacagcacgcgccaggtgccattgagcgtgtaggcggacgtttccgtaatgatgtggtcgtaaaacgggatgtagaccaccatgctcaagccctcgttggtgcggcagtggttccaaagcaaattcaccattttggtggaggtaaaggaaagcgccgcgtgcgaattgctcccgcgcagcgtgaaatactccgtggaggaatacaccacttcgttggcataggccagcagttccatggcgttgtcaaaattcgcgcaaaggttttccgccgtcatttggttcacgcgctgcacttcgctttgcagcaaccggtcgccatagacctggttgaacaccgcgatgcacaggggcagcagcaaaatgatgctgtaggaacgcacccagtcgcgcacgatgccccgcactttgccattccatttccgatgtttcttctgacgcaacttctgtcttcccttctttgcgcattgccaaaacccctgcggggtgcttgcttgccaactccattgtagtgaaattgtctaggaattgcaagccttttccccgcatttgcgcttgccaaaatcgcaagcgcggcttgtgttttggtcaaaatttcgttttcgaagctttgcacgccctggaagcgtccgagcgttccggcttcgcgccatgcaaaattgccctttccctgccactaatcgcgatctacggcatgctgcataacccgcgcaaattttgtcattgcatgtgcgccaaagatttgtataataaaatcatcctgccggagcgcgaaccgccccggcaaaatcgagaaaggagtttatccccatgacgaaacgcatcttttctctgcttctcgccctcgccctgctgtgcctgagcggcgcggcgctggcggaagaagccgcctccgcctatcccatcgcgggcgcggaaggcgtcaccctgacgtttgccaaaatcgcgcagacgcagatcacctcgcagtacgattccctgcaggacaccccgctgatgcaagcctatatggaagccactggcgtgaacatcgaagtgattgccccggcggacaacaccgccatgaacctgctcttcgcctctggcgatctgccggacatggtctatttcgattgggacgcctacgccggcggcatttccaaggccatcagcgacggcattgtgctgccgctcaacgacctgctggacgaatacgcgccggattataaagcggcgatcaacagcaacgaggactatcgccgcggcaccatgacgcccaacggcgacgtgtatggcttcgccttcattcgcgcccacagagacctgctcacttcctccggccccatcatccgttccgactggctggaaaagtgcggcctggaaaacccggaaaccatcaccgagttctacaatgcgctcgtggccttccgcgaccagtgcggcgcgacctatccgctttccaccggcgcgggcaacatcctgggcaatgactccgccgccttcattctgggcgcgtttggcgtgccgcaggccgatttctatcacgatggcgacaccgtgaaattcggttacatgcaggacggcatgaaggattgcctcgccttcctcaaccagctgtacaacgagggcttgctcgatccgaacttcgccacgttggacagcgcgaccatcaattccaacctctacaacggcatcagcggcgtggtgaccggctcgctgggcagcggcatcggcaaccacctcaccgccatggaaggcgacccggaattcgacgtggctggcatgcactacctggtggctgacgaccagaagggcgagctgcccatctccggccacacggatttccccgtgatgcgctatgccacctgcatcaccaccacctgtgaatatccggaaatcgccgcccagttcctgaactacggctacaccgaggaaggccgcctgttgctcaacttcggcgtggaaggcgaaagctacgaaatgatcgacggcgtgcccaccttcaccgagcagatcaccaacaacccggacggtctctccatgcagtacgccatggcgccctattgcttctcctgggacggcggcaacatgctgcaggatgaaaactacatctaccagtacgcgggccgtccgcagcagcaggaagcgctggccacctggtccaacacgctcaagggcgattatgtgatgccccgcgtgaccatcccggatgacatgagcgcgcgctttgccagcctgggcaacgacatcaacacctattgcagcgagatgcgcatcaagttcatcaccggtgaggagagcctggacaatttcgatgccttccgcgataccctgcgcaacatgggcattgaggaatacatcgccatcgagcaggccgcctacgacgagttcatgacccgttaaattcgctttctcttttcaggaaggccgggagaatcctttcccgcgccttcctggccgctgattctacttggaaagaagggattcccatggcaaacgccgcgctttcccgcaaacaaggcgcgaaggcctatctgcgcaagctgggcaaggacatttggcgggatggggacgcctaccttctggtggtccctgtattgttgtattttttcctgttccattataagtccatgtatggcgcgatcatcgcctttaaggatttcgcccccatgcgcggcatcctgggcagcccctgggcggacaactacggctttgcgcacttcatcagcttctttgagtcgtactatttcggcaggctcctgcgcaacacgctcaccatcagcctggccacgctggtgttcggttttcccgcgcccatcattttggcgcttctgctcaacgaagtgcgttccacgcgattcaagcgcgtggtgcaaacgatcacctacatgccgcacttcatctccatggtggtcatctgttccatgatccgcatgttcgtggcggaaaatggcgtgatcacccaaatgcttttgccctttggcatcaagcaaggttccatgctttcccatccggaatatttcgtgcccctttatgtgatctccggcatctggcaggaaatcggctggggctccatcatttacctggccgcgctcacgggcatcgaccaggaactgtacgaagccgcgcgcatcgacggcgcgggccgctggcagcagacgttgcacgtcaccctgccgggcatttcttccaccatcatcattttgctcatcctgcgcatgggcagcgtgatgagcgtgggctatgaaaagatcattttgctctacaacgacggcatcctggaaaccgccgacgtgatctcgagctttgtataccggcgcggcctgctcaattacgagtggagctattccaccgccgtgggcctgttcaactcggtgatcaatttcgtcctcatcgtgctcttcaaccgcctgagccgcgcgctcagcgaaaccagcttgtggtaagggaggcgaaaccatgattcaggacaacagcagaggctatcgcgtgtttcgcgtggtcaatgggatcgttctttcgctgatcaccttcgccgccttttatcccatgtatttcgtggtgatcgcttcgttcagcgacggcaacgcgctggtgaagaacgtgggcgcgctgtgggccccgctcaagccctacacggtggacgcctacgagcgcgtgttcgccaaccgcaacatcgcgaccggctaccagaacacgctctttgtgctggccgtgggcgtgcccctcaacgtcattttgaccaccatgggcgcgtacttcctctcgctgaaaaacatgcgcatgggcggcgtgatcatgttcctcatcctgttcacgcgctatttcagcggcggcatggtgccggactacctcaacgtgaagtccctgggcctgctcaactcgctgtgggcgctgattttgccgggcgcgatttccagctataacctgatcatcatgcgcacggccttcgccgccgtgccagaaagcctgatcgaatccgcgcggctggacggcgcaaagcactaccgcattctcttcagcatcatgataccgctgtgcatgcccaccatcgccgtgatcatcctctactacgcggtgagccactggaacagctggttcgcggcctccatctatttgcaggatgtgagcaaataccccatccagctgatcatgcggcagattttgatcctggcgcaaaccgctgaaatgatgggcggcgacgaggctgtggccgaagccgcgcagatcaacgagctgatcaaatacgcgttgatcgtcatcggcacggtgccgatcctggtgctctatccgttcctgcagcgctatttcgtcaagggcgtgatgatcggcgcggtgaagggatagaaccgtttcctttgcgcgcatcgcacttttatcgccgtggaagaacgcgtttccacggcgatttttctttgcgcgcgcggccaacctatggtataatggagaaaacaatccagtgcattggagggaatcgcatggagaagctgaagctcaaggattttctggcctatcgctatctatccgcgccggaattcgcgccggatggaaagatctgcgcgttcgtcgccgcccaggcgaaagaggacgagagcggctatgaccgcgacatctggctcttcgatccgcaaagcgagcgcgtgcgcccgctcaccagcggtggggacgccgggcaattctggtggttggatgaaagcagcctgctctttcccgcgctgcgctgccccaaggacaaggagcgcgcggagcggggcgaaccgctcaccagtttgcagcgcatacgcgtcgatggcggcgaggcccagcccttttgcaccatccctgcgcgcgtgagcgacctgcgcgtgctggacgaagaccattttttgctgctgtgccattatgaaatcggcgaggcggattggacggcgctctccgcccaggagcgcgcggaggcgctgaaagcgcgcgaggcggaaaaggattatgaagtgctggaagaaatccccttctggagcaatggcgggggcttcaccagccgcaagcgcgcgcgcctgtatctcttcacgcgctcgagcggcgccctaacgcccattaccggcgaatggttcgacgtacacggctttgccgcgcaggggcaaaaggcgctgttctggggcgcggaataccgggataaggccgcgcagacggaagggctgttcgccttcgacgcggcgtccggcgaaatccgctgcttgctgcccgacgggcgctttggcatccacacggcggatttctggggcggggaagtcgtctttttcggcagcgaaatgcgccgctatggcctaaacgaaaaccccgcgctgttcgcgctgcgcggcggcgagcccgcaccgctctgggacagggacgaagtgcccggcagcaacgtgggcagcgattgccgcctgggcgggggcaagcacatccggtttgacggcgatttcgtctattacaccgccgcgcgcgacgtggataccgtgctcgcgcgcgcggacaaggcgggtagggaagaggtgttgctctccggccccggttccgtggacgccttcgccctggcggaaggcaagctgctattcgtgggcatgcgcggcctgcgcctgcaggaactgtacgcgctggaagcaggccaggcgcggcagctcacccgcttcaacgaagagattttcgcgcagaaatcgctcagcgcgctcatccccctttcctgcgagagcgacggcgtgcagattcacggctttgtgatcccgccggtggatttcgatccggcaaagtcctatccctgcattctggacatccacggcgggcccaagaccgcgtatggcagcgtctttttccacgagatgcaactgtgggcgaacgagggctatttcgtggtgctgtgcaacccgcgcgggagcgacgggcgcggcaacgcctttgccgacatccgcggcaaatacggcaccatcgattacgacgatttgatgcgcttcctcgacgcggccctcgccgcccatccgcagatcgacgccgcccgcctgggcgtgaccggcggcagctacggcggctttatgaccaactggatcatcgggcatacccgccgcttccaggccgcggcctcgcagcgctcgatcgccaactgggtttccaaattcaacaccacggacatcggctattatttcaacgcggaccagatcggcgccacgccctggaacgacgcggaaaagctgtggtggcattcgcccattcgctacgcggacaaggccactacgcccacgctcttcatccattccgatgaggattaccgctgctggctggccgaggggctgcaaatgttcacggccctcaaataccacggcgtggaagcgcggctgtgcctgttccacggcgaaaaccacgagctttcgcgcagcggcaagccctgccatcgcgtgcggcggctggaagagatcacccgctggttcgatagccacctaaaggcccatggataaggcgctttcgctcttcggcccgcatacggcccagtggtttgaaagttgcgtgggccagcccacccgcgtgcaggcggagggctggcccgccatcgcgcgcggcgaaaccgcgctgatcgccgcgcccacgggcacgggcaagacgctcaccgcgtttttgtggttcatcgaccgcctgacgggcctggccgcgcgcggtgcgctggaagaaaagacctatgtgctctacatttccccgctcaaggcgctgggcaacgacatcgaggccaacctgcgccgcccgctggcgggcatcgcggcgcgcatggcgcaaagcgggcttgcgccccaggaaatccgcgtggccgtgcgcaacggggatacgccgcccgccgaacgccgcgccctgttgcgccacccggcgcacatcctgatcaccacgcccgaatcgctctatctgttcctttccaccgaggcgggccgcgcgctgctgggcggcgtggaggccgtgatcgtggatgaattgcacgcgctgatcgacaccaagcgcggcgtacacctgatgctctcgctcgagcggctgaacgcgctcgcgggccgcgcgctgccgcgcatcggcctttcggccaccattgccccgctatccgtggccgcggcatgcctggccggttggcaagatggcgcgccccggcccgtgaccgtggtcgcgccggagatccgcaaggcggcggacatccgggtggaggccgccgtggaggatttccgctccctgcccgaaggcagcgtctggccggagatcttccgccatgtatacgaatccgcccgccgtgcgcgcaccacgctcgtgttctgcgagggccgcgccacctgcgaaaagatggcgcacggcctcaaccaactgggcggcgagggcttcgcgcgcacgcaccacggctgcgtttcccgcgagcagcggctggaagccgaacggcaactcaaatcgggcgagttgcgcgtgctgtgcgcgacctcttccatggagttgggcatcgacgtgggcgaaatcgatctcgtggtgcaaatcggcgcgcccagcgccatctctcgcgcgctgcagcgcctgggccgcgccgggcaccggccggacgaggtgagcgtgatgcgcctgtatccgcgcgaaatgggcgaaatcctgcctacggccttcatcgcgcgcggcgcaatcgaaaaaaccatcgaatccgtgcgcccgccgcgcctgtgcctggacgtgctggcgcagcatttggtttccatggccgtggaaacgcgctacagcgtggaggacgctctgcgcctcgcgcggcaggcgtacagctaccgcgagctttcgcgcgagcaggtggagaacgtgctttgcatgctggcgggcgatttcgagcgcgcggcggacgcgcccgcctccccgcgcctggattacgaccgcgcgaacggcgtcgtaaccggcacgccctacagccgcatgctggcgctgatgtccggcggcacgattcccgaccggggctggtttggcgtgtacctggaggacggcacgcgcctgggcgagctggacgaggaattcgtctttgaggcccggctgggcgaccgctttttgctgggcgcgttcagctggcagattgtgaacatcacgcgcgaccgggtgctcgtgcgcccctgcgacgcgggcggcgcgcaatcgcccttctggcgcggggacggcatgggccgcccctacgaaaccggcctgctctttggccgctactggcgcgaactggaggacgccgcgcgcgcccaccggctggaaagcgcgctcgtgccgttcgcgctctcgcccgacggcagggccaacgccgcgcgccgcgtgcgcgaccaattggatgccctgggcgctctgcccaccgacagggccatcctggccgagcacttttccagcgaggatggcggcgaaagcctgctctttcacagcgtctttggccgccgggtcaacctgccgctggggctgctgttggaagaagccgccaccgccgagacgggcgcgctcgtgcgcatgcactgcgacgacgacggcatccttttgcacttcaccggcggtgaagcgccgcgggacggcctgctcgagcgcctgggcgcaaaagacgtacgcgcgcgcgtggcccggctgttgcccgcctccgcgctgttttccatggcgtttcgctacaacgcctatcgcgccctgatgatgggcgtgcgccggggcggccgcctgcccctgtgggtgcagcgcctgcgcggggcgcagaccttcgcccgcgcggcgcaatcggccaaccaccccctgttgtgggaaaccctgcgcgagtgcatggaggattatacggacatcgccgccctggaaagcgtgctctccggcatcgcgcgcggcggcatcgccgtgcgggaaacgcacgccgaacgcccctcgcccatggccgcggcgcttaggcggcagtttgaggcggcggaaatgtacgattatacgccgcaaaccggcgcgcagcccgggccaattcccctgcccgccgccccgggggccgccgtggacgcttccgccctgcgcgaggccagcgcgccgcgcagcatttccagcgcgcaggcgctgcacgccctgctcctcaacgagggcgacctcgtgcccggcgatgtggacgcgcccatcgaatggctggaatcgctggcggcgcagggccgcgcgctgtacatcgagcccggcctgtggatctgcgcggaggaagcggagctgtaccgcgccgcgctggaagagggcgacccggcggcccgggaacgcctggcccggcgctgcctgcgctatcgcggcccgctcaccgcggatgtcctggccgaacgctatggctggccggaagagttggcgcaatccctgctctccgcgctggaaaccgcgggcgtcgccatcgcctgcgagggcggctacgtgcaccgcgatgtgtacgaccgcgcgcgtcgcatcgtcgtgcgccgccagcgcgcggcggtggtgaccgcgccgcccgagcgctttgtggaaatggtgctcgcgcgcaaccagagcgcgggcgcggcggccgaacggctttcgcaggccgtgcgccgcctggcggggctcgccctgcctctcgcgcactgggaaggcgcggtgctgcccggccgcagcctgggctaccggcccgatatgctcgacgccctgctcgcgcgcggcgaagccgtgtggcgcgttttgcccggcgaacccacgctcctgcgctttctttcgcccgaagccatcgattggaacgcgctgcccgcgggctttgacgatcccactctgtccgaagaggagcgcgccatgctggcgctgctctcccgccggggcgcgagctttgccagcgcgctcggccccaacgcgctgcccgccctgatgcgccttgcggccaagggactggtgcgctgcgattccttcgcgcccgtgcgcgcgttgctggaaggcaaggagccggaagcgcccaagcagcgcgcccgcgtccgcgccaagctcagcgccgcgggccgctgggaaatcgcccggcccgcgcaagaaggcgagctcgccgcgcgcatggaaaccgccttcgagcgctggggcatcctctgccgggaaaccgcccggctggagggcattccctgggtggaagcgctcgcccgcctgcgcgtgcaggaatacacgggcgaggtgcgccgcggctattttgtgcgcgcgctttcgggcgcgcagttcgtgcgcgaagcggaactgccgcgcgtggcggcggcgcttgaaagcgacggcgcgattgtgcgcgccgtcagcgcgtgcgatcctctgctggcttgggggcttctcgtgccgccgcccgaagaagccgcctttgtgcgcgtgcccggcaacgcgctggtgctggtgggcgggcgcgtcgcgctcatcgccgagcggcagggccgccgcttgcgcgtgatcgaggaaaattccctgccggaaaccgtgcccgcgctggcgcgcgcctatctggcgggccagttgttcccgcgcctcaacgccctgtgcgtgaaagaagcgcccgcctgcgccgtacccgcgctggaacaagccgggttccgccgcgaaatgctggattatgtgctgcggcgctgaaaaagcgcgctgaaagaaacgctggaagaagggagaaattcgcgcatggaagagatgtatgcgccgccttttcccatgacggaggaaatcaccaatcttgtgattgaaattggcgaatgcgttggcaaaatcagcgtgagcgacgccgcgaccaaggatcccaaattgcggcgcgtcaaccgcatgcaaaccatccacgccacgttggccatcgagcaaaacgcgcttactctcgaacaggtgaccgccgtgattcaaggaaagcgggtgctcgcgccgccgcaggacatttgcgaagtgaaaaatgcctatgaggcctacgagcacatgcgggaattcgacccttacagcatggaggatttgctcaaggcgcatcgctttatgatgcgcggcctggtggaggaagccggttgcctgcgcacgtccaatgtgggcgtatatgcgcaggaccggctggtgcatatggccccgcccgcggagcgcgtgggcgatttgatgcgccagctgtttcgctggttgcgcacttctcgcctgcatccgctggtgaaatcctgcatttttcactatgaattggaattcatccatccttttgccgatggcaatggccgaatgggccgcttgtggcactgcttgattttgcagcggtggcagcctttctttgcgtatcttcccatcgaaacgctgatccatgaaaagcaagaaggctattaccaagcgattcaggccgccaccgccgcgggagaatccgcgccctttgtcgcctttctgctgcaaaccatccgcgccgctctggcggaattttcctcggtttctccggcgcgtgtcggagaaaatgtcggagaagatgtcggagaagatgtcggagaaagccagccgctggaagagcggtgcctcgatttgctgcgccggcatccccgcatgagcgcaagggaactggcccaggccctaggcgtatccgcccggcatgtggagcgcttgctggccgctggcaaaaagaagggccgcctgcgccgcgtgggcgcggccaggaacggccattgggaagtgctcaaggaggagtaagcgcgcgcaacgcgccgtcgctgaggcgggcgatgaagcgggcgatcactttcggttcggtgcgcatgccctcgccgatccaggcgcgaatcacgcccacgctgccgttggccatgaaactatagagcaaatccagcatttcgcgcggaagatcttgggccgtgcgccgccattcctgtaggcaggcttcgcgcgcagtttccatcacgcggcccaggaattccttgtcgccatgttcgctgaatagcaccccgcacaaatccccattttgccggagcgtggtgaaaatgtccgtgagcagcgcggccagcgagcccgtggcaagcttggattccagcgaggcgagcaccttttccagcaattcctgttcgatctgttccagcaaatccgcagggctggcataatgggcgtaaaatgtgccgcggttcacgtcggcccgctcgcacagttccttcaccgtgatgcggctcacgtccttttcccgcatcaattccagcaagctgccgcgcagcgcgagcagcgtgtatttcaccctccggtccggcacgcgcgccctctcctctcgctttcaaaaattcacactttggccatacgataaccgacagattccccctgttgtgtacgctttccaacacacgcgtgcaatctgctggttgcgcttcttttcgttctttattataatagaattggccaagaaaatcaacaccgtgtgcaatatttcgggaaggatttcccgcgaaatagcgcggcatccgcatcattctcttgccagaaagaaggaaagaaccatgaaggatttgtatctggtgacgggagccgccggccatttggggctgaccgtagtcgaagaattgcgaaaagaaggcaagaccgtgcgcgccctggtgctgcctggggataaggcggctggcaagctgcccgcgggcgtggaaatctgcgagggcgatgtgctcaagcccgcctcgctggacgcgtttttcgcccacggggacggcgagaatttgatcgtgatccactgcgcgggcgtggtgtccattgcctcgcgtttcatccaaaaggtctacgacgtgaacttcaagggcacgcagaacatcgtggaaatgtgcgaaacctacggcgcaaagaagctggtgtacgtcagttccgtacacgccatccccgaactgcccgccgggcaggtgatgacggagatcgacgacttccatcccgcggacgtggtggggcagtacgcgcaaaccaagtccgccgcttcggcctgcgtattggaagcggccaagcggggattgaacgcttccatcgtgcatccctccggcatttgcggccccaacgactgggggcgcggccacctcacccagcttgccatcgactattgtaagggccgcctgcccgcgggcatcgagggcggatacgattttgtggacgtgcgcgatgtggcccgcgccatcgtggcctgctgcgaaaaggggcagcgcggcgagtgctacatcctctccaaccgctatgtgaccgtgcgcgaaatgctggaactgttccacgaagccacgggcctgcgccgcgtgcgcctgtatgtgcccatcgggctggccaaggcgttcgcgccgctgtgcgaactgtattatcgcctggcgcgccgcacgccgctgtacacgtcctattcgctgaccacgctcaccggcaacgcgaatttctcccacgccaaggccgaccgcgctctgggctataccgtgcgcccgttccgcgaaaccgtggcggataccatcgcttggctgaaaaaggccaagcgcatctgaaaccggtggaacgctggcggcaaagcaagctataaccttctttccttccctttgtaatatcctccgtaaagattgggctttgtgggtagagatttatctccaattgcgatatactgttctcatcaaaacaaacggggaaattcccgtcacgaggaggaatcgcaatgcccaatcggattttgcacgaaagcatcaagtactgcccc

SEQ ID NO: 3207 - DNA, 6277 bp, Unknown
  16S sequences of unknown bacteria
agcagcgggttgttcttgctgcggcgcgacaggatctgctccacgcgctcggtctcgcgctcgcggccgatgaccgggtcgagctcgccgcgtgcggcgcgcctggtgagatcggtgccgaactcgtcgagcatcgagccttgctgcgggcgccccgcctgctgctgactgcccggattggcgaacggcacaggcgtgggggcgtcgttgatgagctcggcgacggtcgcgcggatctgctcgccatcgacgcccatattggtgagcgcctgcatggcgatgccgttgccctcgcgcacgatgccgagcagcaggtgctcggtggagatgtagttctggccgagctgcagcgtctcgcgcagcgcgccttcgagcacgcgctttgcccgcggggtgaaggggatgtggcctgcggcgaccggcatctcctggtcggtgatttccttgatttgggcgacggtctcttcgtacgtcacgtcgagccgcttgagcgcctgggcggcgatgccctcgccttcgcgaatcaaaccgagcagcaggtgctcggttccgacgtagggctgctcgagctctcgtgcctcttcttgggcgaggacgaggaccctgcgggccttgtcggtgaacttctcaaacatgtactcatgcctcctcaatactgagagagtctactgagctgtagtataggcttccttgcaaatgcccctgttacgagaaggtgacggctcacccacggagacgtgacgcacgcgcggcacggcgaacggccgctggccggcatggcgtgccgcgcggcccatggctgattccgggaaatgagaaacggccaccggtcgattggcgtgccatccggccaatggccgtttgtaatggcgcgaaatcgaccaatggccgtttgcgatggcgggcgccggaggtgccgccagatgcgttacagctcgatgtccgcttcggggcgcatgaacgggaacagcagcacgtcgcggatggaggcgttgtcggtgaggagcatgaccatgcggtcgatgccgatgccgatgccgcctgccgggggcatgccgtattcgagcgcgcggatgtagtccttgtcgtaatccatggcctcgtcgtcgccggcggccttttggcgcatctgctcggcgaagcgctcctgctggtcgacggggtcgttgagctcggagaacgcgttggcgtactcgtgcccgcagacgaacagctcgaagcgcgaggtgagctcggggttttcgggcttcttctttgcgagcgggctgatctcgagcgggtggtcggtgacgaaggtcggctcgacgatggtgtcctcgacgagcgcctcgaacagctcggagatgagcttgcccttgccccacgactcctgcacctcgacgccgtttttcttggcgagcgcacgcaggtcttcgagcgagcgctcgaacgagacgtcctcgcccgccttctcgctggtaagctcgatcatggtcgcgcggcggaacggcttggccctggtacgtgcacgtgtacgtgccgtttgcggcgagcgccgccgccttgaagatgccctcgcagaaatccatcatgccgtcgaggtcgctgaacgcgcagtatgcctcgagcgtcgtgaactcggggttgtgcgtgaggtccatgccctcgttgcggaagcagcggttgacttcgaacacgcgctcgaagccgcccacgagcaggcgcttgaggtacagctcgggtgcaatgcgcaggtagacttccatgtcgagcgcgttgaaatgcgaggtgaagggcttggccgtcgcaccgcccgcaagtgtgtgcaacatgggggtctcgacctcgagatagccgtcgtccatgcagtactggcgcacggccgagacgatcttggaacgcttgacgaacgtctctttgacgtcgtcgttcatgacgaggtcgacgtagcgctggcgatagcgcagctctttgtcggtcaggccgtggaacttctcgggaagcgggcgcagcgacttggagagaagcgtcacctcggttgccgcaacggagagctggccgcggcgcgtgcgcatgaccgcgcccgtgacgccgatccaatcgcccacgtcaagctccttgatgcgcgcgaaggcatcctcgccgacgttgttgatgcggatgaagagctggatgagcccggtggcgtccttgagacccatgaacacgatcttgccctggcggcgaatcgccatgacgcggcctgcgacggagacgacgtcctcggtcgtctcgccgtcttcgagctcggcgtagcgcttctcgaggtctgccgtgtggtcagtgtactcgaagcgtccgccataggggttttcgccagcgtcgatcagagcctggcgcttgttgcgacggacctcaatcgggtcgtcgatgacttcctggtcttgctctgccatgcctagtgaccaaccttggtgagcgtgaactccatatggcggccagtcgggccctcgtaggagatgaggtcgcccttcttgtggccgagcactgccgcgccgacaggagactcgttggaaatcttgccctcggcggcatcggcctcggcgccgccgacgatggtgaaggtgcgggcatggcctttggcgtcttcgagcgtcaccgtggaaccgatgacggccttgttgccgcgcttgggagactcgacgatcttcgcgttggccaggatctggttgatctctgcgatgcgctgctcgacaaacgcctgctcgttcttggcgtcgtcgtactcggagttctcggaaatatcgccgaactcgcgggcgatgcggatgcgctcgccgacctcatcgcgcttctcggtctcgaggtaatgcagctcctcttcgagctttgccttgccctcggtggtaagaacaagctcgttgctgttgtttgccatgcgtgcttctccattcgtttgcaaaacacacggcgcatgcgaaggtccgctccgcacacgccgcttttactcatctaattgggcaggattccctactcggccttcgtggctttctcctctggtgcctcaacagcatccgccacgacttcggcagccgcgggctcgctctttgcaggctcgctctttgccgccttagcctcgtctttctcgccgtccatgccatctcgcaggctcttgacagagcgtccgatcgccttgccgagcttgggaaggttcttggggccaaagattagcaacaccacaacgaggatgataataatctcgggcataccgagaggtccgatatgcatagcatctcctccagagattcaactgcgaactagtactgttgggacagcgctagcaagactaccatgcccgctgccaaaataaaagaaaggactcttggaaagagtcctttctacatgataaatggtcgggatgactggattcgaaccagcgacctctcactcccgaagcgagcgctctaccaagctgagccacatcccggtaacacgaagagagattctagcagattagaaccgcttcgcgtcgagaattttagaaacgcagcgcgcaggtccaccttccgccgctcgcgtacttgacgacatcgcccgtatgcggagcgtggatgtagttgttgccgcccgtggagatgccgacatggccgctgcggtacaggacgtcgcccggctgtgcggcgtcgacgctgatgcgtgccttcgcgcaggagtagagcgactcggtgtagtgcggcaggctgatgccgatttgggcgtaggcccacatgaccaggccggagcagtcgaagctgctcggacccgatgcgccccagacgtacgggcaaccgacgcgggacgccgcgtaatcgacgacgctgccgtgggtcgggatgctggaggccccgctgtagctggagctcgacgagctggacttgctggagctgttcgagctcgacttgctgctggaactggacttgctgctggaactcgacttgctggagtccgaggagctgttcgagctcgaggaaccgctggagctcgaattgtccgagccgctgttgctcgcgctgttggaggtgctggagctgtcgttggatgccgccggcgagtaggccttcgcggcctcttccgcagccttggcggctgcctcctgctcttcggcgagcagctgctggtactcggcgctcaggctgttgtagaggttgttgtactccgtctgcttggcctcgattgtggccttgtaggtcttggcctcgttcaccgcgttggcagccgcctgctgctggtcggcgagctctgccttggtgttctcaagctcggtgcgcgcgacctttgccgaggcgacgaggtctgcatcgtccttgttgagctcgttgagggtgtcccaggtcgtggcaaagtcgccgaacgtgcccgtgccgagcaagacgtccatgtacgacatcgcgcccgagcggtacatcgaggtcgcgcgggtctggatgtgcgtctgcagctcgtcgatcttcttctgctgctcgtcgatctttgcctggcactcctcgaccttcgccgttgcgttggcgtagtcgtcctgcgtgcggttgtactggtcgatcgccgtctcgaggtcgctgttgagggcgttgagctgcgctgcgacgctttgaacctcggacttcttctctgcggcggtcacggcaagggcctcggtcggctcgacgacgctcagcgcgccgagcgcgagcgcggaaccgagaaatgccctgcggttgatcttcatggtcatacgaatgtctcccaaagtacgtagatagcttgtgtcgggttcgtactgagtcccgaatactaccaccgaatcgatgctggagaacaaacctccacaacacgtggcaagaatttcatatctgtgccgcgaataaaacatggacagcacacaagtgctgcccatgtagcctttgacctgcagttatctgaaattaccgcgcgcttaacccacgcggacgatctttccgcgcactgccgagatgcggatgaccgcgccggtgtgcggggcctcgatcatctggccgttgccaatgtagaggccgcagtgatggttgctgcacgccacgacgtcgccgggctgcgggttgctgacagcgggcatcgcccagaagtcggacgcgacccacctgcgcttgtgcgagcccgtcagagcgtatccgacaagaccggagcaatcgtagccgttcgggccgacgccaccccacacgtagggcagcccgagcgtggagcgggcgcgcgagacggcgtctcccccgccggagcttgccggggcacttgcagcctgcgatttggagctgctcgagcttgctttggagctagaagagctggaggaactgctcgagctcgtcgacttggtggtggccgccggcgtgtatgccgcggctgccgccgcctgggcgcgggctgccgcctcctgctcctgcgcgagcagcgtcttgtactcggagctcaggctgtcgtagaggttgttgtactcggcctgcttggactcgatctgctgcttgtaggacgccgcggatgcgagcgcgtcttcggcattggtcttctgctcgtcgagctctgcctttgcctgctcgagctccgccttggtttgcttggtcgtctcgaccaggttggcatcgtcggcattcaggtggttgagcgtgtcccaggtagtcgcgaactcgtcgaagctgcccgaaccgagcacgacttccatgtaggacatggagccagaacggtacatcgccttcgcgcgcgtctcgatgcgagtctgcagcccgtcgatcttcttttgggtctcgtctatcttggcctgtgcctcgtcgaccttctgcgtcgcgttctcgtagtcgatctgcgcggagttgtagctctcaacggcgccctcgagctcgtcgttgagcgtgctgatcttgctttggaccgactggacctccgccttcttttcggcggcggtcacggcttgcgccgacggcgcgatgcccaaagtggagacggcaacggcgagtgcggcggcactggcgacgatgcgcctgacggcagggccaaaactgatttttgaaagcatctgcgatcccccatgtggtgtgttgagagtgtgggtgggttttcgtttgggggacaatggtagcatccccgcgcgcgttcgtctaaggctttctcaaaagcgccatatcctacagcgcccacgggatccccatagatcaaaaaaagaaggccccgaaacgggaccttctcgaaagcaagcgcttgttgcgtgccgtgctacgggcggacgatcttgccgcggacggcagagacggtgacgaccgcgccggtgtgcggggcc

SEQ ID NO: 3208 - DNA, 27047 bp, Unknown
  16S sequences of unknown bacteria
aataataattccaaagctgctaacttagttgcaatacagaatacattcatagcttcctgaagttcctgaacagatgggaaagaaggagcaatacggatattgcagtctttcggatcttttccatatggataagtagcgcctgcatctgtcaaagtgacacctgcttctttgcaaagcgctaccacacgttttgcacaaccttccattacatctacactgataaaatatccgccgtgaggagtggtccaagatgcaacaccaacaggagccaattgcttttgcatggtctccaaaacgatgttgaatttgggctgcaataattccttatgttgattcataatagtctcaacgccattcatgtcttttaaaaaacgtaagtgacgtaattggtttactttatcaggtccaatggtttggaaagaaagacgtttgcgaatattggcaagtgtatttttgcttcctgccatagctgcgacaccggcgccgggaaacgtaattttggacgtagaagcaaatataataggtaaatcttcatttccttgctttttacattcgtccattaggtttaacaattggtcaggagtatctgtaatgttgtgtacgcaatatgcattgtcccaaaaaattttaaaatcttttgcagctggtttcagtgctgcaaagcggcgtactgtttcgtcagaatacgtaatgccttgaggattggaatatttgggaacgcaccagattccttttatgctggcatctgtattgaccaattgttctaccatatccatatctggtccgtgttctgtcattggtacaacgatcatttcaatgccaaagaatgccgtaacaccaaaatgacggtcatacccgggacaaggacaaagaaattttacagttccttgttctgcccaaggtttacagcttccaaatccactgtacatggccgagttaacggtatcaaacatcatatttaaactggagtttccgcctacaatcacatcatttgcatctacacctaataaattgccaaaaaattggcgcatttcaggcaatccgtctacaacaccgtaattgcggcagtcatcgcctgcttctgcgttgtaatcagatgtggaattcaaaatatccatcatcggcatggaaagatccaattgttccggaccgggtttgcctctggacatatttaaatttaatccctgcgctttgtatgcatcatatcttgcttgtaaatcggctttttctttttcaagcgcttctttagacatagaatcataatattcagtgttcatttgcgtatctcctctaaccaaaattgcataaatgtcttaaaaccttacttattctacactcattttataaaaaatgcaagttaattttaataatcttgcattttgctcaaatcgtgaatctttgtgtaaacttttctgtaggtttcttccagtgattctcctaatatgcgagcagctttggccgcactctcatattctacataatatttcttaatatgatgataggtgcatattttacaatcaatggtttgagaaccaatttgtatcggctttatttctcttgacataatgttacgttttgcaaaggttttacgcaatccaatggctgttgtttcttggaaaatggtttctgttatgatttgttccagctccggttggcatagtacggttaattcataggcaggacgattcttcttcatataaatcggagtaaaatatacatcggcagcgccaagttctaatagacgtgtgtggcaataagccagttgttccggagtgctgtcatcaatagcgctttttaaaatacagatttcatctccatgtgtgtctgtgatttcagaaatcagcatagcacgcactacattcggatgagcaaactcttttttgcctgcgccaacgcctattttatcaatggtgaattttggaggcagtgtaaatgtatttgccaatgctgcaacaatggctgcaccggttggagtaatcatttcacctttattttccgtgattctcattggtatggaagccgactgtaccaaacgcaatgtgcatggggtaggtaccgctgtcaatccatggtgacattttgtaaatccgctgccttcatataaaggggagaagatgatatggtcaatatgtaaaaaatcaagacaaacagcgacggtaatgatatcgagaatggaatcatcgcttcctacttcctgaaagtggacttgatgtgcaggcattccatgaacaaaaccttctgcctgcgccagtacatgaaatatttttttcgctgtttctttggctttgtctgaaatttcagatgcgtcaatgatatgttcaatttcagcaagacaacggcctgaatggtcgtgataagtatgggaatgtgcatgctcgtgttcatgagaatgctcacaggtggaatgatttgtgtgaatatcaaacgcgactgcggagattccttgtttgtctgttttgctgatgtcaatttcaaactgctccaacggtacggtgtgaagctggttgagcaaaaattcccggtcaacgcccaggtctatcaaagctccggctgccatatcgccgctgataccggaataacattcaaaatataatgtattcatggaaacttcctttcttttttatcaacatatttgataaaaaggatgctttctcaaaccgtggtcaaagcatccttttgtatgtcattctgttatatttgattctgagccgcatttacaattaagcgattgatttgtgccgccatataaccgccgccaaacccgttgtctatgttgacggttgccatacctgtggcacaagaattaatcatggtcagcaaagcggaaattccttgcagatttgcaccgtaaccgatgctggtaggtacggcaatgacaggtttgtctatttgtcctgccaatacagatgccaatgcgccttccattcccgctactgcaaccactgcattggatttgcgaatatcaggcaaagcgtcaatcaaacggtggatgccggaaacaccgatatcataaatgcgatttacattcgccccgcataattcggcagtgacagcagcttcttctgctacagggatatccgaagttcctcccgtacaaatcgttaccaatccatgttgttttggtttattttcatatgcgtataatatgcgagccgtatcatgatactgtgcgtggggaatcataggaagaatcgcatttgcttgttcttttgtcactcgtgtggccaaagcaatttggttgcgttcatacaatgtattgaaaatatcacggaattgtgcaaccgtttttccttgtgcaaaaataacttccggaaatcctgttcgtaattgtctgtgataatccagtttggcatattccatattatgataaggcaaatcttttaactgttccatagcttgttccacagaaagttcatgattttggacagcctgtaataattctttcgttaacattggttacctctttgtttttgataaggttcatccatactgcctgaacggaacccttccatatctaacgtaatataatcaaagccaatttgttttaggagaagaatcaaatctgacttttgataaaatgtgaaaaattgttctgagggaatctcaatacgtgcaatggtatcatgcatacggacacgattcacaggaaatccgttctcacatagcagttgttccgctttttgaattttctcaagtttttctttggtaatcagcgtatgataaggaagccgtgtagccaggcaaggggaagaaggagtatctgatgaagaaagcccaaaatcagctgccatttgccgtacttcctgttttgaaatatgacagtcggccaaaggactgataatctctaactctcgcaaagcgcggatgccgggacgatgctggtgtaaatcatccagattggttccatccatgcatgtggagtaaccatgctgaactgcccaatcctttaaaatggaaaagagcatatgcttacattgataacagcggtccaatggatttttcataatattgggattggtaaattcatcaagctcaatgacgtaaaaaggaacgccgatttcctgcgctatgttttctgctgtattttgattccctacagggtgcaatgtggtttgaaaatagacagcagccaccttaggtactgtctgtgcagcaacctttagcacaagactgctgtccactcctccggaaaaagcgacgcagatgccatttggggcatagttggataaatacgtttgcaattgttctagttttgtttgcatagggttctctcttatttctattttgtatggattaaaattctgcatttcctgttgttcttggaaaaggcaagacatcacgaatattggaaataccggttaaatacattaccatgcgctcaaatcccagtccgaatccggcatgttttgttccgccaaagcggcgtaaatccaaataccaccagtagtcttcttcctttagacctgcttcctgcatacgtgtccgtaaaaggtccagacgctcttcacgttgactgcctccaattatttctccaattccgggcaccaataaatccatggcggcaacagttttaccatcgtcgttcaaacgcatataaaacgctttgatttcttttggatagtctgttacaaatacaggctttttaaaaatttgttctgttaagtaccgttcatgttctgtttgcaaatcaataccccaggcaacaggatattcaaattcagctccgcaattttgcagttgttcaatggcattggtatatgaaatacaagcaaattctgacgttacaatgtggtttaatcgttccaatagccctttatccacaaattgattgaaaaatgcaaggtcatctggacaagtttccatgacaaaagatatgataaatttaattaagtcctgtgcgagcagcatgacatcctgcaaatccgcaaaagcaatttcaggttcaatcatccaaaattctgcggcatgacgctgtgtattggaatgctcggcacggaaagtaggaccaaatgtatagatattgccaaacgccattgccatacactcgccttccaactggcccgataccgtcaatgatgttggtttttggaaaaagtcttgtgtatagtcgatgtttccctgttcggttttgggaggttgctctaattctaatgttgtaacacggaacatttcgcctgctccttcacaatcgcttcccgtaataatgggggtatgagcatataaaaatccacgtgtttgaaaaaattgatgaattgcaaaggaggcggcagaacgaacgcggaacgcagcgctataggtattggtacgcggacgcaaatgggcaatggtacgcaaatattctaaggaatgacgctttttttgaagcggatattccggtgaagaagcgccctccacatgaatctgttttgcgtgcagctcaaatggttgttttgcatcgggggttaaaacaaatgtgcctgttacgcaaagcgcggtaccaacgttttgtttggcaatttctttatagttggaaagaattgtttcttcaaatacaacttggacacctttaaaacaactgccatcatttaaatcgataaatcccagtgatttggaatctcgcaaactgcgtacccaaccgcatacggttatatcaatatctttataattatttggtgtttgatagagttgtgcaatggttgttcgtttcaaacaaaagtcctcctttttctatttgccatgtataattttatagatgatattataacataaaagaaattgtgaaacaatttctaacctataaatgttaaaacgttcttgccaacagccaaaactttagttttgttgtcgttgccaggttgttatagcatagaaagttcttgtcaatcaccaaaattctgaatatggaaagatgttcctttctatgttcatattgctacttgtctcgaggatgttatgacataaggtggataggtgcaagtatattacaaatattttattattctcaaaaaaatttaaaaataaaccttgcttttttatcaaacatagtgtatactatcaaaggtgttcagctaagagcacttacaactgcatatggagaggtattctaatggtaaggagccacattggaaatgtggtgtgccgcaaggcattgtgcgttcgagtcgcatcctctccgccagcgtgagtccgaatacaatttgtattcggactctttgtatttaatctgataattatgctgaaataaaaaatgtttatactatataacagcaatgggaacaagtgtaacttgttctttttttcattttgtgataatgagtaagtaaaatgtacgatgacttatatttttatttatggttatgtcaaaagaattcgcttgtaacacttttatgttgactgacaatggtttctgttttttcgagagataaaatttttataaaaacgttgtatcatttttcatatttctttgcaatattccttattcttgtttcatttcacattttatggtataattaactcaataatagaaaagagaaatggaacagaataggaagtgattgtgtgtctgcggatttgcattgtcacacaaaaatgtcagatggttccgttacgatagaagagctggtgattctcgcaaaaaataagggaatcaccacaatttctgtaacggaccatgatacgtttgcaggctcaacacgagcaaaagtatttgccaaaagacatggtgtaacggtgataccgggaatagagatttctgcatttgattatgaccgtaatcaaaaagtgcatgtcttatgctatcattgcagttatccggaccgtttggaaggtctttgcaaaaagattggtgacagccgaaagaaagctgcaagtattatggtacagaaagtaatgcatttgtatcctgtaggagcagagattttattgcgtcattcccatggaagcaccaatatttttaaacagcatattatgcatggattaatggatgccggttataccaacgaactatatggtgcggtttatcacaaattgtttacgccgcgaattggtttggcttattccaaaatagaatatccggatgtacatcacgtgctaaacgaagtaaaacaggcaggaggtattgctgtaatagcgcatcccggtcaattgaaagatatttcgctgttggagcagttagcggacagaaaagaaatagacggtatagaagtgtggcatccaagcaatgaagagtctttgatagcacaattaatgatattagcccagacgcatcacttgcttatgacaggcggtacggattttcacggaatgtactcaaaagtatccagaaccatcggctcttacataacacctcaggagcaggtacgcgcattggaaaaatggaagcaaaaacataaaaattagtgttacggaggaaatgtatggagtatcgttataaaacaaagggagtttgctcctcacagattattttggatatagagggagataccgtaaaatctgctatgtttataggagggtgtaacggtaatttaaaaggaatctgcgctttgatttcaggtatgaaaatagatgacatcattgaaaaatgtcaggggattacttgcggcagccgttccacttcctgtccggaccaattaacaaaagcgttgatagcagtaaaagaagaaattgctgctaaagtataaaaaggtcattgtcttttcagacaatgaccttttcttattccattgcatttaaaatggtttcataaagttcgggataacgttttttcatattgaaaggctttaatgctttatctgtccaaccgtgaagggtagagcctgtatttacaggcttttccaccccctttttgtatacggtatatccaaattgtatgcgtgaaggtgttaacgctaaaatacgtgtttctattgtaatttcatcttcatataaagtggcctggtggtatttgcaagtaagctcagacagaggtagtaaaatgcccatttcttccatcttgctgtatgaaattcctactttcttaatgaagtctgtacgtgccagctcataccaaaccgcatatacggaatgatgaattactcccatttggtctgtttctgcatatcgtgcggtgacaaaagattttgtaatcatgtaatagctccttctataatcgtatcgtgttttacatcatcgtttttaatatccaatccgtcaaactgcatattgtagtacttagtatacagtccgttttgtttcagcaattcttcatgagaaccgcgctctattatttgatgttggtcgattaccaaaatttcgtctgcatggcgaatggtgctcaaacgatgtgcaattacaattgtggtcctgtttttggcaagctgttccaaagatgcttgaataaatcgttcactttcattgtcgagcgcagacgtagcttcgtctaaaattaaaattttagggtcttttaaaaatacgcgagcaatggcaatgcgttgtttttgtcctcctgaaagtcttgttccgcgttcacctaccattgtatcatatccatcgtccaagctcataataaaatcgtgaatatttgcaagtttggctgcctgtataatttcttcttcgctggcgccgggttttccataagcgatgttatcacgaacggtaccccagaacatataaatatcctgctgaacaacgccaattgcttttcgcagcgatttttgcgtgacatctcgtatgtcagtgccgtcaatggaaatactgccttcacttacgtcgtagaaacgaggaagaagcgcgcatatcgtagactttccgcctcccgaaggaccgaccaaagcaatggtttttccggccggaatttcaaagtcgatgtcattcagtacattatgtacgccgtcataggagaaaaagacgtgttgatattgaattgtcccttttacatcattcaaatcaggagcatttggcttatcttcgatttcaatgggggtttccataatttccagaaaacgagaaaagcctgccatgcctttttggaatacttccataaagttgaccagaatggtgataggattgataaaaatattgatatataaagcgtataacgccaaatcaggtgcattcaatgtgccttgtgcaataaagataccgccgaataccaaaataacggtaaataaaatcccttggaaatataagttgccggattggaatcttccatatgcatggtaagaatgttttttagaagataaaaacgaaacgtttgctttttgaaatttttctttctctacagtttcattggcaaaagattttacaacccgaattcctgcaagagaatcttgcagctgcgcattaatattagcgatttttttgttattgtctgaaaatgcttttttcatacgtttgttttgaaatacactgaaaatgcacataataataacaactgcaaatagaatcaaagtcaaaggtacatgtaccatcatcagcagtacaaaggagccgatgagctttaaaaaggctaggaataaattttcaggtccgtgatgtgcaacttcagaaatatcaaataaatctgacaccatttttgtcatcatttcgcctgtattatttttatcataataagaaaatggaagacgctgcattttatcgaacaaatcgctgcgcatggcgctttccatcctggagcccataatatgtccccatgttgcaataaaatagtcgcagaacagtttgattaaatacatgacgattaatccgattgcaacgaatccgatggtatgtaaaataacggttgcgtccattgtaaataagcttttatttaatacattcagtatttgaggaaacgatatatctactagggaaacaatggttgcacatatcaagtcaaaaatcagcatggctttgtgcggtttgtaatagtgaagaaatttttttaatgttggcatgagacacctgctttctgttataaataaaaaagtggaatgttatccattccacttttcgcttacatcgccttcattaaaatgggcttcttactttttccggttccggataatctacgccgaatgtttcaacggtcactttttccataatttgattttccaaaggacggtcattgtaatcacgctgtgccgcaacaattttgtctaccgcttccataccttcaattacttgaccgaaggaggcatactgtgcattaagatgaggagcatcgtctaccataatgaaaaattgagagcctgcgctgtttggactttgtgagcgtgccatagaaagaacaccgcgtttgtgaagcagttcgttattaaagttattcataataaattcgcctttaatggaataaccggggccgcccatgcctgtaccttgagggtctccgccttgaatcatgaaacccggaatgactctgtgaaaaataagtccgtcgtaaaaaccgcgttttacaagagaaataaagttatttactgtgttaggtgcaacatcaggaaacagttctgctttgatggtaccttggtttgtttcaaatgtaacaataggattgctcataaaatcgattcctccaaatattttctaaaagattatggtaattataatacgaatacccaatttgttcaagtcacgttttgtctacttgttcatatcatgcaaaaataatgatgaaaaacttttgtcaaagaaattgtagcgatgtgatgataaaagtttttatctcggcagaaacatgcttttgcggagagaaaaacgtgttatgaggatatgaattggtatttgcagtaaaattttagttatttgtaagaatgagttaacaattgtatattaaaatatacaaaatagcaatctgacagcaatagcaaaataaatatggaaaggaacatctttccatattcaagatgttgattgttatgagaatgttttagcatttataggttagaaattgctttgcaatttttcttatgttataatacatccataattatgattggaggagatactcactatatgaaactgatttcatggaatgtaaatggattacgtgcctgtttgacaaagggattccctgagttttttgagcaggagcaagcagatatattttgtattcaagaaacaaagatgcaggaaggacaagcggaagttgaatttccgggctattatcaatattggaacagtgcagagaaaaaaggatattcaggaactgctgtatttaccaaacagcagccgataactgtcacatatgatattggtgaccctgcacacaaaggagaaggtcgagcaattacattggaatatgacccattctatttggtgaatgtttatacaccaaatgcacaaagaggattggcgcgtcttgattatcgcatggcttgggaagatgcgttcagagattatttaaaaacattagatcaaagaaaacctgttattttatgcggtgatttaaatgttgcacatcaggaaattgatttgaaaaatccaaaaaccaatgtaggaaatgcgggtttttccaatgaagaacgcagtaaatttacacagctgctggactcaggatttatcgactctttccgaacgttatacccaaatgaaacaggtgcgtatacatggtggtcatatatgtttaatgcacgtgcaaacaatgcgggatggcgtattgattattttgttttatcagaaaggatgcgtccttatttaaaagacagcatcatttatgctgacgtaatgggaagtgaccattgtcctgttggtcttttgttggacagcaaggaaaaggacttggtgaaataaattatgtatttgatagataaaggatgtgacaaaatggaactggaagactatcaattcacaaaacaggaattaaaatatttagagcttctttcagaaaaatatccaactgtgcagtcggtctgtactgagattattaacttaaaagcgattttaaatttgccaaaaggtacagagcattttatgagcgacgtacatggtgaatatgaagcgttttatcatatactgaacaactgttcaggtgtcatccatgaaaaagtaaatattatttttggtgacagattgagcgtggaagaacgtgcagagttatgcacattaatttactatccggaagaacgcttggagattgtacacgaaaccataaaagatttggaaagctggtacaaaattacgttgaaccagttaattgaaatttgcaaattggttgcgtcaaaatatactcgttcgaaagtaagaaaagcacttccaaaagaattcagctatattattgacgagctgcttcactccgtagaaggggacatcaatcaagaagcgtatcacagcaatatcatggataccattatcagtattcataacgcagatgaatttattattgcattggctaccttaatcaaacgtctggcagttgaccatttacacattgttggtgatattttcgaccgcggtccccgcgccgacagcattatggacatgctgatgcagcaccacgcagtagatattcagtggggtaatcatgacattttatggatgggcgcttccacaggacatgcggcatgcgtggcaaccgttgtaaaaacaagtgtatctcacaaacgcttggataccttggaaggcggttatggtatcagtctgcgtcctcttactttatttgctacacaaacttataaaaattgtgaaactactcatgaagctatgcacagagcaattgcaatcattctgtttaaagtagaagcgcaagtcattagacgccatcctgaatatggaatggaagaacgtttgcttttgcataaaattgattatgaaaacaaatgtattaccattagcggcaatacttacgaacttactactgtagatttcccaaccattgacccggaacatccgtatgatttgacagaggaagagcaacatgttctggacggattggtcaacgcatttgtagaaagtgaccgtttgcatcgtcatatgaaatttttatatgcctgcggcagtatctataagtgctttaatcaaaatttattattccatgcatgtgtccctatgacaaaagagggagaatttgcagagtttgagtttgagggagtgccttataagggaaaggcgcttttggatttggcagaccagattactcgtaaagcatattttaccagcaaagaaagcgaaaaagagaagtacggagattttgtatggtacctatggtgcggaaaaacctctcctttgtttggcaaagccagaatgactacttttgaacgtatgtttatagtggataaatccagctggacagaagaaaaagattcgtattacacattctgtgagtcggaggacacctgcaatcgtattctgcgtgaatttaatttggcacaaggcttttcccatattataaatggacatgttcctgtaaaagctatgaagggagaaagccctatcaaagcaaacggtaaattaattgtcattgacggtggattctgtaaagcataccaaaaaaccacaggtattgccggctatacgctaatttataactcccgtggaatgcgcattgtatctcatacgccgttcagaggcattaaagaggcaattgaaaaacatgtggatattgaatccagttccgaattttttgaaacaaacggcacacgtgtgttgattttggatacggatataggggaagatatcagtaatacaatttatgacttgtctctcttactaacagcatataaaaaaggtttattggtacctgatgacgaataataaagaaagacacgtccctgttttatcagagcgtgtcttttttgcgttcaaggaacagtgttgcaaattggcagtaaaattgtgacaatacttttttagatttcattttacattttgtcacccgtacgtattgttaacgaaattacacaaaagattcatgaaaaccgttttttcttcttttgaaaaagataagcattttacgttaatacaggttcaaacctgcactaaaagctgcagccgatgtttcatgatttaacggcagtggaataaaaaacagtaaaaaatagaaaccaaaagctgtcttgttccattatttagcttttgactgttgtaagaatattcgtaatgttgtaaccgaagattgttttgtaattatcttgattctgcaatcacctaagaataacaaaataaatattggaaggaggatttcaatgttcaaaactttggctgttggctagaacgttttaacgcttcaaagttagaaattgctttgcaatttctcttatgttataacaacctggcaacagctgcaaaatcacagattttgattgtgggctggaacattttagcgcttatcggttaaaaattgcaaagcaatttcttttatgttataatatccattaattgtcgaaatggacttatttcagtaaaaaggggaatgattcatggctcttgtaactttattggctcatacacctcaaccggaactgcatgttgcagcagcagcaaagttatgttattcgccttcttctattgataaaatcaaagaaggattaactgaggaaaaagtggcttcctttgttgacatgctttcggaaatcggtcatgaaagtcccattgagcatgctacgtttacatttggaattgaaggtgtatcccgcgctttgctggcacaaattacgcgtcaccgtattgcttctttcagtgtgcaaagtcagcgttatgttgcggaaaacgcatttgaatatgtcttaccaccgcagattgccgcgatacccgaggcaaaagaagaatttatacgggcgatggaagaagaccagcgtcattatgaaaacttaacgaatattttaacggcaaaacacaaaaaagcattgcttgaaaaaggaaaagatgaaaaaacagcagctcgaatggcgcagaaacaagcgatagaagatgctcgttttgtgttgcccaatgcttgtgataccaaaatgattgttacctttaatgcacgctcattaatgaacttttttacactgcgctgctgcaggcgcgcacaatgggaaattcaggatgttgcaattcaaatgctgcgcttggtcaaacaggcagcgccacatttgtttgccaaagcaggtcctaattgtgtgagaggcgcttgttcggaaggaaaaatgacttgcggagaaatcaaagaagtacgtgcgtttttccgtaatcttggagaggaaaccgtatgaagcatccgtttattgtaattgaagggttagacggaagcggcaaagcaacacaaacaaatcagctgtgcaaagctttgaaacaaaagcaaataaaatatcgtcaccttacgtttcctgactatgagcaggattcttccgctttaatcaaattgtatttaagcggcgcttttggaacagagcctaacagtgtcaacgcctatgctgcggcatctttttatgcggtagaccgttatgccagttttcaaagattttggaagcaggattatttggacggtacgtgtttggtagcagaccgctatgccacttctaatttcatttatcaactgacaaaactgccaaaagaagaatgggagcattttattcattgggcggaggattatgaatatcataaattggaattaccaaggcctgatgttgtaatttatttggatgttccgccggagatttcccaggctttgcttagcacacgttaccaaggtgatgagacaaaaaaagatattcatgaaagaaatatgaattttttaatgcaatgccgtgaagctgcattgtatagtgctgaaaaattaggttggaatgtcatttcctgcgctgataacggaacaatgaaatccattgaagcgattcataaagaaattatggataaacttacaatataaaaccatagaagaggaatctaaaaacgatggtctatgtatttttagcaaatggttttgaagaaatggaagcaatcgcacccattgacctgctgagaagagcagagttaaaagtagtaacggttgcggtcgggacagatactaccatggtcacgggtgcccatggcatacgtattcatgccgacattacagaacagcaggtagactgcactggcatagaaatggctgttctgccaggaggtatgccgggaaccttgcatttagagcagtctgctgttgtacaaactgttttaaagcactgtaaacaacaagatatcccgataggagctatttgtgctgcgccgtctattttaggtcatatgggattactccgtggcatcacggctacctgttttgaaggatttgaaacacagttgacaggtgcaaactattctccgcagcatgtatgctgtgaccaaaatgtcattactgccagaggtgccggtgtttctgttgagtttgccttgaaattagtagaggtgttatgcggtgcgtctaaagccaatttattgaggaagtcgatacaatgtatgtgaaaaatccaaaagaaaatatcaaagaactgaaaaagaatttacggctgaaataccgaaatatcagagagacgatgccgcctgcaaaaaaaggaaagatggacgctcgtattcgcaggcatttatttgatttaccggaatatcatgaagaaagcactgtttttgtatatatcagtaaatccatagaagtggatacgttttcgattgtaaaaagagccttggctgacggaaagttagttgcttctccaagatgtgtaccgggtacgtttgaaatggaattctattatattcgttctttggatgatttggaaaagggaacttttggcgttttggaaccaaaacacaaacaatgcaagttggttacggatttatcacatggcttttgtattgtaccgggactatgctttgatgcaaagggataccgtttgggttacggtaaaggttattatgaccgatttttatccgaatttaagggcgtaacagtgggcatttgttatacaagctgtgtgcagtatggattgccccatggatattttgaccgtccggtagatattctggtaaccgaaaattacattcgcagaactgagaaaaaacagtaaaggaggaatattatgcgtgatgaacaacatccaaatcaagatgaagctaacattcctgaccaaaataaacagactgattctttggaagaaagtctaagagagtatcaagaaagaaaacgtcaggagtttcagcttaatatttcaggtttagatgatattggtgatgagtctcctgagatatattctaaaaaatcagaatatgatgtagagcctcatatggcggaagagattgaaagtcacagccataatactcctaaaaaggaatctcaagcatcacaacagaatctaaaggctcagaccatgacaaaagagcagaaaaagaaaatgaaaaaacgcgacagaaaaaataaacgtatttttttctggatgtggattgtcatgattttagtcgttagctttagtattgcccgctttgcaatggtaaatattaacgatatgcttgctgttggcagagatgattccgttgttcaaattcaaataccaaaaaatgctacaggtgagcaagtgggtgaactgttagcgaaaagcggtattatctctaaaccaagcttttttgctttatactccaaaataacaaaatcagagggtcattaccaatacggtacgtatgaaatcaaaaagaatatggactatgaagcgattatcaatcatattcagtccaatgccaaccgtttggataatgaaacaactcaggtgaccattacagagggtatgagcgtacatcaaattgctcagttattggaagaaaaaaatatttgtacagtggatgaagttctggaagctgcaaatgattctgattattttgatatttattctgctattaactcaattacaaatgataaagatcgctattatctgctggaaggatatctgttcccggatacttatgatttctataccggtgaaaatccaacagatgccttgagcaaattactgaataactataaagataaaattacccaagagatgaaagataaagctgcatctatgaatatgacaatggatcaagtgattacattggcttctatgattcaagcagaagctgcaaatgtggatgatatgtacatgatttcttctatcttccacaatcgtttgagagatggtgcggaaaaaggtgttgctactttagactctgacccaaccgtttggtatccataccactcaagagaagaagttcctgcggatcaagtggacagctttaagagccgatacaacacatatgacgtgcaaggattaccgccgggaccaatttgtaaccccggtttggatgcaatcaatgcagcgttaaatccaaaaacaacagattattactatttctgtcataaagatggtcaagcttattattctaaaactttagaagagcaccagcagaaattacaagaacttggtctttcataataaaggagaatcatattggcttacgagagaagaaaaacaaaggtagaattgctttctcccgcaggtgacatggagtgcctgaacatggctttaacgtatggtgcagacgccatatatttagccggacaggaatttggcatgaggactgcttcagctaatttttccaatgaacaattggcaaaagcagtacaaaaagctcataagaaaaatgttcctgtatttttaacatgcaatacattgcctcggaatgatgaactggacagactgcctgcttttttggaggctgcccaagctgccggtgtagacgccatcattgttgccgatttgggagtcatgaatttggtaaaacaatatgcgccgaaagtggagattcatatttctacgcaggccggtattgtgaactatgcaatggcaaatgctttatacgatatgggagcaaaacgcattgtgctggccagagaattatcattggatgatattgcacagattcgggcaaaaatacctgcggatttagaaatagaaacatttgtacacggtgctatgtgcatgtccttttcaggccgttgcttattgtccgcttatctgaataatcgtgatgctaacagaggagattgttctcagccttgccgctgggaatatgcgctggtagagaaaaaacgtcccaatgaatatatggatattacggaagataaacacggttcctatatttttaattctcgtgatatgtgtatgattgaacacattcctgaattggtgaaagcgggcgtatccagtattaaaattgaaggccgggcaaaatcagcttattacgttgctgttacgaccaatgcgtaccgccatgcaattgacgcatatttggaacatccgaatcagccgctttccccttggattgtggaggaattggataaaatcagtcaccgtgaatacagcaccggcttctactttggtcatgaaccggggcaggtatatcatacgggtggttatgtgcgccattatgatgtgattgcaatttgtgaaagctgggaaaatgggattttgaaattatcacagagaaatcgctttttccgcggtgatgtagcagacgttttagaacccggagagcagccttttgatatttgtttagatgagatttacgatgaaaaaatgaatccgattgaatctgctccccatgcaaccatgactgtgtttgcaaaatgcgaacgtcccgtaaaaccgggggcgattctgagaaaagcccgactgaattaatcacaaactgctgagattactttacacatcatgttcagtaatttcggtagtttttttatgcaaaagatagattgtttaggagattaagaaaaactaatttttaaaacaagagaagttacattgacttttatgagtgtgcgttatattattataaacaagatatttgtatggtatagtagagggaatatgatattattgcagtgatagaaaaagaaatatctattttacgaaataggatagtatttgtaacgtatatggaatgtgtacgaaaaaatttaatccggttgtagaaatactgtcaagatattttcatccatctatgtgaaaatattagtgattttagtggtttataattatgctagaaaagaggaagagaaatgaaaacaagaaaaatcattggtggagtattaggttgccttatgctatgcggtctattggtgggctgctccggtagtaacaattctagttccaattcaaactataaaaaaggtactgttacagaaagtaaatttaccagtgaatggatgggtattcaatatacattgccaaatgatatgacaatgctttcagaagaaaccattgcttctggttctaaagataatattcaagtagaaatgcaagcatatctaacagatgctccctcgacaaaaaatattggaatgctggcagaagacatatccaaggatacctctatggatgagaataaatatattgaactgacaaaaactcaaatggaaaaggcaataccgggtatcacatttagtgaacaaggaaagcgtaccattgcaggacaagaattttacgagttgccatatagctatacaaaagatgtcgatggaactcaaacaacaattacgcaaacctttttatgcaaaaagatagaagatagaatggtttgtattacgctaacatatcctgaccaagaaacaatagaccatttgttatcaggcttttctgaattaaatgcgacaaattctcagtgatagataaaagagcagctgtttacaggctgctcttttattttttcaaaaggaatcatttctgtatttcactgtaaaaaagaggaagttacattgactttttggataccttatattataataaacaagatattgacagcgtatagaaacaaaagtcataggtaatgttacaacagagagggagccaaagttcaaatgatgaattttgctgaaaggcgaccgtaaccagcttactatgacaagccggtttcttgccttttggcagcgctctgcagtgacgagccgcagcgttttccgcgttaaggaattgaaagtggcgtttaaaaagcgcaatttgggtggtaccacggacttttccgtcccatgtttatgggggaagtccgtttttttatgccaaaattttgataaaccatattttgctcagaagaagagagaggttatttgtatggaatggacaggtttaaatgagttaagagaacgctttttgtcctattttgaatccaaaggacatctgcgtttgccgagtttttcgttagtcccaaaagatgacaacagtttactgctgattaactccggcatggcgcctatgaaaaaatattttacaggagaagtaacgcctccttccaaacgtgtgactacatgtcaaaagtgtattcgtacacctgatattgaacgtgtaggtatcactgcacgtcacggtactttttttgaaatgcttggcaatttttcatttggcgattactttaaacacgaaattacaaaatgggcttgggactttgtaattaacgatttaaaattgccggaagaccgtgtatgggttaccatttatcaagacgatgacgaaacatttgatatctggaccaaagaggttggcgtatctgcagaccatattgtacgtctggggaaagaagataacttttgggaacatggcgcaggtccgtgcggcccttgttccgaattatattttgaccgcggtgaacaatacagctgcggttctccaacttgcggtgttggctgcgaatgcgaccgttatgtagaattttggaacttagtatttacacaatttgaaaatgacggaaacggaaattatacaccactcgagcaccctaatattgatacaggtatgggactggaacgtttggcctgtattatgcaggaggtggacaatctgttcctcgtagatactgtacagaatattatgaagcatgtaagtaaaattgcaggcgttcaatatggagacagcgagaaaacagatatttccttgcgcgtgattacagaccacattcgaagcactacgtttatgattggtgacggtgttatgccctccaatgaaggtcgcggttatgtactgcgccgtttacttcgtcgtgctgcacgtcatggacgcttattgggaatacaggatactttccttgccaaagtggctgaaacagtaattgatgaaaacaagcaggcttatcccgagttagatgaaaaacgcgctatgattacaaagttgattcgcgtagaagaagaaagctttgcaaaaaccatagaccaaggattgcaaattttagaaaaattgattgaccatgcagaaaataacttgttatcaggtgaagacgcgttccgtttaaatgacacctatggattcccaattgacttaaccaaagaaatattggcagagcgcggtatggcggtagcagaagatattttttatcgtctgatgaaagaacaaaaagaacgtgcccgtgctgccagaaaaaatgcaggtgcagatgcatgggcaggtgaagaagacattcttgaggatttgcctgagacagcttttgtcggttatcaaacattagaaacaacagcaaaagtgttggcaattgtaaaaaacggagaacgtgtttcttctgcgaaagaaggagacagtgtcattgtcatattgaatcaaactccgttttatgcagaaggcggaggacaggtcggcgacacaggtattttgaaaaacagcggcgctttggtaaatgtgacggataccacaaaaaatcagtctaaattgttccttcaccatgcttttgtcgcaaagggcgagctgattgtggatgaaactgtaaccgcaatcgttcattccatgctgcgccgtgatattatgtgtaaccatactgccgcgcatttgctgcaggctgcactgcgtaatgttttgggtgaccatgtggaacaagcgggacaaatggttaatgataaagaagttagattcgactttactcatttttccgcattaacaccggaagaaatcacgaaggtagaacaagaagtgaatctgattatcagacgcgcaattgatgtagaatgccgagagatgcccattgaagaagcgaaaaagttgggagcaatggcattgtttggtgaaaagtacggagatattgtgcgtgttgtatctgttggtgattattccaaagaattctgcggtggtacacatgtggataatacttctaaaatcggcatgtttaaaatcgtatcagaaagctctgtagcagccggtgtacgccgcattgaagcggtaacgggacaaggcgttatgaatctgcttaacaattctcttgcgtccatacagcaggctgcagatgtgctgaaattgaataatccacatgatttggtgaaaaaatccgagcaaattatggctgaaatcaaggacaaagacagaatcattgagtcactgcagtcaaaattggcttctatccaagtagacggtatgtttgaaaatgcaaaagagattaatggtgtgaccgtaattactgccctattttccggcacaagcagcacaggactgcgcaatatgtgcgataaagtaaaagagcacaaatctgatatcgtagctgtctttgcaggtactgataacgggaaggcaaccattgcggcagttgtaggtaaagaagcaatggaaaaaggagcgcatgcaggcaaaattgtaaagcaagtggcacaaattgcaggcggaaacggcggaggcaagccggatagtgctatggcaggtgcaaagaatttaaacatgctggatgaagcgttggccgcagtagaaaaaatagtatctgaaatggtaaaggaataaaaatttgattggaggtaataaatatggactgcattttttgcaaaattgcaaatggggaaattccttgtaaaaaagtgtatgaagatgaaaatgtgatagcatttcacgatcttgacccacaagcgcctactcatgttttaattattccgaaaatgcatattggttctgcaatggaaatcaatgaggaaaatagtggaatcatcggacatatctacgaggttgcggcaaaaatatcaggtgacctcggtcttgaaaacggattccgtattgtaaataattgtggtgaagacggaggacaaacggttcatcatattcactttcatttacttggaggtcgttccatgaaatggcctccgggctgattgtttgtttttatgaaaaacatttggaaagaaaaaggagtcatcactatggaaacctatcgcattcaaattggtgattgcgtacgtcagcttccaatttgtccgattaatgaaaatttatccattgcaggctttgttatgctgggagatgtagaattaacagaggcttgcgcaaaagaattattgaaaatttgtccggaacacgacattattgtaactgctgagacaaagggaatcactttggcacatgaaatggctcgtattggctgtggagattacattgttgcacgaaaaggaatcaaagcctatatgcaaaatcccgtgtctgtagaagtaaaatctattactacagaagatgtgcagaaattatatttggcaaaagctgattacgataaattaaaagataagcgtgttctcattgtagacgatgttatcagtacaggagagtctttggcagcaattcagagactgctttcacaattttcggtgaatattgtaggcagtgctgctgtgttggcagaaggagatgccgctgaccgtgacgatattattttcgtacagaagttaccattgttttttcactcataagtgttccatataagcgctctaattcatcgctccgtgaatcatttgctttcatagcgacagaattggggggaattagaaatgtccagaccgtttgcactgattggttttgtttacttagccgtgcaagcggtctctatttattttggcagtggatttgcatttttggcctcaggctgcttttttcttttgttttttctatcactgtttgtaacaaaattacgcacgtccaaagtagttccaattgcttgtctggtaactgctgttgcactgagtgcatatgcagggtaccatgtttggaaaattgaacctttagcggaattggcggaaaaagatgcttctattacgggtacattatgcgaattgccttatgaaaataacgggaaattttattatacgctccgcatagatgagattgaaatagaaggtatggagcatccccacaatccgggaaaaattattatgactacacgcaatgcgctggatatagaaccgtatggctccatcagcggtaaagtgcatttgtatcaaagttttggctccgaagacggattttcggttcgtcagtacgattactccaaacgcattcatatgcgggcgtatttatatgaatatgaaggatattctgtttcaccgactgccgaaaagccgccgtattattatgcgttgtccattcgtaaaacaatgatgaactctttggaccgtttgcttccaaaagaagaagccggaattatgagggctgttttgcttggtgacaaaaccggtttgaccgatgaaatcaaatcagattttaatgctgccggtacctaccatttgttggtggtatccggtctgcatatgaccattgtgtttcaaggtctattaaaactcttaaagttttgtaaaatccctcataaactcagttgtgtcatcacggcgtttggcgttctcagttttatggcgattacaggttttagcccgtcggtactgagaagcggtattatgagtttgttgttcctggctgcgatgatatttcaccgtaaagccgattctctgaattcactgggcattgctgtatttctcttgtgtgttatcaatccgtacgctgctgcggattttggattcttgctgtccgttacttcagcactatcgttaattttactgtcaaagccaatacgtaagtttttcttagacagaaccaaaagggtcaaatatggaaaagctttcttatacagtatattttcttctgtctcgtcctctttggcagtcactgcaggtacactgcctcttgtaatcatcgcatttgtgacattttctgtgatttcatttatttcaaatcttcttatgatttttcctaccaccattatgctcccgattaccgcgctggcggctttgtttgaatctgttccgtcgctcagccttctggcaaaaccatttgcactggtgggagggttaattgcaaaatatttgatttttgtcgcacattggattgcaaagattccgttttctcttatttcctccgattatgaatttatcatgctttggcttgctatgactatgctgctgtttgcgtttgcaatcttcttggcgaaaagaaaaatcttgattcgtacggtgctgacattatcctcgattttgctgattgccggcatattttcttatcaactttccaaccattctacagcaagagtttctattttagatgtggatgatggtatttctgttgttgtgactgcgaaccatcaaacagcaattatcggctgcaacgcttacagtgactatactgcctatcaatatttaaaaggacatggcatacaccatattgactatttgcagccgctgtccgacgaaacaacggaatatcagaatttagccaaactcaatgaacagtttcaaacaaaaaatttaatattgccaaacggacaatattttgcgggagatttggaaaaatcacttgaagaagtggagaaaatttcgtattatgaaaagagtgccaaaacaattctcaatgatgatgtaacaattgaactgtattctgatgcaaaaggaagttatacggttttaatggtaaaagagatacgtatcttgattctttcttcagaatatgatttggctaatattgatttagatttaaacgacattgacatattaattaccgataccgttccacaacatgctgaatatttacaatcttttattacagtactttctatggaggaacaatccatggctgattcagtaaagaaaatggatatgggaaatgtacagctgtacgcaacggcagggagaggtaatgttcatattgatattgaaaatgacagaaatattacactaaggaggggttccggtggctgagtacacagagcaggagctgaaaaagagtatagaacaaggaaatttcagcaatgtgtattttttctatggtgaagaaaaaatgctgatggaatccgcagtaaaaaaattggttcat

SEQ ID NO: 3209 - DNA, 20364 bp, Unknown
  16S sequences of unknown bacteria
ggattgcaaaacgtatggtttttcaatttggtagacatttcgccggcaggcgctgcctccgctttccctccatctcttatcccccagttgttttcctttcccatttgggtagacatccggtagacatggtagacagaggctggaagaatctggataaacttactgcccgttttttctcgaaaacataaaatgctcttcgcgctgcagttcagagacattttctaaccatttcatacgaaccgatcattgttcagcggaagcgttgcctcaccttccattccttgcgcacgggaaatataaaactgcaccgaatccccgggcgacaacggcggcgcctcaaacgagcggaacgcattcagcgtttcaccgcaggccgcaatccgcagctcatacagtgcgccgcgaaacgatacttcctgcaccacacctgggttcaaaagttctttcttctgaccggatgcttccccacaggaaaagacatgcacaaactccggctgtaccaccgcatgccccacaggtgcatgcgcaaaaccggaaaacgcacggatattgctcactattgttccccggccgataaactgcgccacaaaaggcgttttgggattcatgcagatctccaccggagtgcccacctgttcgatgcgccccttattcgtgactacaatctcatcggctacttcgatggcttcctcctgatcgtgcgtcacaaaaatactggtgacgcccaaacgggaaatggtatggcgcagccaggcgcgcagatcttttcgcacctttgcatcaatggcggcaaaaggctcgtccagcagtagcaggcgcggactgggcgcaatggcgcgggcaaacgccacccgctgccgctgaccgccggagagctgattgggatagcgctttcccagcccctccagattggtcaggctgagcagctcctccacccgctgctgaatatactgtttgtcccgcttttggatctccagcccaaaggcgatgttgtcatagactgtcatatatttgaacagcgcataattctgaaacacgaatcctatgccgcgctggctgcccggcacatcgttgacaattcgtccatcaatgacaatgtctccggagtcctgatgctccagccctgcaatcatacgcagaatggtggtttttccgctgccggaaggccccaacagcgctaccagccgcccctcctcaattgccagatcaatgtgatccgccgccggataagcatcgtaggtttttacgacgtttttcagttccacatacatcagatgtcaccccgcttgtcacctttgtattcaatcacagcccgcaccaccagaatgataatggcaatcaccaccaagatcgaggacacagcaaaagccggcgcataactgtattcctgatacagggactcaatatacagcggcagagtcagcgtccgtccccgcaaacgccctgacagcaccgacaccgcgccgaattctcccagcgcacgagccgcacacagcactacaccgtacagcagcgcccatttaatatgagggaatgtaatgcggcggaaaatggtgcgcccgccggcgcccatcagggccgcagcctcttcttcatcggtaccccgagcctccaaaatgggaatgatctccctggaaatataaggaaaggtgacaaaaatcgtagccagcaaaatgccggggatggcgtaaaccacacgaacccccgcctccgtcagcagcggataaatcggactggaacgcccaaaggtcaaaataaaaatcaatcccgcaatcaccggagacactgacaatggcagatcgataaatgtattcaaaatacgacggccgaaaaagcggtagcgcgtcaggctccaggcagcgaacaggccaaaaatcgtattcaccgccaccgcgaccaataccgtgatcatcgtcagcaccaacgcctgcagcgcatacgtgtcggtaatggactccaggtatacgcccaaacccgcactgaacgcctgcaccagcacaaagaccagcggcaccaccaagaacagtgccaaaaacgctacggttacgccaatcagcaaccggggaatccattttttctgtttctgcatggcatttcccccttctttcagcgctcgcccgcacgcttggcggcgcggccctggatcagattcatcaggaacagcaccagaaacgcaatgatcaacatccccagcgcgatggctgtggccgaagtatagtcgtactcctgcaattccgacataatcagcagcggcgcaatttccgtttcgtagggcttattgcccgcaatgaacaccacgctgccgtattcgcccatactgcgggcaaaggccaggccgaatcccgtcagcatggcgggccggatctccgggaaaataatgcggcggaaaatcgtgaccggagaggcccccatgataaaagccgcttcctccatctgccgatccaccttctccagcaccggctggatggagcgcaccacaaagggtatgcctacaaagatcatggcaatgacgatacctgcacgggtataagccggagccgggatgccgatggacgcaagaaatccgccgatcaggcccgtattggctgtcagcgacgtgagcgccatgccggccaccaccgtcggcagagcgaagggcagttcaatcatgccgtccagcaggcgtttgcctggaaactggtaacgcaccagcacccaagccatgatcaagcccatcaccatattgatgagcgacgccagcagcgccgtttccagactcacggcaaaactcatcaggacgcgccgtcgggtgattgtagcaaaaaaatccatcaccgtcagatccgcactgctccagaaaatcgaggccagcgggatcagcacgatcaggctcagcatactcagcgtaacgccgatgctcaaaccaaaccccggaatcaccgaggtagccgtgttgaatttccgtgtgccgtccggcgcaacaaacggcgattttgaccatttctgcacatcctgcaacgtcgcttacccccttgcccgctcactcttcctcgggctccatattctcgtagatcatatcaaacacgccgccctcggcaaagaatttcgcctgggcctccgtccagcccccgaaatcttcgatggtgaccaattccacattcagatcaaaacggtcgccatacgcggccaggatttcaggattgctgggacggtaataatattccgccgccagacgctgagcctcgtcggaatagagatagttgatgtattccgtagccagcctgaccgtgccgttcacccgtgtcacctcatccaccaccgccaccgaaggctggcagaggatactcaccgagggcgtgaccagttcatattcgccgggatattcctccatggcgagatacccttcgttttcccaagtcagcagcacgtcgccttgtccgttttccacaaaagacgtggttgctccccgagcgccggaatccaagaccagcacattctgatacagcgcttcgatgtattccttcacccgcgcctcgctgccgccgtattcctgctgcgcccaggcccaagcggccaggaaattccaccgggcgccgccggaggttttgggatttggtgtgatcacgcccacatccgcgcgcaccagatcatcccagtcctcaacattcttgggattgcctttgcgcacgaggaaaacaattgtagaggtataaggggcggaatcgttggggaattcatcgatccagcctgcgtcgataagcccctcctcagcaatggcctgcacgtcagcctccagcgccagcgtcaccacgtccgccggcagcccctgggaaacggacagtgcctgggcgccgctgccgccatgggactggataatctccagatgtttacccgtctcctgccgccaatgctcagtaaacaaggcgttgtattcctcataaaactcccgggtcgggtcataagacacgttgatcagctccggctcgcccaacttggcgcagcctgtcagcagcgctgcgcttagcagcagcaccgcgcaagcgcctcttctttctctcactccccgtacccccacttcttttttcattgctttttccccagcgtctgctatactgaaagaaacgaacctgccgcggaaaacccgcgttgtttttcatcggcatcggaattctttatattatacctgtccggcactggaaaggcaagtccctgttgcgtcgggcacggaaggaggaacggagcaaatgtccatgaatcgcgtggcgttggtcaccggagctggccggagccggctgggatgtggctgtgaattaccgcaccagcgccgcaggcgcagaagaaattgcctcaaacattatcatcctgggccgccgggccattgccgtgcaggccgacgtcgccgatgcgcaggccgtacgcgctatggtggccgacgtggaagaccgtcttggcccggtgtcgctgctggtcaacaacgccggtctttcctggaccggcctgtttcaggacacggcgtatgacgcctggcgccgcctgttcaccgtgaacgtagacggagcgtatcactgcattcaggccgtacttccccggatgctccatgaaaaagagggaaacattatcaacgtcacttccatctgggggcttcacggcgcctcctgcgaggtggcctacgccgccaccaaggctgcgctggtggggctgaccaaatcactggctgccgagctggccccctccggtatccgggtcaacgccgtggcgcctggctgcattgattcggacatgctccgcgccctggggaaggataccgtcgcatccctggcgcaggagacgcccctggggcggattggcactgcggaagacgtggccaaagtcgtccgcttcctggccgccgccgattctgatttcatcaccggccagattctgaccgccgacggcggcttcaccctgtaacagcagctgcatgcacccgccggcggcgggtgcatgcgcgttttacacagtttccagcgcttcttcccccggtattttctacttacattccctcccgtttttatgttatactttccgcaagaggaaaagtgcacagcaccttgtcggtatcattggaaacgacccgcgccggcgcgcgggagaacaacacgcacaggacacgccctgcgtgtatttttttgcgctcttttcccactgcagccatactgtgatttgaagttgaaaaggagactggttccaatgccgaaaaacaaactgcaagaagtgatcttttccctgctgatggttctcgccatggtttatgccatggtgtgctacaacatcgccctggctcagggcggtttgcacaacgccgtattccttctggccctgcgggagttgcccatcatggcgcccgtcgctttcgccctggaagtgctggtggtgggccgattggcccggcggatggcgctgcgcctggtctgcgtggaacgcgacccgcagatcctggtaaccctggccgtttcctccatgaccgtatgcctgatgtgtccgctgatgagcctgttttccgtggcgctgttccagcatcccggcgtgcagctccccgccgcatggctgcagagcgccgcgctgagcttccccatggctctgtgctggcagctctttttcgccggccccgccgtgcgctttgtgttccggctgctgttttgccggccgcatgccgtgcctgtgcccgaacagagcacggagtcttcgtcgctctgagcgcagcaaaagctgtcgtgctccctcaagggagcacgacagctttttcactgatataacttatgccccggcctcctgcctgcagtattccacaaaccggataacgggcggctcgccatagtcgtgccagcgctgggcggggcgtttgggcagatagcccagcttttccatctcgtcggccacatcctgcaggccgtacttttcatacgcttcgcggtagggccagccggtctccagatcccagtcccgtgcctcgtaaatgagatccaccatctcgttccactgctgccagtcggccacttcgccccaggaatcgggaatcgacatggtgcgccagacttcctcaatctccatacggcggcagcgaccatgattgcgaatcagaatagcgcgcagcagcagcttggagcggcaggccgccgcatgcagctcctcggcggtcattggataacccgtggcagcggcgtacatctccgcctccatggtgggccaccagggatcggggctttgccattcacagctcatgacagaatccttgatctcggcattgttctgcacattgatgatggcacggatcagattcgggctgtgatagggatcagccatggcctcggcgtggtgttcaaactcgctgtggaaatgctccacggtgttggcgtcgcgggtagagagcatgcggatgatgcaggcagccagccaggtgggcttttccacgctgccctcgtagccgcggccctgccagtggacgctctgcccccagccgccttccagggaaaccgggatgggcagcggctttccgcccagcatctgggaatagcggccgtggtagaccgtttcactgtaagtatcatagcccatttcccggatggcccgggccatgccctcggcaaacagattgccgtaatagcctctgcggtaaaccaggttgtcgatgaaggtgcggatgaaagcggtgttctccacatccacctccataccggtacccagatccatgccctcaaacagcccctctttcttacccatgcccagccaggtctgcagccacacgtcgatttcccatttgtcgatgccatattcgttgcacagatcgttcacaatggtgcctcgctcataatcgggcttccacagatcgtaaatatcgggcagaatcaccttgccctgggcttcaaaatcggggtcggaaaagtccggggccgggaaatcgcggcccagcagcttacagggagcgcaatagttctgcctggtaggccagaacatgcccaccggggcggggatatccgctttgtaaccgaatgtactggcgctgacgcatttttcaatatggttgaccggcttatcctcaaaagcgctggggccgttcatcagcagagcgttgcagcgctgattgcatcccggactgcaagccacgttgccgcggtcgtatttcacctcgaactcgccgccgggcacgcccagctgatccaggtgcagcaccggggaaggccgcatactgggattgttcatgttcaggcgcaggtatttaagcttttcaatatccgccggtgccaccataccggtgccatggaccgtgacggctttcagccccttgctgccccataccgcaccgaagcctcccttggcaaaggcgcagtcgttgctggtggtgatggaggcaatgcgcaccaaatgttcgccggctggaccgatgaccatgcttttatactcatggccgcatttgtcctcaagggccttctgggtctgatggacgcgcataccccacaggtcgtcagcgggcagaatttcgattttgtcgtcctcaattttaatatatacgtgttcctccgacttaccctcaatgataaacccgtcgtaaccggcatatttcagttccgtagcaaaccagccgccgatgttgccaaaggtaaactgctcaggcagcacgctggggccgatggcacaggcggcgctgcggcctccggcagggataccggtgccggtggtgggaccgttcatataaataaacttgttcccttcgtcaaaagcgccggtaccaggagccacttcatcccagaagatacggtggatcagcatgcgcccgcccacatatttgggcacatactgataagtgctcaaagtggaaacctctctggtggtcaggttgatgcgggcgattttgccgcagtagccataaagtctttgggtattttccgggttttccagcagatcggcaattttataattcggcatatggttatcccccttttttattccgcgtctaactctgcaggccgggctccatcctcggcgaacagggaatcccggctcaggccgatacagcgcacgggacaccatttaatacactgcgggccttcgggattgtcccggcacagatcgcatttcacagccttccactgcttgcgcaccttatcccgcttcatcgcaatgcggctgggctggaatttgcagtgcctggcgcacagcccgcagccgatgcaggatacctcgtcgatataaacgatgccattttcatcgattttcatggccgctccctttttggggcaggcatcgtagcagggatggtcactgcactgctggcaggccagaacccggtggatcatggaacgggtacccaaatcgatccggatgcggctgttgcccggaccggtgaagccttcatggctcagcccgcacaggatcgagcaggtttcacagccggtacacagagagtattccggggaatactgcacgatatggttgccatactcctccagtgccccagcggcagccggttcggttgcatatattttctcacccatcgtaaaaactcctttcaaacgaatcgcacattttccaaacggtatttcatcacacgaggcaatgcctatatggaaacagtcagttccgccgcacagcgtcagcgtggccaagggcttttttcttccatgcgccgctgaaataatagatctgcgtcagcagtagcgtgaggacccacgataggacgaaagcccaccagatgcccgtttcatccgtgccgaccagatgaaggaaaccccaggcaagaaccacgcgcagcagcatcatggcaatcatagcgaccatggagaacagcgtgtcgcccgcgccggccatggtgttcaacgcaacgtgaatcagccccagcacccagtaaaatagcggcgtaaccgccaacatcccagctcccatgaccacaatttgcgccgcttggtctggatactccgccgcagaaacaaacaggctcatccagaacatgcgcccaggggtgactactacagctagcgcagcgcagatgacaagcgtcatcacacaaccggttcggtagccttggcgcactcgaccaaaatcttctgctccgacattctgtgcagcaaaggtggacagagccgagccaagggaaaggatcggcatgacggcaaaggtatccaccttcacggctgcggtatagcctgcgatcagagccgtgccaaaaggattgatcagaccctgcatcagtacatggccgaaggaaatactggcctgctgcagtcccataggcagtccgaagcgaagaatagcggaaaacatcccaccgtcacagcaccacgcaccacaaagtcgcaactgcggcaccgcctttcggatatacagggccgtcagcactgcggccagcccttcagcaaagatggtcgcaaagcccgcacccatcacgccgaggccaaaaacacagacaaacattagatccagcccggcattgacgcagcaggaaaagatcagaatatagagaggcatctgtgtattgcccaagccccgcaacaagccagagagctgattgtaaaacacattgcacaccaatccgcacaaaatggtgcgcaaataaacctctgcaaaggcatagtcctctatcggtgtccgcagtacggtaagaaagggatccaccagaagctgccccacaagggtgagcacaacagccacgaccagagacgtccgcaccacggtggacaccgccacaggcagttccttttcccggccagcgccgaacaactgggataccacaatggaagaccccacagaaagcccaatgagcagcgcattgacaaaatggaaagccggcgaagccacccctaccccggccagagcttccggccccacaaagcggcccacaatcatcgtgtccaccagattgtaggacgcctgaaacacattgcccagcagcagcggcagaaccagcaccatgatctgtcgccagggtgtcccctccgtcagattcctgaccacaaaaaacacctgccttctcctgtacgcgggcggggttccgcgtccatcattcaatcgtactataacgaaagaacctttctccgtcaaacgccgtggcaggcttgttattcgcagaactgttcacgcaaaaacaaatacttatcaatgcgccgtttttgaacaaacagaatttctgctgattgtcattgcaattgcttcttaatatccattttcgatgaatttattgcatttttatctgttaaattcgcccattttttaaatattgccttttatttgttctttatgttacaataaatcattatcatattgtaatagtttcttagattacattttgatttccatcggttgcaaaaggaggcgcgcttatggatattcgaggactgaaatactttatcagcgcggcagaatgtctgaattttacccgcgcggctaaagagtgctttatcacccagactgccatgagccagcacattgccaatatggaaaaggagcttggctttcagcttttccggcgcaacaaccgcaatgtggagctgaccactgccggacgggatttttacgagcagatgaaagccgtggttcacagttacgacaacgccgtacgccacagccagaacctttccagcggcggcgaaggcagcgtggtggtagccgtgcccagctgtatcgaagggctgatcttcatgtctcgcctgcgctacttcaaaacgcattaccccaccataaagctcacggtcaacctgatctctccgcgttatatggtggaccggctgcgtcgcggcgaatgcgatatcgccatctgctggccttacgatatgatggaggctgaggagctgacagtacatagtctgggagaattcaagggctacctaatctgctccacagagcattcgctgtcctcctacaagcgcgttcccccggaaaaactggcagacgaacgcttcaccatggtggacctgcgcggcatgcccgccacacagcgggccatgtaccgtgactggaagcgcctgggcctggtgcctccggtcaacccttccttcgatcaagtcaaccgcatggaagaactgctgttcgccgtaggtatggacaatattgtagcgctggtacccgaatttgtacgcaacaacatcaccggaaacatgtgctttctggaattggatatgcccaatccccctatgtttcgcatgagcgccggatatcttaccagcaacaccaaccctgccgtgcgcactgccctcaacatcctgctcgacaaccggatccccatggactattgatgcaccgcgccgaataaaaccaaacaaatccagataaaactaaacaaagaaaaaagtttcgaatctttcctgaaaacgagggaaattcgaaactttttctttttttctgtgctaatcaacagaaattctttttgttaaatccataacaaaaccgattcgctctgacgctacaatatctttttattttacagcggcaaacccattccatacactggatacgaacgcggcagctcgtttcgctgcgctccgctgccaccaggcagcgtacggatcgagagggaaaggcaaatgtaaaagaaagtgagtgtgagtttatgcagcaaaagagttctatgcgctgggtcattctcttcattttggtcttcggcacagccatgctgaacttttccaacctgatcttcgcttcccgtcccaccgacgtgatggaacagttcaacatgacacagacccagctgaccgcaatttccaccgtgggccagctgcccggcgctttcttcagcgtgtggctgggccacatgatcgacaaaaagggcgtgcggatgctgcctggcattctgctggcgctggcagctgcctgccagatctggcgttgctttgcggcagattatgtctctttgttcattatcactttcctggccggcgctttcttcctgcccacgcagatcctgcagggcaagctcctgggcgtctggttctcccgcgaggaaatgggcaccgccatgggaatttacggcgcaggcgcgggcctgggcaccacgcttgcctttgctttcggcggcctgttccccaccatcggcatagcgtttatggtgatcgccgcgggatacgtcatcgaggcggcgctgtggttcctcttcattaaaatgcctgcaggcctggccggcggcccggtttctgaagcgcccaagggcaacctgaaaaacgtgttcaaaagcaaaaatatgtggcttctgatgatctgcggcggtctgtccgtaggcgcggcgctgctgctcaacagctaccttgtcaacgcgttccttgccaagggcatggctccggcagccgccagcggcgtggccacgctgctcaacgtgtgcctgctgatcggcggtattctttccggcatcgttgtgtccaaagtgggccggtataatcttccctatatcgtcatctgtgcaggcggcgcagtgctgtactacctggcctacatgctgcccatcagccccctgacctatgtgctcgtagccgcgggcggcatcatcgtctccggttccatcggcgtgaacatggcccgcatccccctgctgcccctgaccggtgaattcggccctgaagacgtgggcgcagccggcggcatgaacaacaccgccgtgggcatctgcgggttcgtagtacccgtaattgtggccaattttgtgggtacgaactacaccatgatcttcaccctgatggctgtgttcctgatcatcatcgccattgtcggcggcgtactgatgccggagctgggcgaaaagggcaaactggcccagcaggcccgtgcgcagcacaaataagcgcaagcacggcaaaccaaacgtgtcaaaccactggcagccactgccaggcagcaatacataattattaaggaggaattcattatggcaagaatggaaggcaaaatcgcagttgtcaccggcgtcggttccggcatcggcaaagcgattgcagagatgttcgccgcagaaggcgcaaagatcatcggcgccgacttcaacgcacaggccggtcaggccaccatcgacggcatcgttgcccagggcggcgaagccaccttcgtgcaggccaacctgcggcagaaagaggacgtggaaaaaatcaaggacgttgccgtgcagaaatacggcaccatcaccactctggccaactgcgccggtgttctggtgcataagcacttcctggatcacaacgacgacgattacgcgtttatcgatgaaaccaacttccgcgcttatgtctggatgatgcaggctttcctgcccctgatgacacaggaaaacagccacggcaaaaacgccgtgctcaatattgcctccatttcctccatcaagcccgagagcgacgcttattactatggcgctttcaaggccgccgtggacttgatgacccgcaacctgagccgcgaattctccccccagggcgtacgcctgaacgtcatctgccccggtccggtcatgtccaacatgacccccaaggatgtccaggagaatccggaaattcaggcggatatgtgcaaacacgtttgctccatcggccgcctgggtcagcctaaggacatcgcgtatgccgccacctacctctgctccgacgaagccacctgggtcaccggcgcccactttgtcatcgacggcggcgcctgcatgatgggctgagccctcgtttctgggtttctcactcccaatccaaacttaaaaagccccggctttctttggaaagccggggcttttttgcgtccgtcataaaagtttttatgcccgtgcagcctgtgccgtccggtaggcggcaagggtagcatcgtcaaagcacaccatcgtaaccgtgcgcacagagcgggccgttttcaggaaagtttcgatcgcgtccaccgcaatggccgccgcctggtccagcggatagcggtacacaccggtgctgatggaaggaaaggctaccgtttcacagccatattcctccgccagacgcagcgcgttttcatagcacgcgcgcagggcctgcgcttcccccttgcagccaccgtaccacaccggtcccggtgtatgaattacatagtttgcccgcaggcggtacccccgggtaagtttggcctgcccggtccggcagccgtgcagcgtccggcattccgccagcagctccggcccggcggcgcggtgaatggccccatccacaccgccgccgcccagcagcgtgcagttggcagcgttgacaattgcatctaccgcataagtggtgatgtcgccccgttcgatgtgcaatcccatggttcacagtcccctttcttctgcgctcagcgcgctccggccggcagcggaaagcgccgcttcagcagcacccgcccaaaacaggccagcgtgcgtccggagctgggcggcagcaccacatctgcgtctgcacgcgcccggttgagggaaaaaagatacacgattccaagtgcgtctttgtaatactgtttgcaaaaagtatccccatccacgcagaaaatccctacatccccattttgcagcggttcccgtcccacatagacaatggatccatccgggatatgcggctccatggaatctccacagatgcgcaccgcaaattgggcggcgtcctcccctccggcgtcgatcatctcgtattcctcgcccagcaccggagaagcatagcccgccgccgcaggcgaagcaaacagtggaatgcgccgcgccggcctgggcgtcggcaacacagccaccgaaccggcgtgcttttcctccaccgcatccaacactgtgttcacagcggcttttcccttggcactcaaggcccggtaacgctgcaccagccgctgctcgccggaagagagcactccgccgccgggccggaaactgtcctgaaacaaatagttcggctcggcatccaacgcagagaacagccgcagcagcacatcttcccgcggcatactgacgccggtttcgtaattgcccacagcggacttgctgatgcccagctgccgggccagctgctgctgcgtcatgcctttttcttcgcgcctgcggcgcagccgttctccaaagctcatggcctgcacaccctttcctgtttccattgtaccgagccgtaccctttctgtcaacgaaaaagcacaagttttctggatttatatcttgacaatcccagaacatttgtgctattatcagtttgccgccagaaaacttggacaaacacccattaacttccactaaatcatggctttcagcgttctgttcccgccggatccccggcaaaaaaagaaccgaccgctttacagcgatcggttcttggtgggggaaggtggattcgaaccaccgaaggcgaagccagcagatttacagtctgtcccctttggccactcgggaattcccccatatgaatttggagctggtggacggacttgaacccccgacctgctgattacaaatcagctgctctaccaactgagctacaccagcgcatccaacagcagtgattagtctaccagaaagcaaaccttttgtcaaggaaaatttgaaattttcaccttgtttttttcaattggaaaggaagtgtatctctttgcctgttcggcatgttcagcctcccgatccacagcgcgccgaagcggcggcccactgcggccgctgtggtgcggcgctgtacgacggagacgaattttacgccgtcaacggctgcgttgtgtgcgaagactgtctgcccggcttcgcccgggaggaataccgctccttccgcctcagcggcagagaatggaggatgttatgacactgcgcgagttatcttatgaatacaaagcccacgccgacaccctgtcgctgcgcatgaagcagctgcgtctggcggcgcgggaaacggaggatcccgagcgccggcaccgcctggagcggcggattctggagctgcgtcccctgctgcaggaggccagggagctcgccgtactgacacgaaattattacgacaggaggtatcacaagaatgaaaagtataccctatgaccggcggcgcaacacactgagcagcgatatggccgcctatatgcgcgccgtagcgccggacaacgacgaagccgtatcccgcctcaaacgcaacctgcgcattgcccggcgggaggagctgactgcgcggcaggcccaggtgctgcggctgtactttgaagaagaaatgaccatggaagccgtgggccatgccctgggcatttccaaatccacggtgtcacgcaccatcgcccgggccaaacagcgcctgaagcgatgcctgcgctacgcgctgtaagaaatgggagggaccacggtccctcccatttcttttatttgcatcccccgctgatttttgctataatgcagactggtaaaggaggcctcgatcatgctctacaacaccacccgccagcgctgggcccgcgtggccctggccgtgctgggcagtttgatctattccatcggcatcaattattttgtcactcctgcagggctgtacagcgggggcttcctcggcgttggacagatcattcgtaccctgctgatcaccaatctggggctgaattttggcagtctggatgtggccggcctgatctacttcgccctgaacattccggtgtatctgattgcattccgctccatctcagggcatttcggcatcaaatctctgctgtgtaccatctgcaacaccgcctttctcagcctgctgaccccgcccgccgaaccgattctctacgacgtgctggcttcctcgattctgggcggcatcattgccggcgcaggcatcggcctgatgctctacgacggcggctcttccggcggcatggatatcctgggcgtatatctcatgaaaaaagcccccggcatgtccgtgggccgcatcaatatggcttttaatatcacgctttacgtcatctgcctcattctgttcagtccccaggtggccatttattccattatttactccgtattctgcggcttgattgtagatcgcctgcaccagcagaacatcgcggtaatggcctgggttttcagcaaacgccaggacgacgccctgcgggattatgtgacgggcaccctgcaccgctccgtgacttactggcccgccactggcgcgtatcagaacagcgaaaccaacgtgatgtgcatctgcatgtccaaatacgaactggaagacttccggcatgccatgctggaaattgatcccgacgcctttctcgtcaccgacgagggcgtccggatccacggaaactatcacgccaggatctaacccagaaagctcctgccttagggcaggagctttttgttattgcaccgccgctcgctctgccgcagcggcggcaggaaaaaaatattctgatcggttgcatgctttcatgcaacttttgccctgccctacacggtaagtgtagggcttttttcggaaaagccccaaaattcgactacacaaaggagaaatcaacttgaactatacaaaaaattatcacttaagccaatgggatgccgccgaccgcgtcctgcgggaggacttcaaccgggacaacgaaacaattgatgcggcgctggcagccgtgcaggatcggctggacagtctgcaggcccgccacacgctgcaacttataaaaacatttaccgccaacacaccccaatacggcaggatcacctttcctatggatgacgtcgcatggtcggactggaatctcatccatctgttcattgatgccaaaatgcgctccgccatgggttaccatatcctgctcaacaataccaacaatactctgctcagcaactgcgccacccaacaccaaacgcacctgatcttttttcctttttataaaggaaactctccgatgaccgggattcgccttttcggcggctcctttttctggcacaccaccctatttcaaaactgtaccgctttgattcttgatccggcttacgatgagtatccattattagccggcacaacattcactttgtatgggcaaaaatgacgtcactgtgccaaatcaaacaaagcccccgctccaatttaggagcgggggcttcaatcagtacgctatattagcaaatagcccatttatacaaaacggcttatttagcagtccccagcgcagtatatgcaccgcaaacaactttatactgcacgccagaattcagtcccgtaacagtataggtgccggaagtgctgttcttagcaatggtgacagtgtagtcgcccagctcagtgaacgtaccagcattgttcagcacatacagcgtaacgtttgccttggtatctacattgcccttctgcgcatcaacagtgatcttcagctcaccattgttagtaccggtctctgccttcacgccagtgacggttgcagtcgtttcatcttcgggatcaccagagttaccagcattggcaacttccagcacataaaccatggtgaccttaccgtcatcatagaacacaacagccttgactgcgccgctcttatcattgctgcggtcgattgccgtcttcagtgcgctcacgctggtgatctcgctggtgtacacgtccgcatcgcggtcatccttgtcgcggttgtcgccaatgatgacgttctcagcgaagtcaacatcgttcaggtagacattgtgaccattagccgtgaattctttggcgctcaatgcattgttgtacacaccggtcaactgacggccaccggtataatcatccttgtcagagttcagcgccagaccatagtaaccggtttcatcgtcataatttgcatcctttgcaatgtcagagaactggctggacagagcctgtgtataagcatccagtgtaatcacgccttcagcgtcatcgctgttgtcccaggtatagaaaccaatagcgggagcagtgctgccctccacggttgcattctcgatcttgccggtaccatccaagtagtacagttcaacattgtaaccggtctgatactcgccatccttgtccttgtaagagatcttatccttggacacttccttgacaaagaccacgtcatcgctggaaccgctgaacttatcggacaccagaatcacgtaggaagcaaccttgttcttgccatctgccttggtgattgcaattgcagtggtttcattcgaattattgttcttctttgcgctggtaccgcccacagcggtggtcacgccaatgtccttgccgtcatcctccaccttgacatacttggtggtatcgttcaggtaaatcttgtcgccagcgacagtcatcttggtgtcgtccttagccagatcgtcaccgatcgcagcgggcgccttgctgttggcaatcacggtataggtattgctgccggtatatgccttggccgtatagctgctgccgctcttggagaaggtgaacaggccctgaaccgtcttgaagttatccgtaaacgtaggagttccatcaatacccagagcggtcatagtagcagaatcggaatccttgatctggaactcagtcacagtgccttcctcgatggaaacagcctgtgcatagtaagtggtgtagcggctctgatcacgcaccacgccggtgacataatacacgtcggtgatcttagcggcttcgccttcatcaataccgataacataaccgttcttatcagtgtaaacagtgtagtcggtatcatccagattcagggtcaggcttcccatagcggtagcagtggtagcaccagcatccaccaaggcatgcagagacatttccgtgccgtccaggctgatgtttgccttggaaccgctgttatacttggtaatcttgccggtcttggcctctgccacataggaatccagaaccacgctgccgttgccgcccttcagggccacggccaggacagtgccttcctcataatcggaagtataaccggccagttccttatcggaattgttgtcatagcggtcataataggtgccgccgaggctgttctcgttcaggttctgcagcgtgatgctggcagaagcgccctgcttggtgtaagtgctggacaggttggtgtcgatttcatcgatctgggccaggctgtaacgcagcacagagatcgtctcgatctcgttgtcatcgttcatgaagacttcaatttcatcgcctgcattcaggttaatgctggccaggccgttataagtatcattgctgtccttcacgccgttcacatacacagcaaccttggatgccacatcatccttgctgtaatccatataatcgctgtcggttacaacagcagcctgagctgtgatgctcttattcagcacgatggaatcatcggcgtcatcagcataggtgcccacggtggagccgtcatagacccaggtggtagcgggacggccgaagctgtcaacctgatctgcactcttggtggaaaccttcagatccttgcagtacttttcagcaaactcaacagtgt

SEQ ID NO: 3210 - DNA, 3957 bp, Unknown
  16S sequences of unknown bacteria
gaattaatggcgcatatgcagccggatacctacatcggccgctgtccgcagcaggtagaagaattcctgaacaacgatgtagccgcagccttggcgccttttgcgcaggacttgaacagagaagccacagcgttgaaagtctgaaaatcaaaaggggataaatcccgcggaactgacaagcttcgcgggatttatattgactttatgttatatttcctatataataactagatgtacttgtgcgatagtacaagtgcggcaagaccccaaggaaaacataagtgatgggagattcgaaaatgaaaaagaagtacagtccggctggcttgatcgtgatcttgctggtcattgtgctgagcacatggacgatcttcaacggcttgaatctcggcattgccaagatcccgaacgtaaaggacggcgttgtcctcggtctggatctggtcggcggtgctgagattacatacgaagccgatctggagggcgccgatgtttcagccgaggaattgagtgagggaatgaaggctgcgcagacgatgctgcgcgaacgcttgacgaccttcggatacactgaggcggatgtatatctgtccggcgacgatcgtgtcgtcgtcgcgattcctaatattgacgatccggaagaagcagtccaaatgctgggttccacggcaaaagtgacttttgtcgatgccgacggcaatgtgatcctgactggcgacgatttgaccggcgccagcatggcttacggcgatgtggacaacacgggctttagtgtctattatgtcaatgttgatctgagcaccgagggccagaaaaaatttacggaggctacaaagcaggtggccagccgtactgatggcagcaactatatctccattatgatggacgacgaggtgatcagtgccccctatgtagatgctaaatatgcctctaccggaattaacagcgaacacgtgtccattaccttgggcagcaatgcaacgcaggaaagcgcttcccgcttggcggggctgatcgcctctggtcagttgcccttctccctgcaaaatatccagatggaatccgtttctgccacattgggcctgcagtctttgaataccagtattcaggccgccattatcggcttgattctgatcattctgtttatggttttctattatcgcgtgctgggcgtggcttcggccatttccctgattttcttcgctgtggttttcgtggacattatttcctggagccatctgaatctgacgctttcgggaatcgccggtatcatcctgacattgggtatggcggtggacgctaatatcgtgattttcgagcgtatcaaggaagaattgcgcgcgggccgcacgcttcgcgtggcgatggacgccggcttcaaaaatgcgttttccgcaattctggactccaacgtcacaacttgtatcgcagcatgctgcctgtggtggcagggtaccggtaccatcgtcgggtttgcaaaaacattgctaatcggcgtgctcctgtccatgtttacgatgatcgtgatcacccgtgtgattcttaaaacctttgctaaccatcagcctaagagcctggcggcatacggtgtgaagatgggaggtgccgactaattatgaaagattttacgaagtctacgttcagctttgtgcagaaattcaagattttcgctatcatctccctgattctggccggtatcggtttggcctgtttccttgctactgttttcggcgcaagtccgttcaattttgatacggagttcgtcggtggcgtcagcacgacgtatgatctgggggtcaccgtggattctggcgtgacggacaatatccgtcagatcaccagccagactacaggattccaggccgcatccgttcaggttcaggcgacaggttccagcggcaccggcgtcttggtcaaaacactggaaatggacagcgaaacccgcgacgcagtgttcaatgcagttaaggaagcctaccccaatgcgcaggctggcgaaaccacttatatttctgcttcggttggcgacgacttgaaggccgcagctgtcaaggcatccctgttggcaattgtactgatcctgatttatatcacgatccgctttgaattccgttccggcttagctgcggttctgacgttgtgccatgatatttgcgttatgatggcattttttgcaattttccagctgccggtcaatatgaactttattgcagcagcgttgacgattctcggctattcgatcaatgccaccatcgttgtgtttgatcgcgtccgtgaaaacaccaaaggaattgctgatattaagatattcggcgatgtaactgaccgcagcattaaacaaacgctggccagaagtattaatacgtctgtaacgacactgatccccattgtgttgattttgattctgggcgtaccttctattcagaatttcgccattgcattgattgtcggtatcgttagcggcacatattcttcggtatgcattgcaggaccgctgtgggtgaatttgagaaaaattggcagcggaaagaagccggccaaagcgtaaatttcctgatttcaattataaagtcccggagcaaaattgctccgggactttttggtactttctaaaaaatgcgaaacaaagaaaaaatctcctgatgctgctgcatcaggagatttaaagggccgtttcttattctttgaccaatacttttttcagccgggcaaaacggggaagggaatctgccattggacgattcggctcaccttggatcagaggaaggacatagtcgatatacgcctgcgtcataccgttgccatctttattaatccactctaaaggcacctttttctcggtattggcaacttcagtcagccccagcagcttcgtcttgcaggtgtatgcaccgtcttcatacgcgcgctcaaaagcgaccatcttatctgtcacgccggaaatagcagcttccacagctgttttgccggcaagatacgattcctcaatatccgtttcggaagccagatgcgcggcgcagcgctgcagcaaactcaattcaatgccgcgtactttagcaccagtgcgggtcttggccaaatcggccagagtgggagccaagccgcccagctgagcatggccgaaaccatctgtagcggaagtgctcgcctcagaaacgaagctgccgtcagggtaatgaatcccttctgacacggccaccaggcagtttcctttttctttgtaaacgcgatccacatccgtcagaaattgatccatatcaaaatccgtttccgggagataaatcaaatcgggcccacaaccgtaagccgaagctaaagcagctgaggctgccagccaaccagcgtggcggcccataatctcaataataacgaccatacccgtatcatatacgcgggcatcgtggtagacttccatgcaggacgtagcaatatactttgcggcgcttgcataacccgggcaatgatccgtaccgaacaaatcgttgtcgatggtcttaggaacccccatcacacggcactcatagcccactttctgcatatatttgctgattttgttgcaagtgtccatggagtcgtttccgccgttatagaagaaatagcgcacgtcgtatttttggaaaatctccagaatccgtttgtaatcagtgtcgtctacatcaggatccgccattttatagcggcaggaacccaaggcagaggagggggtatatttcagaagagaaagctcagcggggtcctcctgtcccatatcgaacagacgttcgttcaatacgccgacgataccatgctcagctcccaagacccgggtgatggaagtgtttttcagtgctgtctcgatcacgcccaacgcactggcgttgatcacagatgtgggaccaccggattgaccaatgatacatgcgcctttcaattcgctcattttctcattacctccaaattttactgtctcacgaaagc

SEQ ID NO: 3211 - DNA, 13578 bp, Unknown
  16S sequences of unknown bacteria
gccgagaacccgaagatcagtgaacgtctcgttcatgatgcagattatattcggcacctgatttttctttttcttcgcagaagttttcggctgatcctgatcggaagttcctctcaccgccagatcggtgtccagaccggtatttggaatcggatttccgttttcatccagactggtcatccggccgtcgtcggaaagagctggcatggcgataccgtcttgagttgtatcgataccgttggccgtatcgtttgtctgatcagcgccgcccgcggcagtcagcggattcactccggctgtatttccgtccgccgcagccccggctgccggcgggatgtttcctcccgctgcagtgtcggcagcatcgctgtcattcccgttctgaacggcttcctgtccggcttttgcctgctcgtctgcgagccgcgccttttcttcttcctgaatcttctgtgcagaggcgaggatgcccggatcgtcttcgttttccgccaggaagtcatctacgatggccgtgacctgcgaggcgttgtaatctgccggggtctcgatgatcagatacttcgtgttcagaaagaagttgagcaccgttcccgatttgtggtatcctctcgtctggttccagaagtccggttttacgccgtgatttgccgcaaaatcggtggtgtagaacggaatagccactccgaggatgaaaatcagagcaagaatcctgcagataatacttcctttccgcgtaaagcggacccgggtcatgcgtatgccgatcatcatgacgatgaggaggagaatgacgccgaggatcagagtatacggcacggtgtaagagtaattggacgctactcccagccccgtggaaatcgtcagcacgtccatcggcacgacaggggtcccccggaaggtcagcacgatactgcagatcagggcaaataaaaaaatgatcggcgtcatgacgagaatcggcattttatagcttccggaaacgatcatgacgatacagtagagcagcagatatacgatataattgcagaagaatgacacataggaaaagtcgtagatgaattttccgttgagacattccgccatgcacatggtcacgatgggaaccagaaagtagatgaccggattgataattttcgccgctttgtttgagactttcacgtggaatgctgtcagcagccctacgacgaaggaacccgccagcgccgctgcgaacagcaatgcgccggattcttccgcaaagaaaagtctgcggtaaaagataaccgcgatcagaagaagggcggttatcacgcccgctgcgatccgcgatctctttgtcgtgtagaaagagtttttcagtgcggaaagcccgtcttttatattttggggcttgatttttatatttcttatcttgtttgaatccatgtccattttcacagtgtctcactttctctgtagttaatcctgtgccgcattctgcggcgcttcagcggatggaagaaaatgtatgtaaaatctatattaatatcatgctaaatttgtcgtacgtaatgacaaattatattatactgccgtgtttttttcaataaggcggggccttttttcagctctccaaattctgaagattttatgaagaaaagtcaaaatccccgatctattctgtcttgaaaatcatagttgtgcgtgatattatttttatcgtcaaactaattgcgggcaggaggaatgaactttgaagagtgcatttctcaccggtgcggcgaaatggggccatgccgtccgcccgtgtttttcgggaattcaggggcggcggatctcatgagagattcggggagacggccgctgtgttttgcaaaagtcgttttggaaattgaaaaaaggaaaatcaaatggatattatcaaaaagtacggagatgtcatccgccagaagacggagacagatccgcagaaagctctgaggatgtttcgcttcggcttcggagtggaatatcagaaggcgtcaaagctggcggacaagcagctgccttacggctacagagagatttataaggcggcggtcaaaaatacgagagaggtgctggaggagccccaaaagagtgtctggaccaatatcttcggtccggtggagatttttcagtgtttcggtctgaaccccacatcccttgagatgctggcgggatttatgtcgggttttcgtacggaggattattttatcgacagagcggaaagcatagggatcgctcccacgctctgttcgtatcacaaacattttctcggtacggtggaatccggcgtcatgccttctccggcttttatcgcagtgacttctgcggcctgcgacggaaatatcaatacgatgcgttatgcggcgctcaggcgcggaatgaaattttttgccgtggatgtacctcacgaggattccgaggaagcggtgcgttatgtcgcgtctcagctgtatgacatgatcggtcagctggagcaggtgaccgggaaaagactggatatggacgagctttcggaaacggtccgcagagaaaacgaatccaaacgcctgatgcgcagttttacctgggaatcggtgaagagatggtatccgaatactctgacggcgctgacggcgcttctgtatccgacgcatctgtccatcggatcggaatccgcgcttcgactgtttcagatccttgcggaggatatcaaaaagtatccggagaaagagatgaaccgtattatgtggattcatcttcttccatattatcaggagacgctgagaaagtatttcaatctgtccgatcagaactatatcaatgtgtatgaccttctggattatatggaggagatggatgcgcgccggccggtggaagccatcgcccgcaagatgatccgcaacgtatataacggtgatttcagcagaaagacagacatgatttccgatctgatcgaagagtttcatcccgacggtgtgattcattactgtcactggggctgtaagcagtcttccggaggcgtgatgctcctcagggaaaagctctccgccatagatatgcctctgctggtgctggacggagatgcactggaccggagaaacgaccaggacggacagctgaagacgcgcttggaggcttttctggaaatggtgaaaaacaggaggagtatgagatgaaaatagggtatctgtgcaagtatgctcccatcgaggtccttcagtccatgggggcggaagtagagcgtgtcatgcccgaagttaccgatttcagtcaggcggacatgctgatgcacgcaaatatgtgctccttcatcaaaggcgttctggaggaatttgaatcgggggaaaccggcggagcgccggtctatggagggcttctcctgaccaactgctgtgacagtacgcgccggctctatgatgtgatgaaagaacggtatcccgataagtttatttatctgacagacgttccgcgcacggcggaccgcagagcggcggatttctttgcgggatcggtcaggaagttagctcacgcttattcacagttcagcggcgtttctttctctgcagatcgtttccgggaatttttgaggcaaaataactgtgccggtgcggagaaagaccaggacgctgcggcggagaaaaactccggggaaaatgcggctcctctgaatatcggactcatgggcgccagatgtagccggggcgttctcgaaatgatccgcagctataatatcaaccttctcttcgatatgacctgcaccggagtggaccgcagatttgaaatcgacggggagctgctgcgaagcggcggaaaagatgcgccgccttccggcgccgctgccgaagaggaaaacgatgaacggcgcagcgaaatgtctccggcagcggaccgtctgctctcggcgtacagcggacagctcctctgtcagattccgtgtatgaggatgaacgatacgtctgcaagggatgagatgctccggtcgtttgaggatcatctggacgggatcatctaccacaccgtgaaattctgcgacaattattcttacgagtacgcggcgctgtatgacaacatttccgcttctatccagaaatttgagacggatgccacttcacagtgcgagggacagatccgcacgagagtggaagcatttttagaatctctgctgaccgcgaaaggtcttcagacatcagaaatcagccgaaagggagacagaaaggaacgacctatggatggaaaaatacatgtgctcgggattgacagcggatcgacttccaccaatgctgtcattttaaatcaggatcggaaaattgaggcctacgctgtagtgcgtaccggtgcaaagagcggagagagcgcggaggcagtgcttgcggaagttctcggaaaggcgtctctttcgagggaggatatcgatctcatcgtctctaccggttacggccgggtcagcattccttttgccgaccggaatgtgaccgaaatcagctgtcacgggaaaggggcgcactattttaatcctgaagtgcgcacggttctggacatcggcggacaggacagcaaagcgatccgtctcaatgaaaagggagatgtcatcgattttgtcatgaatgataaatgcgctgcaggtacggggagatttctggagatgatggcccgcacgctggaagtggatatcgaacgtctcggcgaggagtctctgaggtggaaagaggatctggatatcagcagcatgtgttccgtgtttgcagaatccgaggtgatttccctcatcgcaaacaataaggagaaatgtgatatcgcgcacggtatccataaagcggtggccaataaatcgatttcgctgatgaagcgggtcggcctggaaccgggatatatgatgaccggaggtgttgccaagaacccgggagcggtcagagagatcgaggagaaactgggacaaaagctctttatctgtgaagagccggagatcgtaggcgcctgcggcgcggcggttttcggactggaagagctgacagcaggaaaagataaataaaaaaacagatggaaaaacacgaagagaatgccggcgtctgtcgcgccggcgagataaaaatgagcctgccaaagagcaggctcatttttttggatctattgtccgatcaaatgtattttttaatattttaaaagttattttgttttaaaagagcttatcatagagaataccgtaacggagggaatattcctgcaaatcccgataaaaataacataggaccgggtttttcatctgtgcagacggcggatttcgtcgtctggcttccgtgggatgccgcagtctgccgcggaagtccgggacagtggataaccgggagtcctgacgtttgaaaaagcgggacgcagacagaattcggcatttgcggcgccgtaccgaaattcattcgcgatttccaaccggcttgcgtaccggggctttgtcccgatttaagcagaatcggaatgaggtgaaaaacgttaaacgaaaaaattacacatcgggaggtatttttatgaaatatatcatcacggaaaatcagatccgcggctttgagcgattcctatatcagaatgaacgcagccggggtactgttgagaagtatctgagggatctgacgtcctttcgcagatttctcggagaacagagtgtttctaaagagcgcgtggctctttggaaagaggagcttgtacgaaacggttacgccgcgtccaccgtcaactctatgctcaccgcagtccactgttttttgcgtttcgccggatggcaggaatgctgcgtccgtctgctgagacgccagcgcaccgtcttttgcgacgaagaaaaagaactgacgagagaagagtatcttcgtctgctgagaacagccggaaaacagggaaatcagcgcctctgtctcgtgatgcagacgatctgctccacaggcatacgcgtttcagaattaaaatttatttccgtatcctctctgagcgccggaagggcggaggtggactgcaaaggaaagcgccgcgttattctgctggcgccgaagctgtgccgcatgctgaaggcctactgccggcagcagaacatccggacgggtcctgtgttcactacgaaaaacggtaaagcgctggatcggtctaacatctggagagagatgaaacgtctctgcgaacaggcgggggtagagccttccaaagtatttccgcataatctgcgccatctctttgcgaggattttctaccggatggaaaaagatatctcaaaactggccgatctcctgggtcatgccagcatcgagacgactcgaatttatattatggagagcgggctggaacacggaaggaaggtagaacagctgggactgctgttatgaccggaaaatggtcttcccgggatctcagcgtgtaaaggggaacagtcccccggatacaacaaaattgtcattttgttgtaaagacactgcggtactttttccgtagagaaaaatgtcgatttctctcagaggtaagacgaatacataacgttcccgcagcggaccggatttgtgcagacagcgtcgaaatacgctgaaaaaacattttaatataaatttattatactcgaccttccgttacttgtgttgtaatttttttgaaatacagtatacgattctgttttatattttttctcataaatatacgggcatgacaaaaaaccggcgataccctgcgtttttccggcttttttgtcatgttcttttttattgccgtactctctcttttcattttgaaacaaaaatatcttcgataaattcacagaaattcaagagaaatacaacaaaatgacaactttgttgtattttatccggaatttaaaccgaagcgaaactccggtgagtcggttcggccagaacgcgcgggcagaaatctgagatttcctcaaatgctgagaatggaaaggagaaagggacaaaatatgaaaggatttcacggaagcagatccggaaagatacgtgcggaaccccagctggcagaagtcaaagaagagttataactgcgtaaacggaggaaaatcatgaaaagaaaaggaaaaaaacttctgatcgctctgctctccctctgtatggtaatgacaatggcgccgttgggatcgtgggcggcagacggggaaaaaggtgaaccagcggtgaatgtcgctcgtatcgcgtcagacggcggaacagtgtcagagtacaaaacgctggatgaagcggttgaagcagcggaggatggagcgaccattgaactgctggcagactgtacgacggagggattaaatctttctaagagcattatgattcagcgcgcagcagagttggatgaaaatccgactgttacttttgaaaagcacggtatcgctctctggggaaaagatcttactttcaaagattgcaatgtgataatgaatggaatcggttccactccttatactgcagaatggaactggatgtcggtttgtgcgagcccaggtgcatctctgagccttgaaaatgtcagtctgacgatggacggtacggatgcgggaaacgctcatgccatttatttctgttctgacaataaactgaacgtccgtaactccacacttgtaatcagaaattacgaacaggatgctttggaatgggacggcggagacggcggatataatgtaaatattgaaaattccactttcctgtccgacacgaatcgttctggttttacgggtacctttatcgctgcgattgacaacagcagtgtcgatgtcgtaaatagcaccggcaatggctcgaatggctcgcatttcgagattaaaaatcagtccaaggtgaatttttctgataataaaagccacggtttgtccaccggccggctgacaatagacaattcatcagttgcggccgatcgtaatggaggaaatggaattcacacgaattcgacgttaacgataagaaacaattcctctgtggaagtaaagaataacagatgttctatttccagtcagtggactgttccggcggcgatccatgtgacggcgggagaacgttctctgatcgatggaaccagtacggtcaccgcagtcagcaacagcggttccggtctcctgttaaaatccggtaatttgacagttgaggacggagcggatattgtcattaaaaataatagggcggaaaagctcggatacggaggcggtattaatgtgcggggaacgttagttctcccggcaaatgtggtattgtacaataatcatgcggactctgccggcgatgatatttacagtgaagattccggcatcattacttttggagaagtcggagcgaactgggcgctggacggagcgcctgactgcgaacatgctatcgacggatggtatgatgacagcgcaaaacaacgctgggaagcccataagtcacctgttcgtgtcgagaagtttgattctttcaatgcggacgggctggtgcaagtgaccggtgaaaaagcgctgaaagccgcacatagtttagtgccggcggatcctgatgatccggatgctcaaaactggcaggtttccaaatcaaaaactgcagaaaatctcgtgaaacagtccgacggaacttatacgtcagaagtgacgctgtccctgcctgcggcggaagaggaactgatctccgatgtagtcttcgtactggatgaatccagctgcagtgcgctggtaaaagagagtgtcagcgatatgcttgaaaagctgtacggccagattgagaacaccggagcgacaataaagatcggtgcggtacagttccggggagaagtaacagaactgccgctgacaccactgacggaaaacacaaaggatgtcgtcactgaatttatgagcgcacggccggagaccggaggatccaatatgcacgcaggtctcacagctgctcaaaaaatgctggaggcggatactgctgtcgcagacaaccgtaaatatgtcattctggtgagtgacggaatcacttatatctgggacgaagaaggcgtgaataagggcgttaactttgcaaatgcagacgcgcccggccgtccgatgctggcgagtccggacggctgggatgtaaaatatggaaacggatatgtgccggaaaactggaattcgcattttatcactgtcggagagcagctgaatgcgacgattgcggaaagatccagcgtttatgaccgttccaatcctacagaaaacaagccttttgtcaaatacagcgaaaaggacggatatagctctactgtagatatcgctctgtataaatcccaggaagtttatcagaaactgacagaaaagtatcatgcttatgcggtgtgttccggtgtggaaaatgaaatgaagacgtatccgtttggtccgtctttcatgaactatctggccggaggtacggcagaagtcgacttttcttcgattcagaaagagatttactatctgctggatgaaggcagttctgtcaccgattacatgggatatacggcgggagacgacggttataatttcgacttcgaagattccgcagattcgctgaaattaagagtcggtgacgacattcttacagcggaaactctcgaagcagcgggagaggaagacaacagatatggttttggcccttccaaagaaggagaaaacgtcacatacgattacattctgctctattataaaggagacggacagagcaccgaacactttgtctgggaaatcaatgttcctgtctcaaattttgctccggttcagcttacctatactgtcagactgatgaatccgaagacggcctccggcacttacggcgtctatgataaggacggaatcggcgacgacgggaagcaggcggaaggcggcctgtatacgaacaacagcgccgttctttatccggtggattccaacggaggccagggagtgcctgagaatttctataaaccgacggtatcctacactataagctccggaggcggcggaggcggtacgacgccgtcgaagccggagctcgaaaaagaagatcatttcgcctatatcatcggataccctcaggattatcagacaggggaagcgacctccgacaaaagcagatggccggttcgtccggaggatcagatcgaccgggaggaagtagctaccatattcttccgtctgcttacagatgacagtcgtgcggaaatatggtccaagagcaatcactattccgatgtttcgtcagacaaatggtctaataatgcaatctcaaccatgtctgccggaaatattgtaaacggttatccggacggtaccttcggaccggacaagccgattacgagagctgagttcgcggcgattgctgcgcgcttcgattcctcggagtattccggtgaaaataagttcagcgacgtctccggacactgggcagcagaatatatcaatcgcgccgcagaaaagggatggattacgggttatcccgacggtaccttccgtccggatcagtatatcacccgtgcggaggcgatgacgctggtcaatcgtgttctcaaccgcagaacgcatgcggaggacatgctcgaggatatgattaagtggccggataacccggaagacgcgtggtactacgaagctgtccaggaggctaccaacggtcacaagtacgaaaaacgcgaaaatccggatactgagtatgaaaaatggacagagattgaagatgtacgggattggtctgctctcgaaaaggaatggtcggaggcggcagtccgtgcggccggagaacgcggcaagattgagactgaataaaaaagtatcctgattcaatgaaagagaacgaggcgagtgtctaacgataggcgcccatacggcgtacgctcgtcaaaaactgacggccgggcggcgagctgattatcagcttgccgcccggccgtcgttttcttttgcagctgcagtaatttttcttttagctgcttcatacctcgcgtcgcagtccctgcagatcaatgttttgtctgatcttggcagaagcagagtcgtcagatcaatatccttttttcaccgcttcctgcagtacggtatttgcgactctgccggcggtagcggcacccgaaccgccgccttcgaccatgacgacgaaagacagcgggtgatcttcatcatcgagaaagccggtgaaccaggcgttagaagcttttgatttgtcgacttccgctgttccggatttggcgccgatatcgagtcccgggaaatttccacttccgtaattattttccacatcgcttttcatcatggatttgagcgtatccgcggtggattcattcaggagctggtctgtactgtgtttgatgtacagactggtgcgcaccccttcgtgaaaggcggtatgatcgatgatctgcgggaccgccgccttgccgccgttggcagccgcgccgcagaagatcatcagcgcgcagggattgaccaggtcttttccctgtcctacgccggaccaggcgagacccgtttcaccgtccgcctcgaaatcgaaggatgaagccgcggtgcggataccgttgatggagtatttatcggtgagtcccgtcttgtccacatattcctccatgacggaacttcccatttctacggctaactgtgcgaaagcgccgttgcaggatacgttgagagcatcttcaaaagtcagcgtgccgtgggctctgacacatgtcacggtcgtctggccgacttttgtactgccgttgcactcaaaagttctctgatggatatcggagatgttgtccagcgccgccgctgcggtgatcagcttgaaggtggagcccggggtgaaggtggaggagatcaggcggttgatatatacgccgtcgtaagtctcatctccgtcttctatgacaggaggatctgccggatcataagctggcgcgctgaccatgcagatgatctctccggtcttgtaattgtatacgcccacggtgcccttatggccgttgagggcatcgtaggccgcggcgcagacatctgcgtcgatggtcagatacaggtcctttccgccggagaagaacgtatcggcgccggtaatgggattatatcctgtcagcttagaagcgaactgcgtcagtgctcccgtgccgatcaccccggcggggtcgcctaccgcatggagcgtggcctttctcacacttccgctgtcatgaaactgccagcctccgtcgtaggcggcgaggacgctgccctctgtatcgagaattctcccccggctcagaacgccgtcggtgtacagatgcctgttggacggaaaggaaacccattggccgcctttggtgaagaagcggaatgtgaaaaacagcgtacctgccagcaggagcagagcgagaagaaaacagatgatcgtccgtgcggttatctttttcattcgtcatccctccagtctctgtcgtaatcatgtccgttggagtatcctccggtgaaattttttctgtcgtatatgccggtgcggctcaggtccgcgccggattcttccggttccgcaaatccgctgtgcacaccgtaatcctccggagtgaaaggatccggagatcccgcttcgcttcgatccttcggtgtgtcatcggccgtcggttcgtcgaacaggctgaaaaaatcgtcgatttcctgctgcgccgtcttttccgcgatccctccgggcggggaactgtcgagataaggaagggattcctctccggaattttcaaatttgctgaaaaattcttcgatttcccgttcattttcctccggcgtcttttttttgcggaagagaccgcggttttttttcaccggtatgttttcgtcggtcagctcataaagaggatccggagggagttctcccagcgcggttttctttttgacggcaaagctggcgttctgtcgggtatccgcagctttcagaaaggcgaggagtccccaggcggccagcatgctggagcctccgcaggaaataaacgggaaagtcacgcctgtcagaggcagaatgtccaccgatccgaagacattgagcatggtctgaaccaccagtagggaggtagccgcacatgcggcgatcgtgtaataggaggaccgtcctgtctgcaccatacggaaggcgaagatgcagagggttacgatacacattaccgccagaaaagcgatgatcagtccccactcttcgcagagcacgccgaacaccagatcggtttccgatgcggctacggtgtggagccatccgtttccggagcccacgccgatcagtcctccgcttgcggcagcggacatggtgcgcacctgctgatatcccatgtcgctggcctgttcccaggcatgtccccatacggcgaagcgttcggcgacgtaaggtttaaagcgcagtaccaggagcagagcacctacggcgcctccggtgatcagagacagcgtcgcgaaatccccggagcgcagaaaagcgatgaccagaaaggtggcgaagaagatagccgccgtaccgaagtcgctcatgatcgccagagatagcaggcaaaatccagacagacacataaagccgatcagatttcgcttttcaaagagccggtccaaagcggcggcccccgcgaagataaaacagattttcgtcagttcagaaggctgcagcgacatgccgaagatcgtgatccagttgcgtgctccgtggg

SEQ ID NO: 3212 - DNA, 7824 bp, Unknown
  16S sequences of unknown bacteria
cctacggcggcggagccgccggcccagcgggcccactcggcttctgcacagggtttgccaagggcagcgagcaccgggccaggcccctgcaccggctgtaaatacaaatatccggcctgccaaatggattcggcaagccgggatttttcgggaaattacggctccggagaggccgcggtcatatccagctctactttttcggtgggaatcgccgactcctccccggcattggcatcacccaactcggatttttcgctgtcctcttcatcatcccacaggctactgctccagtccttcgcattggaagcggggttctccccggaggattcatcggatttggtaccggaattggtattatccgtcccgttttcctcaggagcaggggtcgggtcggactcctccagctgcggcagggcggagaggatacacaccggctggccgttttcatccagctcgatgccaaggatctggcggccctccggggactgatacaacagctccaccatatcctccgccgggcggaacagataaacggcctgttcattctcatttccctgcaggaacagcagatggtcggcatccaaccaacgggcatctatgataaggccgacacgctgctggcagaggacagctttcactgtggaaaaatcagcggtgcagtacaccaagtcgccggcggcggtgctgtaataggccaggccgccctcctcgcaggagaccagccgattggggatgaaatccacaccatcctcatccatcaggcagcggaactgggtctcgctgagcaggggataaaacagggcaaagccctcctcctcctgggagttcatggtcagcaggtcgggggactgctccggcggaactgttttgtcctccgggtcggtggtatattggtcgggctgcttttccactacggtaagggcggggccattggcggcaaaaagcgtgttttcatcgggagattccggggcggcgctgccgcaggcggcaagacccaataggacgatgccgacagcagccatcatccaaaccgttcgtttcatggggcatcgccctcctttcgcggattctgtaaccattataacggttaaattgtgaacaaatctaccatcccggttggttattttaagaacttgggagatgggcggcatttttccgcgggcccttcttctccataaaaatcaagacgccgtctgcatctgcaaacagcgtcctttttcggtgggtgatcgactgttactgcaggatgtaaaccagcagggtgatcacaacaaaaatgatagccaggatcttggtcagcttggaaagcttggcattggcagaacggtcattgctgtcattgaggaaagcgctgacgccggccagagcggtgataccatcgcccttgccctcctgcagggataccacaacgataataagaatgctgatcacgatcatggcgaccgcgccgataatagcgagagtggacatctttttacctccaataattacaccctgtccggtacagggcatcattcgactacaaaatgataccacaaaccgcggcgatatgcaagccttttttgggcaaaaacaagacccggaggagaaaaagcaccgtggcgccttgttcccgaccgggcgtgtgggaaacgcccggccacgcaaacgccctccgggaatttctcactggtagtatggcccgccggggcggcttttatgcagccggccggatgggccccgcagggcggcgccgcaggcgccgtaggccgggcggagcccggccaggcccgcccggagggcgggtccctgcggggccgcagccgccggctgcataaaaccggggtgggggctgccgcgggagcgagcccgctcccggcaggaattcagaaaatcaaagctggagctgttcccctacttccaggtcccgcacaatgccgccggtggccggcagatttttggtgcgcaggcggtgatcattgggcaccatgccgggctggtaggacgcggcctccaccacgcgggcccccttcttggaaagggtcatgacctggacgccctgggtatcccgggcggccttggaaaggatcatagcggtatggaagatgagcatgcgggaggctgaagagcgcagcaacagctcggtatcctgcggcaggtaggtggcatataccaacggagatttggtgctgaaggccccggtgagttttttgcggcgggtcttggtctcgtagctggccatatccaccttggcggccttgccgttttcgaagatgaacagcatatagccctcatatttggtgaacagggccatatagaccggcacttcgccggtatccatgcccagcttactggccacatagtcgcccatcacgctggccttagtatcctcaaattctgctacgcgggatttatatacctggcccaggttggtaaagaacatcagctcggcggcattggtggtatccatctcctgggtgatggcatcgccctccttgagcttctgctccccgctcatgcgcagcgactggggggtgatcttcttaaagtagccctcccgcgtgaagaagacccgcaccggataatccggtacttcctccaccggttcctcctccatctgctccacctcgtacagtacctcggttttacggggggcgccgtattccttggcgatggcgcgcagctgattgacgatgatggtatccaccttgcgagggctcttgagggtatcctccatctcggcgatctcaccggtcaggctttcgatctcctcggtgcgcttgaggatatactcccggttgaggtggcgcaatttgatttccgccacatattcggcctggacttcatcgatgccgaagccgatcatcaggttggggatgacctcaacctcctcctcggtttcccgcacgatcttgacggccttatcgatatccagcaggatctttttcagcccctgtaagaggtgcagcttttcctttttgcgctgcagatcgaaatagatgccccggcggacacattcccggcggaacgccgtccattcctccagcagctcccgaacgcccagcacccggggcgaaccggcgatcagcacattaaagttgcagctgaagctatcctccagcggcgtcatgcggaacagcttctgcatcagcttatcgggatcggtgccccgcttgcagtcgatggtgagcttgaggccgccaagatcggtttcatcgcgcatatcgctgatttcccggatcttgcccagcttgatgagatccacgatcttatccataatggcttccactgtggccgtgggaggaatttcggtaatttcgaggcagttgttggatttatcgtaatgatagcggctgcgtacccgcacgctgccccggccggtggaatagattttatccagctcggctttatcgtacagcaggatgccgccgccggggaaatcgggagcgatgagggtatcggcgatattgtgctccgggtcgcggatcagcgccgccgtcgtttcgcagacctcggccagattgaaggagcagatattgctggccatgccgacggcgataccggtattgttattcaccagcaccgaggggaaggtgaccggcagcagcgtgggctcctttaccgtgctgtcgtagttatccacaaaatcgacggtatccttatcaatatcggcgaagagctgggtgcagatcttttccaacttgacctcggtataacgggaggcggcgtaggccatatcgcgggagtaggccttgccgaagttgcccttgctatccacaaaggggaccagcagggcctcattgccgcgggccaggcgcaccatggtatcgtagatggcggcatcgccatggggattgagccgcatggtttggcccaccacattggcggatttaatacggccgccggaaagcaggcccattttatacatagtgtataaaagcttgcggtgcgcgggcttaaagccatcgatctccgggatggcgcgggagacgatgacgctcatggcatagggcatatagttttcccgcagcgtttcggtaatgggctgcgagacgacctgcccggcgccttcgatatggccgccctttaccacacggcggtcaatttgcggttcctttttctttttgggtggcaagttattccctccctttagtctatttgttatatcaagacttgattatacgatatgttatggtatgtgcagggggctgggccgggcccgccgggcgttccggcgcagccggaaccagcgggcgaagtccgctgagtccgccgaaggcgggctgcccggcgggccatggccaggatcctgcaccggccaaaaattactccttgtaataccctgccgcacgcaggatgagcgagagagccttgagcgccgcgaaatgccggatcagattccgggcgtcggcatcgtggcggtcgatgaaaaggcggctgacatggctgtatttttcgctggccactgccacaaagaccagcccgaccggctgaccctcactggcagaggggccggcattgccggtgataccgatgccgatcgcggcgccggatttttgccggatggcggccgccatggcagcggcggtctcggcactcacggcggtgtactgctcaatgatagccggatcaacacccagcacctcggcttttacagtgttgttgtagcttacaatgccgcagccaaagacagcggaggccccggggacctcggtgagtcgggcagccaccaggccgccggtgcagctttccgcggaagcgacggtcaggccttttttcctcagggcctgtaccgcagcggtttgcaggtcaggcacatcgatgccgtagcagtagtcccctgccgcggccagtattttctttatcgcgggctgaagcagcgcttcggcgtcctcgccctccggcagagaggccgtgacacgcagcttaacctcgccagtgccggcgtagggggctatggtgggattggtactttcggccatcaggtcgtgcagcttatactccagctccgattccccaatgccataaaagtgcagctcgtggctcaccaggcgctggcccttctgcatcagccgcggcagcagctcattttgcagcatggggcgcatttcccgtggcgggccgggcagtaccgccacttttttgccgtccgcttccatcaggcagccgggggcggtgccattgggattgcgcagtacggtgcagccttccggcagccaggcctgcttttcattggtgggggccatttcccggtgggcgcgggcaaagtattcctcaatttctttgaggcactccgggtggagcaccagctttttgcccatgcaggcggccaccgtttccttggtcaggtcatcgtaggtaggacccagcccgccggtggtgatgacgatatcggcccgggaaagggccagctttaccgcctcggccaggcgcgcggggttatcccctaccacactgctgtggtagaggttgatcccaattccggccagggccgccgcgatctcggtggcattggtattcagggtgctgcccatcagcagctcggtgcccacacagatgatctccgctgttttgccctgcattgtttcgccttcttttcgggggatttaagagatatcggccagctccaggtacatgctgccgttttcggcaatgtaatccttgcggccctgcaaattatcgcccagcagcagatcgaacatcctggcggtctcctccacatcggcgggggtgacccggatgagcctgcgggtttcggggttcatggtggtcagccacatcatttcggcctcgttttcgcccagtcccttgctgcgctggagagaatacttggtcttggcggcatccaggtcacggcagatcttggccttttcggcatcgctgtaagcaaagtaggtatcgtttttcgcggtgatctcgtaaagcggggattccgcaatgtagacatagccctcattgatgagggtgggggtcagtcggtacagcatggtgaggatcagcgtacggatctggaagccatccacatcggcatcggtgcagatgacgattttattccagcgcaggttttccagcgagaaggaattgagctccttattggtcttggcggagacctccacgccgcaacccagcaccttcagtacatcggtgatgatatcgctcttaaagatgcggacataatcggccttgaggcagttgaggatcttgccgcggaccggcatgatggcctgatattcactgtcacggcccattttgcagctgcccagggccgaatcgccctccacgatgtagatttcccggcgggaggtatcccggctgcggcagtccacgaatttttccacccggttggccagatcgatgctgccggccagctttttcttgaggttgaggcgggtcttttcggcattttcccggctgcgcttgttgataagcacctgctcaccgattttggcggcgtcatcgggattttcgatgaaatagacctccatctggtgcttgagaaactcggtcatgcactcgtagatgaactgattggtgatggattttttggtctggttttcgtaggaggtctgagtggagaagctggaggacaccagcaccaggcagtcctgcacatcctggaagctgatcttgctttcattcttgaggtatttattgttatttttgagccaggcgtcgatctgattgaccagcgccaccttgacggcacgctccggggaaccgccgtgctccaggaagctggaattgtggtagtactcggtgatattgacccggttggagaagcagagggcgacccccagcttgacccggtaatcctccttatcctcgcggtcgcggccggtgcgctcccccgtccagtactgcacgggggtgagggggttctcccccgccagctcctcgcagtaatcccggatgccgttctggtagcagaaggtctcctcggcaaatcccttctcctgctggtcccgcagcaggaattccacgccggggttgaccaccgcctgccgcttgaggacatcggtgtagtactcccgcgggatggcgatatcggtgaatacctcaagatcgggcttccagcggatgcgggtgccggtctggcggccagtatagggctcggctttcagtccgccaatattttcgcctttttcaaaatggagattatagcgcttgccgtcccgcagcacctccacatccatgtattccgaggaatactgggtggcgcaggaacccaagccattaaggcccagggcatattcgtagttgccgtcgccggtgccatcgtacttgccgccggcatacagctcgcagaaaaccagctcccaattgtagcgctgttccttggggttataatccaccgggcagccgcggccaaaatcctgtacctccacgctgccatcggcatagcgggtggtgatgatctttttgccgtagccctgccgggcttcatcgatggcattggagaggatctcgaataccgagtgttcgcagccctccagaccatcggagccaaagatgacgccggggcgcttccggacgcggtcggcgcccttcagggtggaaatactctcattgccgtattccttttttgcttttgctgccatggcagttcccccatatctcgtagtttaccaagtatattgtaccaacattttgggcaccggtcaagcggtgcgaacattttttctttttgtgctgggtgaggagcggggcggccgcagggccgcggaccggcggggagggagggcttttggcctgtgcggtaccccgcggggagaaagccgcaagttggcggggagggaaagccgcccgcagggcggcccgcccccaaagcggcgggcctggcggggg

SEQ ID NO: 3213 - DNA, 12759 bp, Unknown
  16S sequences of unknown bacteria
gtaaatgcttcaaaataatattgcataaacaaaaagcaagaaagcttttataaagctttcttgctttttatttatttgtatatatttgctgcaacatatttcctgtcgctttataatatccctctgtcactgctttcaaaaatcgttctttattttcatgtccccattctagttttatcttttttccgtcttgcagataaaaagtatagattcttcctatactaaaactcctcacgtccgtatactcatatcttttacgcctgccgaaagaattttggtaataaaaacctgtttcatcataagtgattttaaagtgataaaatgcaatgagcagtatgatatctacagcaagcatgcaggcaaataaaatccaaatgaaaacaggatattcattggtatataacataataaaattaaaaaaagcaactccaatgataagtaccacattaaaaataatgcataagactggtgatattctgacctgatgattatcagcagcatttttgttccgataggaaacaaataccatcactcccaccgctacaatagtgggaacgataattggtatgatattaagaaaagtttccatcttgctcctccctgtgtattcaatgcatttgtacataaaataaattttactatagcaaatataattttaaaagagtcagagataacctttcacaaatgtattgtataaaatatttgtgaaaggttatcaataatttcaatttttatcgaattcactctaagcacctctcttctcagcttttcaaagaagattacacatatgattggtgttgatgtaaaacagattacttctattttctattattgatacaaaaaccctttttctctctcctttgactttacctgttcactatttttttcttcatgatattgaagaaagccttaaaatggaagtaaagcaatttttacatgtgctatactaaatttaaaaaggaaattggcaaaaataaaaaagaggtaggtaaaatgaagaaaacaccaaacttactcttatttatattagctggaatcacagcagtaagctgcaccgcttgttctaccggtaaagaaagtttataatacgaatgaatcattactaatcagtagtaatgcaaatacacaaggtactgtccatgtaaaaggcatagtttcaaacacagatgtgaaaaccgattcggacaatataacacaaatctataccacacatttttgagaaacaaacgcggttacttatccaagttttacatttgactatccgaataattggactatatctcacgaagaagtaacgcaaacgaatgaaacagtcttactggccaatgaaagagatgtaaccattcaaatttatatatattggcggtgtagctgaaggcaatttggtcggaggttctgcaacagatatgctgcgtgtagaagtttctaaagcaaaggattccagctttatgcccggatatgtacaagcaactgaccatacagatttgggaacatttatggtagcaaaattaaaggtaacaggacatttagatatgaagtctgatacagactttgaaagtgtggatggtgctatttcttacgcgatacttcctgaatcaagcattggtaccactgataatacaaggggaccatttgaaagtgagttttcattttggtacagtggttacgtttctttgattgcaagttcttcaaacggacaatttacagaaacagaagcacagcaagtaataaaaattctttccagttttagagtaggagcataataaacaataaaaagagatttcaaaacagtaacccactgcattgaaatctctttttcatcgtattctgaattattttattttgtacatttctctttcattcttccataaaatgaatataaataaaaaataatgaacagaagagattattctctataaacattagaatatgtttcaatatccatattacttataaaaatatcaaatgaaaagaaatcaatttatgtttgtcataactaaaaagttctatttcgtacattgccgtatgcgctctcattaaacgaaaggaaattaacatgtaaaaatacgatttgctctttcaatatcttccctgtttccttccctgtattttgcaaacggaaattctagttggagtgtttgatatttttcttcacatagctttctaaatgggagaaactctactttttcaatgcaagtatatccctgaagcattccttttaaacggagaagctgttctgtagaatcatttaaatcgggtacaagtacatgacgaatccaagtgcgaatatttcgtttttctaagacggctaaaaagtgcatgaccgtatccatatctgcttttgtatgcaaatgatacaattctttatctgaaaacttgatatcaagcagtaccatatctgttacattgagtaaatccaagacctcatcattcaggatacagccactggtgtccaaacaagtatgaatctggtgttttttacataaagaaaaaagttcttttataaatacaggctgtaatagcgcttctcctcctgagactgtcacaccaccatggtctccaaaataatatttgtattttaatattcggttgaatacttgctgaggggtttcataataggtatagttctgcctatgccaagtgtcaggattatgacagtatccgcagcgaagcggacatccttgcataaaaaccaaaaaacgtattcccggaccatccaaagtacccatactttgaaaggaatgaatatatccttttgtcatattacattgcctcatggaatgtgcgcttgatgacttctttttgctgttctttggacagcttatgaaaattaacggcatatcctgatacacggatagtcaaattgggatatttagaagggtcttcatatgcttcttccaatgttttacgatttagtacgttgacattgatatgctgcgcttgctgtaaaaaatatccgtctaaaatcaccactaaatgattcactctactgttttcttcactgcccaacgcctgaggtgtaatggaaaacgtattagaaataccgtccctacaatcatcataagatagtttagcaacagagtttaaggaagccaaagctccgttttcttctctattgtgcatgggatttgccccaggcgcaaatgcttcttttgcttttcttccgtcaggcgtagcacctgtttttttaccatacattacatttgaagtaatggttagcacagataatgtatggattgcattgcgatatgtctttgttttacgaagttcggttatcatatcatgtaaaatttcccgggcaatcgtatccactctgtcatcgtcatttccgtactttggaaattcacctatggtttcaaaatctacgatataaccgttttcattgcggattggttttaccgttgcatatttgattgcactgagtgaatctgctaacacggacaatcctgctacaccacaggccataaatcgttctacctctgtgtcatgcaaagccatttgtgttttttcataagcatatttatcgtgcatgtagtgaattacatttaatgtattgatatacagcttgcaaatccattctttatacatttgaaatcgttgcattaccttatcataatccaatatttcatccggataaaccgttccttttggaccagcttgtgagttggaaaaggtatcaaatcctccgtttaaggctaacagcagcaattttggaaggttgcagcgtgcgccaaagaattgcatttgctttcctattttcattgcggatacacagcaagcaattccatagtcatcaccgtaaatgggtcgcattaaatcatcattttcatattgaatagaatccgtatcaatggatacctttgcgcaaaacgctttaaaaggttcaggtaattgtttcgaccaaagaaccgttaaatttggttccggagcaggtcccagattatataacgtatttaaaaaacggtatgtatttttggtaaccagtgtttttccattttccatcataccccctagggattctgtaatccacattgggtctccaccaaataattcattgtaatccggtgtacgaagatgccttgccattctcaatttcatcacaaaatggtctaccagttcctgcgcttccttttctgttaagagaccgttttgtatgtctcgttcaatataaatatcaaaaaaactgctgactctgcccagtgacatagcagcaccgttttgttctttgatagctgcaagatatgcaaaataagtccattgcattgcttccctggcattggtagccggttttgaaatatcataaccatacatttgcgccatttcttgcatatattttaaaaactgaatttgctgatataattcttctgacaaacggatttcttccacatcaaatccgtttattcctatttgctttttatcctgctgtttttcctgaatcagcaaatccaatccataaagagcaactctgcggtagtctcctataatccttcctctgccgtatgcatcaggcaatcctgttaaaatacctgcatggcgtacttttctcatttcttccgtataaacacggaacacgccatcattatgtgtggtacggtactgaaactcctgttcaatcttatcagataatttgtagccgtacgcttgacaagcttttcgtgccatattaatcccgccaaatggattcactccccgttttaacgggcgattggtttgtaaaccaacaatcaactcttcctctttgtctaaatacccgggttgatatgcggttaaagaagaaacttcctgtgtatcaatatccaaaacaccaccaaaattctgctcgacactcagtagctgattcagcttttgcatcaaacgttgtgtacgttcggttgctcccatcagaaaagagtcatcgccttcatagcttgctacgttttgatgaataaaatcctgtacatcaatgcacttcttccaagtttcaccatgaaatccattccattgctcaaatccttgtgtttccatgttatcctccatcatatcgatatccactgcggataacctttgaagataacaaaaaaggcaatccacaagtggattgcccagacggtcggctttgatattttctatgctcccctgtggtatcccacatttccgtcagtcacatagaagattctttatgtttgcagtataccacattgaaaaagtttgtcaataccctattctatcatttgattaatatgcatcgctcaatggattgagtacgccatactcttttttatccatgtcatcaataaattgaatagcttttcccgcaccttccacaacacaagtagcaggattatctgcaatgcgcacaggaatttctgttttgcgggcaattaatttatcaaatccataaatctgagcagatgcacctgtcacaataataccgtctgataaaatatctcccatcaattcaggcggcgtagactgcaataccctttgaatttcttgtgtaattttcattgcaggttccaataagcattccaacatttcgtcgctggtgacatctgcatattgaggtaaacctgtaattaaattacggcctttgattctatgcttgacaagttctgttcttggatatacacagccaatggcaattttaacgtcttctgctgtccgttttccgattaacaggtgatacttaaagcggacatatttgataatggcttcatcaaacacatcacctgcaatgttaatggtttttgatatggcaataccgcttaatgagataactgccatatcggttgtgccaccgccaatatccactaccaaacacccatgaggctgttcgatattcacgccggcaccgagtgcggcggcaatgggttcttcaatcaaacagatttttcttacgcctgtagcgctaatagaatccacaactgcacgacgctgtacttccgtcatttcacacggaacacttaccacaacgcgcggcataaatactttgctgtctgtaatcttttttaaaaaagattgaatggtatattgaatcaaatcatagtcggaaataacaccgtggcataatggttggacgacagatacgcgttcagaagttctgcctaacatggcataagcttcattgccgattgctataatttcatcattaattaaatctacagctaccactgcaggctcattcagcacaatacctttgccttccatatagattttaattgtcgaagtacccaaatcaatcgctatatcttttcctgccacgtgttcaccgcccatcatctgccataaatatcaattcatattatagtatatcaatttgtattttgcaatgcggcatcaccgccaaatacaaacatttacgaaaggtttacaaaatgatataagttactactatatatattttatatcttgtcaattaatattaaaaagcatccacactgcttttttcatcagtctcttccttagataaaaagtcttttataatgttctttgcagcaacaaattcatctccatacagatcactaagatacttagtactttcgcctctatcagattctacaaaatcaaataaaatccaagttttattatctgatgaatattcactgacaatccccggataacattttccttcaattagatcgttaaaaacattctctggaacaaaataaacaaaattcaagcaaaattgattttcaatataaacttttttgagaaagttatatgtagcatataactgacgtctaccttcactaccaacttgactatgaaaaacaaggggtcttggaaaaacttcatactttaatttatctatttctttaattacaagaatctctgaccgactttcactcttcctaattgcaaatattaattttttgctgcaatctatttgtaatagcccctcttcatacttaaactgtattacagatcggaatggttttaagttagtcccatgttttaaccattctttatttacccctaatttttcagctacattttctataaaagtatatttgggttctttattatctaaataatattcttttaattcatttaccgattcaaaacctaaccattctcctatatattctaaattaattctttcatcaaaactcttgttctgatttattagataaatgatatagtctagccttttagcaaaatttgtattatacaactcttgttcaaaagttgcaattattctttctgttttaagcaaactggctgctgttcgttgtttattaaactcatccttttcttcattaattttgtatataaattcatcatatataccgttctctctcttcattttattaccatagaaattaccaaacactgcactataagttaatttcgctcctgttttgattaagtcatacactaaactactgagtattgtatataaaaaatccataaatatatttcctttatctaaatttatactgactatttataatacagacttttcaaagggatcccgtgtgtctgaatatatattcggtctgcaggcaacagctccgcacaatacttcttttgcaccatgtttcattaatactgccgcacattctgccaatgtataacctgttgttacaatatcatctatcagtaaaactttcttattgataatatacttattttctgccagttcatacacaccttttacattttcttttctgtctttcaaatgcaaacgatgctgttctgaattatgctttgtttttatcatacaatttatatatggaacgcccaggcattcggctgttttctttgcaatcagttcagattgattgtatcctctttccttcaaacgttctttggaaatgggaacactgaccacaacttcacacatagattccattcctttatcacagacagcttccgccaatttgttaccaaagaaagtaccgtattgcggtttatgataaaacttaaagttgacaatcagttcttgtattttatcttcatataaatatggcgctatacaaatgccatgaaaagattcattttccactttagctgtttgaatgtcatccaagagaaagattttatcatcacactttttacagatgcaggaacctattggaacaatttcattgcaaaatatgcatctgggaggaaacaacatatccagcagtttacttctcaaactctgctttctcatggtctgtttctcctatcataaaataatataagccggaatatcgtcttgttttgcggtcattctctaccatcgtatgaacagtacgttccatacctaccagtattaccatatttttcgcacgagtaatgccggtatacaataaattacggtagtacaattgaggcggtcccggaaacataggcataatcaccgcagggaattcattgccttgacttttatgtaccgtaatggcataagcatgctctaactctgatgcactttccatggtatacaatacaaatttatcatctacctggacaattaaagtgccttcccttttgtcaatttccagtaagatacctacatcaccgttataaacaccttctccgcacgtgccatcttctttgctccaaggtaaattgtagttatttttgctttgcatcactttatcgccttcgcgtaaaatgatttgatttatgacaacctcacgtttttcctcatggggtggattcaatttttcttgtaattttttattaaaagaagcagttcccaattctcctttacggcttggacaaagtacttgtatgtcattgaacggagaatagccgtatgtattgggcaaacgttcgctacaaagacctacaatggtttgtgaaatacgttgactgtcattgcatggcaaaaagaaaaaatcattgtcttttgttcgtaaatcaggcatttgcccgtttacaattttatgcgcgtttgtaacaatcaaactttccatggattggcggaaaatctcatttaactgcactactgggagtaaattggtgtcaatcaaatttcccaatacgttacccgcacctacagaaggcaactgatcgctgtctccaaccaaaatcaatctgcatcccaatggaagcgcccgcagtaccccctcaaatagcgttacatccaccatggatagttcatctaagattaaggcatcgcattccaataaatttcgctcatttttactgaacgtaggacgttcttgctcattccactctacctgaagcaaacgatggatggttttggcttcgcagcctgttaattctgtcatgcgctttgcggctcttcctgttggagcacctaacagaaccttttctccttcaaattctaaaatttgtatgattgcatttaaggtagttgtttttcctgtacccggtcctcccgttaaaatgagaatacctttctccaaggcttgacaaattgcctttttctgtttgtccgcatattgaatgttgtatttttcctccaaatcctgaatatacccctcggcacctactatggattgagcaggatattgaagcagcatcatgagtctctgtgcacaataggtctcagcgtcatacatacgattggtaaagatgtattcccgttctccaaacatgtcatatgagaccatttttctttctttcatctgctgtaacgtagtaaccagcagttcatgtgacacatctaataaactgcatgctactttgattaatttatctgttggcaagcacgtatgaccgttattgatattgtgagataaaatatacaaaataccggactgcaaacgaaaaaagtcatcttgaggtgtgttaaattgctctgcaatggcatctgcacgtacaaaatctatcccgattgattcttgacataaacagtaagggtcatgttccatttcttcttttgcacgatttccaaacgccttccaaatacgtatggattcttccggtgtaatatgatactgctttaaatacagcattaattctttgattccaaatacacgctgaaactcgtcatgaattttttctgctttagacgccgtaattcctttaatcgcacaaagtctttccggctcttgttcaatgatatccaaagtttgttctccgaacatctccacgatttttgcagcggtagccgcacctactcctttaatggctcctgaagatagatattttaaaatagcccctgatgtagccggtttggaacgctcaaaggtttctgctttgaactggtctccaaatgtaggatgattgacccatgtaccaataatctgcaattcttccccacaactcacatatggcatggtacctactaccacaaccaactcatcgccggtattcagttctaaaatggtatatccatttgattcatttttaaaaataatttgctctacggaaccaacgagttccaaaagctgcttttgtgccatagtttcaccgaaatccgtttcttttttatccagtataatactttttcttgcagattgcaaacctgtgaaaatggctcaatcaccgcaaatgattatgcactatcatattcattcgttatgataaatatttaattcaaaccagaaagtacttccgtgaccgacttgactttttacaccataagttgcaccttgatgcatatctaaaatggtctttacaatattcaatcccaaacctgttccgattgctgctcgcttgtgatttttatctactttgtaataacgctcccaaatatcattcaatttactttgctcaattccttcgccggtatcaatcacttcaatacgcacacgattctgttttccgtttacggctggaatatgtatctgtttaatggtgactgttttatcttctccaatataagtaagcgcattattgattaaattatataccacttgagataattttaatgcatcaccatatacgtaaatgtcttcatttgcttcaaaaatgattttatattctgtcagctttgtatatctggtcagtatttctctgatattttcggttaaatttaaaacttctccgttaaaaggaatggtacccgattgtaatttggaaatgtccaaaacatcattgaccaatgtagttaaacgtttcgcctcatcaatgataatctgcacattttccggtgtattttcatttggaatatccctcattacttctgcgtatccggtaatcattgtcaatggggtgcgcaaatcatgggagatattcgcaatcagctctctttgtaatgcttccactttagataattcttttgcagcataatttaaagtgtttgcaagctctgctatttcacggtaaccgcttgcatcgaagtccacgtcgtattttccttgtgccaagacttttgcagacttattaattttaacaataggtgatgataaattttttgcaagcaacagtgccataatgaccgccagcacaatcataatcacagtaatccaaagcaactgtactttcaatgtttggactgtagatacaaccggagaaatagaggtatttaataaaattaaaatattttctccacttttagtcgtggctattttcgtataaattacactttcaatttggtttgggtcgtctgtttcacctaagaaaaattgacttttcctttcattgaacatggttcgttcaatgaaagtaccaccattctgtacagtcagttcataagcccttgcaaggcgataggaagataattcatgaataatacaatttggtaaaacatcaatggaataaataacagaaccatcttgggtgcagagcgtgatacaaatttgtttgtcgtttgcaacattttttaacacggtagacaatttatctgaatcaatattgtcactgatgtctttcaaagaattttcaatgtcatgaattttgatggagcgataaaacgtatttaacatacctatttgaaatacccacaataggcttaaaataacagctataaacgcaacaaaaatagcaaatatcttccagaaaatacttactttctctttgcctttctgtttttttcgtaatagattattccacttcaaatcggtagcctacccctctaagcgtgacaataaatttgctgtattttccaaggctctttctcagcaattttatatgagtgtccaatgttctgtcatcaccgtaaaagtcatatccccatacatttgtgattaacatttcacgggtaagcgcgatatttttattttctgacatataaaacaacaaatcatattctttaggtgataaatctattttttcgccatcgactgttacaatacgtgcagtatagtcaatgataagtccttcaaattcaaccttgtcattggactgcgtttgcggagaagaacgcttaataacagcatttatacgcatcatcaactctttaggagaaaacggttttactacatagtcatcaattcccaattcaaatccatgaattttatcatattcttcaccgcgtgccgacaacataataacaggtgtattgcaattttttctaatttcttttactgcagaaaagccatccagttcaggcatcataacatccatgatgatgatagaatataaatccggattttgacggcaaagcatgactgcctccataccgtcagccgcttcggtaacggtatgtccttcaaattcagcatatttacgaataatctgacggattttttcttcatcatctacaaccaaaagatgatacatatcaatttcctctttcctatttatcaagtttatatatgtattttaacgtatatctgtgaagatttagtgattattttcaaaattataacataaaagaaattgcatggcaatttctaacacataaacgttaaaacgttcttgctaacagccaaaact

SEQ ID NO: 3214 - DNA, 5140 bp, Unknown
  16S sequences of unknown bacteria
ccggcagcatcggcaagcgttaccgccgtcaggatgccatcggcacgccgttctgcgtgacctatgactttgaaagcgcagaggacggctgcgtgaccgtaaggcaccgtgattccatggagcaggtgcgtgtccggatggacgagctggagagctatatcgcttcaaggatcaccttttgattgaacggccatggctcgtttaagcgaacaggagatcagccgggtccgtacgcaggccagcatcgtcgatgtgatctcgcactatatcccattgaacaagagcgggcggaattatcgcgcgatatgtccttttcacgatgaccacgatccctcgatgaacatctccgaggacaaacagatcttcaagtgctttgtctgcggggcgggcggaaatgtgttcagcttcgtgcagaagtacgagaagatctcgttcatcgaagctgtctacaaggtggcggaatatgccggcgtgacgctgtctgcgccgctgcagcgggtgagcgcgccggcagtggaccctcatatcgccgccctgcatcggctgctcaacgagatgatccagtacgcccgctatgagctggataccgaggccggcgcaaactgccgcgcatatcttggacggcgcgggctgaatgaggacatcatccagactttccagatcggctatgatccacaggatgacgcggtatatcgctatctgcacgccaaaggcttcagcgatgcggacatggtggaatgcggcgtggccagcctggtcggctcgcggatggcggatcgctttgccaaccgcatgctcgtgccgatccacgatacatacggcaatccggtcggctttaccgcacgccgtctggatgattctctggatgaagcgaaatacatcaacaccgcggaggcgacgctctatcataagggcagcctgttgttcaactatcaccgggtgaaggagcacgcacgaaacgagcagcgggtgttcctggtggagggcgccatggatgtgctggcgtttgagaaggccggcatgcacaacgcgctggccacgctgggaacggcgtgcaccgatgagcagatccgcctgctcaaggcgctgcgctgcgtcatctgcgtatgctacgacggagatgcggccggtcagaacgctacgtataaatttgccaaacaggcgtccgccgcgggcctgcgcatcgagatcgtgaacaatacgaccggccttgacccggatgagatcgtcgatacttatggcaaggatgaactgcgcgcgctctgtgcgcggaccgtctctcatgtcgactttctgtttggctatctgcagaaacgctacaatctggaaaatttcacccagaaaaaagaatatgcggtggagatcgctgaggagatccgccgcgtcagcgatgaatttgaacgaagaaactattatctgcggctgaaggagctttccggcttcgatatggagatcccgctcgatcaggaagcgcctgcgcagcgggagaagccgcagcatgaaaaacgccagtatctgacttaccccaggagcgggcagatgcaggcggaatatgagatcctttcccagatgctcagcggccctgcggccgtcgatgtattcaaggaagaacttggatttttcaaggatgacaacagtaacaaactagcaatgtatatgatcgattattatcgcggccacgagcagcttgacgtcagcgaactgtatgaccagatcgtcgaggagcccgtgcgcgatctgcttttgaatgttgctcagtgggagctcgcccgcggagagatcgatccgcaggtgctgcgtgaagcagtcaccaaggtgaagacatgcattctggaggacaagatacaggcactcaatgaacgagtgaaaaacgtaagcgatccgatgcagaaggcacagcttgccatggagaagaatcagctgatcgttcagcgcaatgagctgatccacaaggaaggaagttgatagaatgagtgcgaaaaaagtgagtgcgaagcattacaagacactggaggagatcaaggaggaactgctcgaatccatgaaggatgacagcatcgtcctgacgcagaaagatctgatggattccatcgatcacctcgatctcagtgacaaggatgtggacgacctgttccaatggtgcgcagacaacgacatcgtctttgaggatgacgaagaggacgatgacgagctgctgctggatgtggatgacgatgacgaagtgctttctgccgatgacagcctggacttcgacgacgatgattccgatcacgcgctggccaacgagctggaaaacctggaacagtcttttgccaacacttctcacacgaagatcaatgatccggtcaagatgtatctgaaggagatcggacgtgtagatctgctcgatccaaaggatgagccggagatcgcccgccgcatccaggccggcgatgaagaggcgaaaaagacactgatcgcagccaacctgcgcctggtcgtctccatcgccaagaaatatgtcggaagaggaatgcttttcctcgacctgatccaggagggaaatatgggactggtgaaggccgtggaaaagtttgactacaccaagggcttcaaattctctacatatgccacctggtggatccgccaggccatcacccgcgcaatcgcggatcaggcccgcaccatccgcatcccggtgcatatggtcgagacgatcaacaagctgacccgcatccagcgtcagctcgtccaggatctgggacgtgatccgaccgcggaagagatcgcggagaagatggagaacatcacgccggaaaaggtgcgcgagatccagaagatcgccctggagccggtatcgctggaaacgccgatcggcgaagaggatgactctcacctgggcgatttcatcgaggataaagagacgctctctccggatgaatatgccaacaaccagctgctgaaggatgagatcaacaccgtgctgcaggggctgaccgaacgggaggaaaaggtgctccgcctgcgcttcggcctgctggatggccgtacgcgcacgctggaggaagtcggcaaggaattcaacgtcacccgtgagcgcatccgtcagatcgaggccaaggcgctgcgcaagctgaagcatcctacccgctccaagcggctgaaggacttcgtggataagccgtaatgacgcatctggggatccggctgcaggccgtcgtcgacatggtcgacaccggcagcgtcgccgcggatatcggatgcgaccatgcgctggtctgcatcgcgctgatcgagcgcggcatctcttcccgatgctatgcctgcgatgtggcgcaggggccgctgtcccgtgcgcggcaggcgatcgaggaagcaggtctgcagggaaagatcatccctgtgctgcaagatgggatcgtcggcctcgcagatgacgtggataccgtgatcatcgccggcatgggctttgagacgatccagaagatcctgctcgacggacaggcgcaatgggaccgttatcgttccctgatcatcgccagtcataccgatgtggaggagctgcgccggtttctgagcaacggccatttcgtgatcgatcaggaacgcatcgtcaaagagagacattattatcagattataaaagcgcatcatgagcgggaggctgccgcgctgagcgaggatgagatcctgtttggccttcaccgtgatgatgatccgctgttcagggaatattgggaacgcgagctggagaaatgccggctcatcctgagccgcatgcctttaggacatgaacgccggcctgcggcggagctgcgctgctcgcgcatccagcagcggctgaacaaatgaaaaagactgcagtttgcttgatgactgcagtctttttgtcatgagctaaagaatgtcctgcaggatgatcggcggcttgcaggcgccgttttcccagttctccagataatcgatgacctgtgcggtcagataggtcggcgtgctggcgccgctggtgacggcgacgacctcagcgccttgcagctgttcatcttcgatatcctggatcgagtcgatgagcagcacgcgggggatgccctgctgcgcgccgatctgcgccagacgcttcgtgttgttggagtgcgtgtcccccaccacatagagcacatcgacatgctttcccttcagatcagcgaccgcctgctggcggatgcgggtcgcgttacagatctcttcgctgatgtgcgcctggggataacgcgccttgatctgttcgaacagctgacgcacatcatagatggacatggtcgtctggttggtgacgaagatcgcggcgtcctctgcgcacgcggggatgtcctgctctttggtgatgagatggacatgctcgctcagcgcacacactgcctccgcttccgggtgacgcttctttccgatatagaagacctcgtctccctgattcagccgttcgcgcacgagctcttgcgtgcgcaccacatcgggacagctggcgtcgacacagatcagccccttttgctctgccttcgctctggcctgatcgctgatcccatgggcagtgaagatgaccacgccgctttccacttcatcgagcagctgcacccggtttcgctgcggatcctctatggtgcggatgccgcgcagggcgagcgcgttcttgacgtattcattatgcacgagcatgcctaaaacggtgatgggctggtcaggatagcgttcccggcactgcttggcgatggagatggcgcggaccacgcctttgcagtacccgcgcggacttactttgatgatgttcatactgattcctcctgcagttcattatgacacaaaatgcgcataagcacaaaacaggatgatgctttgcgcggaaaacacggttgaaaaaaggctgttttcatgtataatgaattcgtttgaacaggaggcgatgccaatggaaatcaatcagctcagccagcggatgcagaggctgatggaactggagggatttcattcccttaccccgatccagcaagaggtgatccctgtggcgctgcagggaaaggacatcatcggcatttcgaatacgggaaccggaaagacgcatgccttcctgctgccgatcctggaacagatcgatgtatccagggagatggtgcaggcggtgatcacg

SEQ ID NO: 3215 - DNA, 15210 bp, Unknown
  16S sequences of unknown bacteria
tctcgtgggctcggagatgtgtataagagacaggaagtggacattggcgggagcatcctccgtgatctcgaacagccggttctggatgcggagggtagagtcttccagacagaggtagagtgtggtgccctgtttgacgggcatcccccagatgggttcgccctttgccaccatgacggagagccacagcgccagccaagacttacccaccttgggtgagccagcaaggatgtgcagtccttgggacagcagcgtgtctaccacaaagttcagcggtgtgagcggaaggctcatcaggctctcgccgtcaatggtttgcagtcgtttggttttgttcattggatcatctccttgtaaaaaataaggacagagaccgcacccacactgcggtctttgccctttcacttgattattctctggattttgatataatgggattgtcgcaagacagcatctaaaagcatataggacaggagggcgaaaaaatgccgctggagatcaatcagtacaatgggtttgataccttttctttgcactaccggaaggatcgtgtgtaccatgcgggtaaagaatttccagccgggttctttgccgccgagattctgaactttgctggtgagatccatgacccgctgctcaagcgtatcaccacattgactgaactggttgatgatgcgacaactgctgaaaaagaaacgagccgcgaactcttgaaggagctgcggcctttgctgaaggatgctgtggcgtggatctatacttgtcctccattttgttatcaggacagtcaacacgaatggcattcattcgaactggcgatgaacagtgaccgcttcgaacaggatcgtgaggattctccaaaccatcttccatactattttctctcattcagtgaagaggttttgaaaattctggttgccatttacaatttctgtctgcttgtgcgagcgtttgaaagcaaatatctccgcaggctgacaaaacgaacagagagcgctttcgcaaaagcggcacacgaatgctttgatgaggatgatggttttctgattctcttggagcaaatgccctttggcgagatagaagaattcttttctaagccacggctgatctccggcttcgactatattcaggacccgaatgataaaaacaactggatcacagtccaccaggttgtatgcaaaaggcttatagatttttatgtgttcgatctgttgaatggattgcagtgtgggcatggtcccagctggtgccgcaactgtcaccgctactttttgacgaccaccgcacatgttcccaaatactgcgacggcattgcaccgcaagacagtcgtatgacctgccggcagtacggcgctatgatgcggcagaaggagcagaataaaaatcatcccatctatcacacattcaccacccgcaccaacaccatccgcaagcaccaccagagaggaaaaatctctgatgagctgcgtgagcaggctctctatgtagcggagtgcctccgggacaaagctctgatggataacgactacactgccaacggctatgcgcaggatatggagcaggagcgtgtctatgcggaagccagaaagcggctgaaatgagaaagggggggccgtcccatgtcaatgaatatgtacactgttgccggggactgccccagcaatgaagaactggctctgcggatacaggatggggacaagaatgcagcggagctgctcctctcacagaacgaggggtttctaacctccgctgctattcgttataaaaaccacagtcgcttttccatactggaggatctaaaacaggagggcgccattgcactgctggatgcggcacagtccttcgacttagcgcatggtgctcaatttttgacctatgccacgcctgtggtggaagcggctatgcaggattatgccgccaagaattctttgtctgtatgcctgtcacccaaccgctattatcaactccgtaaggtagcaaaactctgtgtcacaaacgataacaacgctgatgaacaaatcatctctaaaatccaaaaggagttgagtgtatccgcgaaagtggcgcgagctctgttggtggactatctgatgttcttccgggatatcgaattggatgccaatgagtatcgtgtcagcattggaggcgatcctgcgagggcctatgaccgccgtatgcagcgggtgctgctattccaacgaatcgaggaagtgctgaagcccagggaactgaccttggtgcggcactatcatggcatcggcctgccgaacgagaaagggatgacttttcagaaactggcagttcaactcaactacaacggtcccagcggtgcggagaaagcatacaaggctgcaattcggaaattgaagaaagaactccactctggtgcttatggacagtggctctcaattcaggaagccatcaacagagccagagcggaagccgcggcagactctgggcattacgcaacgccacaggccacatggttggatgaaaaggatctggcggagcagtttatctgcgaggtcgctgtgttggcctgtgtaaaagagatattcagtgaggcattggagaatgaagaaaaatagcagtacggtaccgggtgtcagtctgataccgtactgctattcgcttattctgaatcttcctttccggacatagaaagagcgcccgatctcttcgccgtacagcgagagaacgaacgctctttttcgtattgattcagttctgcgaagagccgccacgccagttcaaatccagagatgaaactgtcgatggaggtatcctccacaatgcgatctttggcatcgataatctgcagcaccaaccgccgctctggtttctccagcacatcgacgagggcttggtggcattcttcgacttcctgcttctgtgccgaaagttccggtgagatataaaagcagtcgtacaggtctttgagtagtttgttcatgtgttgcacctccaggtagcaacacacgatatcacaggaagagaaaaatagctatatccaacaacccaaaatcagtaaattagcaaagcacgtcctgcacggacactcttttcataactgcaaggtagttcgtcgattaactcaacaccagccggctcaatatacttttgtttaaaatgctccttagcttcggcggaaaaataatcatcatccaacataatatatcgaataccggaggttaatccaagccgttgcatataaaggccaactttaaacatggtgttgatttgcacaaacgaatcaaagacaccaagcatttttgctattgttccattgggattttcggaaaatcctacgccatctacattaccgaccaaataaactggttttccagggtgaaactcattgtaccggtcaatcaacttcttaatatctacagtctcatctgatttatttacaccatactgtccaggatcagatgtatgaatgagagattgaaccaatgcgcggatatctccatcagcatctttgataatcaggtcaaaactatgaatgcctgctgctgccgcttcatgtgatacaatttccattgtggaaaggttgacattgggatcgcgttctgccatgggagttaagtgcttactttcgggataaatagtcgcccctgcgtcataaaaactctgcgcaaccaactgttccgcaccatgcccgcgatactttgcttgtttttgttgtatctctttaggagcaatcaaattattaaaaatctctttcaccaaatcttctgacaacgagaggaaagcgttcaaaatttgctccaaatcattggaaacaaaatattctgaaatcagtttggcccattcttccttcccttggcgggacaatctgccagcaaaccatgctgtgctgtgtttaattaaatcctcacgtttttctgcaaccagcctttctccgttggctgttgttgatatatgggcgaggtatgtcatatccaaatagaatcgcttgtcggatataccaagcaaaagacgaatatcgtttatgaaattagggttatgtagtaaagccttctggatggattccgaaaaagtttcctgtatattatttcgatagtagtcgagaaaagtgagcaaaccggctacaacactgccgtcaagcgcttcccctctgtaaagaggaatgtcgttctgtggcgctacacaataccaaaactcttgtagcttgttcatagttatcctcctgtcatgttcacgaaaacaattacttgcatttaagatgaaactattgtaatatattttctgtcatatgtacagtatttttttcctttgcacaatggaggactttatgtacgatcttcattctatacatgcgcagcttcaagataaaaagtcaccactgttcagaaccgagcagaaaatgattcattgcctgtattgcaagatggacaatctgcagggcaatgaagatcctttgtttttgatgtggcagaatgaacttgagtttacctatggaaatctgagtgaactgctttctcagaattcaaaaatcaatcctcaagagttatgtgagttgtatgggtttgaaaattcaaaagaagtaaatttgtcccagcttttaaaatgcattcaaaccttctataatgttctaattaagcttatcacctacaatatggttcagggaaccgttcctaaagagaagggtgatactaacgacacctcaattgaatcgattttatcaggaaaagccttcgtcaagtttggcataaacaattatagctacgatgactggttttcttggattttaaaatattgggattctgatatagaagagcattgttgtaagcttcggacatgtttagaagcagaaaatacgattctctcaatcaaaggatttattcaaagctttcgttcagatagtctaaaacacatttacgaaactgttatcccgaaagaaattcgtcatgcacttggagagtactatactccagattggcttgcaacatgtacaataaaaaacgcattgaatgcaagcaaggaaaaagttacggaccttcgtttcatagatccaacttgcggagccggaacctttttgaccagagtaatgcgaatgattcaggctgaatctttgaacggatttatcaatccttcgatggttgctggctttgatattaactctcttgctgtccttactgcgaaagccaactatttagcaaccataatagaccaaataagctcttactctgacttcgtcatccccgtatatcattatgacataatcaatactcctgcgcttgaaggagacaaactgatagttgacactaattgtgatttgatttgcgagattcctcgttgtatttgcaaaaaagcagaacaacaaaaactgtctttttgcgccgacgattttttgcaattgatatgtcagcatgaagattgcgcagaactacgcaagagctttacacactatgattctaccaatcaaaaaataatcgctaatatacttttgaacagaatttttgctttctatgagagaaaagcagacattgttgtaggaaatcctccgtgggtgaactgggagtatctcccacaaaaatataaagcgaagtctcagcatctttggccagagtatggattgtttaatgctaaaggccgggatttgagcttttctaaagaagacatttctatcttagttacatatgttgtcatagatcgtttcctcaacgaaaatggatatcttagctttgttttgcggcaagccatgtttaagtcagcacaaaatggcgtcggcttccgccgttttaaattagagaagggggataccgattttagagtattacaagtggatgatctgtgtggtgtaaaaccgtttgaggggattaatagtcgaagcgcacttgttcttataaagaaaaatgaaaaacatacttttccagtaccttacaattgctggacaaggagaaaacattttctaaaggcgaccagagaacccgatgcaacagcagactcaattatgacgtttgttgatgtagaaaaaatgattgcgtttcctgctgacaaaaatgatccatcttcaatctggataaactctccggaaaggatcacttctgtaatagatacggttttgggaagcaactcatataaagcaagaactggtgtttttaccggaggcgcaaatgctgtttattggatgaacatagcagaaaggtctggcgaaacaataaaaatcagcaatatagtggagagagcgaaacggaaagtaaaagctgtaaccgcagagattgaacctgtttttgtgtatcctttagttcaaggaagcgatatctctcaatggaatgttaacactaagtcttatattctatgccctcatactgctgagacaaaaatgtatcctgtggcagaaaatgttttgagtgccgttgccccaaagacactggattacttggccgggtttagagaagatttggatgcccgtaagggttttgccggctgggaaaaagagattcaggcacaacacttttactctattttgagaataggtgaatatactttctcaaaatacaaagtggcgtggcgatacattgcacagtcgttcattactgctgtcatcacatctgcgcaagatagttttgtcggcgaaaagttgtatattccaaacgaaaaaataatgtacgttggaactgattgtaagagtgaagcgtattatctttgcggagtcttgagttcttcacctgtaagctattgtgttaagtgctacatgaatcccaccagcatttcggctcatgtccttgataaactcaatattccccagtatgatccgaacaatattcttcaccaaaaaatagcaatcatctgtgaaacgggacaccaagcaaaagattccgaagaaaaagcaaagcttcaaactgagttggatacaacaatcggggaactctatggcatatccgatgagtccatcaaagtaatccaagatgcattgagaaacctgtaatatgttttttgatgtcacggtcaaaagtaccgcagccgcaagccatctacatgatgacttgcggctgtttcgttttttccgtatcggtagtgcccctcggttcacttcatgtccctatgggacggagcacttttcgtctcgtttttattttgcaagtaatgaaaagagattgtttttcttaagattctgaaaaatattaaacttatgcacaaatgcacaaaaatcaaatcggacgaaatgctttcggttgcaataaagaggatatttggtgtatactggaaaaagaaaggaagggtgaggaaaatgaaaattgccgattatcaacatgacctgtttacctatgccaaattgcttttgggaattgacagcccaacaggatacactacgcgtgtggttgatgccattggccaagtggcggaaagtctggagtttgggtttgaaaaaacaacaaagggctgtgggctcattcatgtgcctggccgggataacagtaaaaaagtagcggtttccgcccatatagacactttgggcgcgatggttcgttccatcagcagcgatggcatgctcaaatttacgccggtaggcggtcctatccttccaacgttggacggtgagtactgcaaggttcttacgcgggatgatacggcttattcaggtactattttaagcttgagcccagcggtacatgtttttcccgatgcatcaacacgcccccgtgatgacgtcaatatggcagtgcgaattgacgagccggtaaaatccaaagaagatgtgcagaatcttggaatccgtccaggtgattacattttcattgatcccaaaacagtcattacttccagcggttttttaaagtcccggttcattgatgataaaggaagcgctgcctgtctgctgactgttttgaaaatcctgcatgataaaaatctttgcccgcagtatgatacggtgtttttcttctccgtttacgaagaaacaggacatggtgcatcttatcttccggcagggctgtcagaattgcttgccgtagacatggggtgtatcggcgatgatttaagttgtacggaatatgatgtttccatttgcgctaaggattctcacggcccttatgactatgaaatggtgagtcgtctgattcgtctggcagaggaaaggaaattggactacgcggtggatatctatccccgttatggttcggatgtcggcgctgcttggtctgcgggaaacgatgtaaagggcgctttaattggtcccggtgtccatgcctcgcatggaatggaacgtacacattataaaggaatggaaaatacgattcaattaattttggcatatttaggctgttaatcgcctggattatgaaaagcccggtgaagtttttgcttcaccgggctttttgcattcaaaaaggcttttggcagtttgattgatatggaaagatttgcactgtaaaagcttagatggtacagacaaaaaaccgaatatatttttaaaagagaaatgtaaaatttgttcctccttttctttacaaatatttttcctacacaccgttttatattttacatgcagccggtatgatgaggttgcaatcaaaagtaagaaataaaaggagaatttagcaatgaaaaagatgatttttgtatgtatggcggcattgatgctgtccgcttttgctggttgttccagcacaacgacctcatccgaatcttcttatggcggcggcactgaaaattcttccgcttccgcacaaagcagccaggcagaagcagactttgatacttccaaagatatcgcggttatttcccgtgaggatggatcaggaaccagaggtgcttttgttgaactgtttggggtagaagaaaaggatgccgatggcaataaagtggacagaaccagtgatgaggccgatatcaccaacagcacttctgtcatgatgacctccgtggccggtaatccttactcgattggatatatttctcttgggtcgctgaacgagactgtaaaagcggtcaagatcgacggtgctgaagccaccgtagagaatgtaaaaagcggagcctatggaatttccagacctttcaatattgcaaccaaagcagacgtgagcgaagttgcacaggattttatcgactttatcatgagttctgacggacagaaagttgtggaagaggctggttgtatcccgcaggaaacgagcggcgcctatgccggcagcaaaccctccggcaagatcgtagtcgctggttcctcctccgtaactcctgtaatgcaaaaactgaaagaagcgtatctcgccgtaaatcccaatgctgaaatcgagattcaggaaagtgattctactaccggcatgaactccgctattgacggtgtctgcgatattggtatggcttccagagagctgaaagatactgaaattgaaaaaggtctgacacctaccgtaatcgctactgacggtattgcggtcatcgtaaacaacgaaaatcccatcgaggatttgactaaagatcaagtaaagtccatttatatcggagagacaatctcctggtccgaagtcgcctagtagataaataacataaaaagcatcaagggttacggtgtcatcggccgcaacccttgtgctgtatcggtatcattcagctgatgcttttcgcatcatctgtgtgggcagaatgtttaaaagagttttccagccggtcacacagcggcagaacggagcgtatatgagacattggtatttgaataaagaaacccttatgaaaggtatttttttactggctgcctgcgcttctattctggcagttgccctgatttgccttttcctttttgcgaatggtcttccggccattggaaaaatcggcatatttgattttttgctgggaaaagtgtggaaaccgggaaatgatttatacgggattcttcctatgattttaggaagcatttatgttaccgcaggtgcgattgttgtcggtgttcctattggcattttaacagctgtgtttatggcaaaattctgtccgaaaggcctttatcggtttttgaaaccagcagtagaactgctggcaggaattccgtcagtcgtttatggattttttggtctggtcgtcatcgtccccttgattcgagagctttttcccgacagcaaaggaaccagtatgctggcagcttctctcctgttaggcattatgattcttcctactatcatcggtgtcagtgaatcggcgattcgggcggtgccggaaagctattatgaaggcggtttggcgctgggggccagccatgaacgcagtgtttttttcgccacgctgccggcagcaaaatccggtattcttgcaggtgttattttgggaatcggacgcgccattggtgaaacaatggcagttatcatggtggcaggaaatcaaccgcgtatgcccgcagggctgttaaagggcgtgcggactcttacttcgaatatcgtaatggaaatgggctatgcggcggatttgcaccgagaagctctgattgcaactgcagtagtattgtttgtatttatcctgctgattaacctgttgttttccgtgctgaaaaggaggacgaatgaataatggagcagatcaacaaacaaacctttcagcaaaaactgaaaagctatcgaaaaagcccgctgtcattgactttatttttacttgtaaccatttcggcattggtcactgcttttgttctgttttttctaattgcatatatcctgataaaaggtgtcccgcatttgacactggatctgttttcttggacatacaattctgagaatgtctcgatgcttccatctatcgttaatacttttttaatgacgctgttatctcttttgatcgccacgccgttgggaattttttctgctatttatctggtggaatatgccaaacgggggagcaaggtcgtaaaaattgtccgcattacagcggaaacgctttccggtataccttctatcgtttatggtttattcggaatgttgttttttgttgtcacgctgcactggggctattctattttatcaggtgcgtttacgctggcgattatgattctgccgctgattatgcgtactaccgaagaagcgctcaaatctgttccggatacatatcgcgaaggcagcttcggccttggagccggaagactgcgaaccgtattccgtattgtactgccgtcagctgtttctggtattttggcaggcgttattttggccattgggcgcattgtcggcgaaacagctgcattgattttcaccgcaggtaccgttccggaaattcccgaaagtctgctcgattcggcgcgtaccctttcggtacatatgtataatttatcgcgcgaaggcttatatgtcgatcaggcttatgcaactgcggtggttctgctggttgtggtaattgtaatcaacggactgtcaaactttgttgccaaaaaaatatcgaagggataagatttcgtatggataaatttacaattaaaaatctggatttattttacggcgattttcaagcgctaaaatccattcatttggctctgcctgctaatgaaatcactgctttatcggtccatccggctgtggaaaatcgacttttttaaaaagtttgaaccggatgaacgatctggtagaaggatgccgtattacagggcaagtattgctggagcaggaagatatttatggcgatatggatgtaaatcttttgcgcaaacgggttggaatggtatttcaaaagccgaatccgtttccaatgagtgtttatgataatattgcgtttgggccaagaacccatggaattcataaaaagaaagaattagacgagattgtagaaaaatctcttcaaagtgcggcaatttgggatgaagtaaaagatcgtctgaataaaagcgccttggggctttccggaggtcaacagcaacgtttgtgtattgcccgggctcttgccgttcaaccagaagtacttttgatggatgagccgacgtcggctttggatccgatttcaacttctaaaatcgaagatttagcactggaactgaaaaagaattatacaatcattatggtaactcataacatgcagcaggcagcgcgcatatcagacaaaacagcattttttcttttgggtgaagtcatagaatatggcagcacggaaacgctattctcgattccttctgataagcgcaccgaggattatatcaccggcagatttggataaggaggaagagaagatgcgcaataaatttgacgaacagctgaaacttctcaatgaagaactgaatgaaatgggcgcgttgtgtgaaagcgcgattgccaattcggcaaaagcattgctgacaggggataaatctttggcggaacacgccatttccatcgacagtgaaattgaccagcaagaacgagaaatcgaaagtctttgtttaaagcttttgttgcagcagcagcccgtagcacgagacttacgtcagatttcctctgctttaaaaatgattaccgatatggagcggatcggtgatcaggctgcggacattgcagaaatcatcagcctggcaaacttgaaggcttcaaataagacaatgtatattggagaaatggccaaggctaccatcaaaatggtgatggacagcgtagatgctttcgtcaagcgagatctggatgcggcgcaggcagttgttgcttatgatgatgtagtcgatcagttatttgatactgtcaaaaatgaattgattgaactgatcgcatccgggcatgcagatgcagaatatgcggtagatcttttgatgattgcaaaatactttgaacggatcggtgaccatgcagccaacattgcagaatgggtagaattttccattactggtattcacaaaaagctgcagccggaagagtttcagcgtacggaggagcaaagggaagaaaaataaaaaagacaattttccctattagttttgtttgatcggatatacggtacaaaaatgcaccccaaaaatcaatttcggggtgcatttttatatgtagcgatagcacggtcaggaaagggaagcttgttcttttttttgccgtatatcctgaccgacaaaaaacagagggacatagctgccgatgatgcgggaaaaaactcgttctccataaagttttaacaattcctgaagcgacaagttcgtgctgataatggtagacagacgtttgtttaaacgcgtattcaacagctgatagacaactgcgccagtaaatgttgtggcaaattcggcgccaagatcatccaaaatcagcaggtcacattccaacataagatcgagtgtttgtaaatcgttttccgaacgggaaaatctctctttttcaatttgggataaaaaatcaggcgtagagccgtagattacgccataacctttttccataacttcttttgcaatggaaagagacaaatgggtttttcccagaccagttcgaccactcattaaaagattgggaccattaggagaaaatgttttggcgtaatctctgcaaaaccgaaatatttttttcatttgttcccgcgcagatgggcctttattggctgtatctgcataataagaaagatcgaagttagaaaaatgacataaagccagaggggatttgctatttaaccggcggagagcttcttcttttaaaattttttcaaagcatttgcaccgctttccgtctcgatatccttcgtcatggcatagcgggcaggtaaagggttcggtcaggtaatcttccggtaaatcaatagatcgcagaatagattggcgctctttctgcagagaaagattcctttccttgatttgttctaactgccgcaatccctgtttgccggacatcgcggcgcgaattgcagcatacccggtcatactcagttctttttcaatctgttccagtcttggcacgcagacgtataattcacgttttcgttcttccaacgtttgaaaagcacgttgacggcgcctgtttaaaatttctctaccatattcaaaaagttctttggaataagccatatcattaatctcctagtccattttaggaacatgccaacgatgcaattgctcaaattcctccaggtcaaaggaatattcctttttttcctcttttttttgcttttccggtggagcagattctgacaatgcttcctccggtttttggaaccctttttcgtgccaggcggatagaattttatgaatatatggaaaactgactttccctgtattatctactgttttttcataagctaaacgaagcatatcgatagaaaaatggaactcgcaataccattgctcaatccatttttgttctttggcagtaaggcgtcggtcatggattccaaatgcgttctgcacttcttgctcccgtttgcgtcggatcgtttgactgtccagatatttttcaatcgcttcatcattgtccaatcccatttcctgccaagaaagtgccgttttttcgatgtagcggagatttcgcttgtcaatggaagcgcagtatgctgccgccatcaggatcacattggcggggattccggcccagtcgtacagggaaatgatagtagagatatcggtagaggtaagagttttccctaaaattgcttcggtttcgtgcaacaaggagcgaataacaggctgacgctgggtcaattcatgaatttcgctggtagtcatccgcgccggagagggctttggtgcagatgggctgacatctggactctccactatttttttcgattctgaggaaggaagatttttgttttcctgatttatcaccgaaggagaagtctcctttgtcatagaagtttttctcaaaattcctgcgaacacccaatgattcaatgcatctctgacatctgctgccggcagggaaagaaacttcgatatctcctcggcgttcatggggggagactgattccgcaaaagcagaagaagcacctttagctcaactgcaccacagttgcataaaaactcatcggtcacgcaacagggaaccgaaaaagtgtttttccaattttcatagcaaatttgatactccatggctttcctcacttgttgtatctgcatcatggcagggaatatcattttcccaaaatcgttttccttttctattttagcaactttggtttttcattttattataccgtgaggttattatagcagaaaacagaaaaaaaggacagatgaaaatttacaaaagaatcttgacaggatacatacctttggctataatgaaaaagcagttgcgggtttagctcatctggtagagcgccaccttgccaaggtggaggtagcga

SEQ ID NO: 3216 - DNA, 5703 bp, Unknown
  16S sequences of unknown bacteria
cccgccgcaatacggtcgaccgtgatttctacaacggcgtcttcgagagatgggagtacccggttctcacccgcgaccatatcccgccgcactggtgctatgatctcgacgctgaaacgaacccttacttcgaggagcgcctcggcgtcaacgccgtgttcaactccggcgcgatcgagcttgacggcaggttttaccttgtcgcccgcgttgagggcaacgacagaaagtcattcttcgcggtcgctgagagtgacagccctgtcgacgggttcaggttcaccgattatccggttctgctcgacgacacctgcccggaggagacgaatgtctacgatatgcgcctcacgaagcatgaggacggttatatctacggtgtgttctgctctgagagcaaggatacctcaaaccctgacctctcagcggctgtggcggccgccgggatcgtccgcacaaaggatctgagacactgggagcgccttccgaaccttaagacgctgaattccccgcagcagcgcaacgtcgtgctgcatccggagttcgtgaacggcaaatacgcgttctatacccgtccgatggatgatttcatcgacaccggaagcggtgggggtatcggcttcggcctctgcgacgacataacgaacgcggtcatagacgaggagatcatcacgagccgacgcaggtaccacacgataaccgaggtcaagaacggcgcgggagccgtgccgataaagaccccgaagggctggatacatatcgcgcacggagtccggaacaccgcggcgggtctgcgttacgtgatctacgcgttcgcgaccgctcttgatgatccgtctaaggtcatcgcggagccgtccgggctcatgatcggaccgcgcggcggcgagagagtcggcgacgtctcgaacgtgtgcttcacgaacggcgcgatcgcgcgcgacaacggcgaggtgtatatctactatgcctcaagtgacacgagactgcacgtcgcgtcgacgacaattgatcgtctgaccgattatgtcttcggcaccccgtccgacccgctccgttcggtcgactgcgtgaaacagcgctgcgagcttatccggaagaatcttgagctgctcggaaaataatttccgaaaaatagatgtcccgcgcttttttcgtgaagcgcgggatgtttttgtgtcagactttttcgtcaacgcgccttgtgagaccgctcgtgtagaaggtgaactgttttctccagaagcccgccgcggctggattcatcgtctcgaggtctacgccgagataccgggcgcgggtctcttttttcgcgagacacatgagcgcctgcatgacgccttttccgcggtattctgggagacaatacgcgccgcagatgctcttcatgccggtgttccatgtgagatatgtctccccgctgtcaccgacctcgatgaacgcgacggtgctagaatcatcgaatgcggcgaaaagtcttgtgccgcttttttcggcggcggagatccggtcggcaagttccttttcggatgtgcgcatgaagcacgggctgcaagcaaggtggtctgagagctttatccgcagttcccggacgagaggtatttcttcgcggtcgagttcacgcagggtgaagatgacaggcggtggttcttccatggaggtgaatatcgcgtcggcgcagcgtcttccgaaattcaggttgaatagcgcgtttgtggtttcggtgtcgtgggcgaaaacggagagcgcgtgataatttgctccaagggctgtccacctttcggcggcgtatgtatagaggcgtgtcatcacgcgggcgcggtcgattcctgttttccgcgtgacaccgttcgcgtggagcggggagaaaatgcctttcgcggcggttccgaaggcgtggtcgtgtggcggaggggcgcagaggaagccgatgagttcaccgttttcgattgccgccgcgccggtcattccggagagttccggggcatcggtgtccgggagagcgggtatcagctgtctttccgcgtcaaggttttcgcgcacaatggcgtgcgccgccgcgaggtgttccagcgtgaattgtgtgatggtgataagatcatccctttcgattgttatgtcttattataccatttccgctcaccgtccgtcaagtccgacttctcttaaaataaatatctccccaatttataaagtttggggagaagagggaggtgcaggaggggactgtcgcattataggtaattatttccatttccatagcattattcataataattcaagtttaccaatatggcatgaacctcgaaaattgttcatgttgaccatcaaatgaaaacgatttccagatttacgacagccacttttttgttgcgattttcgcgaatttgtgatataattattgaaaaccgcgaaccttttgccgccccgcgcgacttatctgtgtgaaaggaggtcatcccgtgaccgaagctgaacttgaaaaatattatgatgaactgctcgatctcgcgcgacgggtcttcggggcggacaaaatcgcggcggaagatgtcgtttccgacacaattttgtcggctctgtcggacatccgcgctggaaaatcgattgaaaatccgtcgggatacctgaaaacgctgttctacagacgcaaaagcgacttcctgcggcgaaaatatcgcgattcgtgcgtgatttttgacgacggaagccggctttcactgattcccgagcggaatttttgcgaaaattcacggctcgaagccgagtattcgcgcgtcaggcagtcgctttcaaggctgaactatatttatcgagaggtgatggtgcggcattatatgcgaggcgaaagcgtcgaaaaagtggcgtcagaattgggaattccggtcgggacggtaaaacgccgcctgaattcgggcagaaaattggtgcgggagaaacttgatatgctgcaaataaagaattcggagctttcgtattcgccgctgccgctcacattgagcttatggggcagaaccgggcggggcaacgaaccttttacacttataaattcgctgctcgcgcagaacattctcgtcgcggcgtacgaaaagccgctcgacgcgggcgcgatcgccgattcgctcggagtcgccgcgccgtatgtcgaaaacgagcttgaacggctcgtccggggcgaactcatgggtaaaacaccgggcgggctctgttacacacgggcatttattttgaaaaagagcgattcttacggcgatattaaagcacaggaagagatggcggcggagcttcttgagccgcttgccggggcgcttggacggtttgcttttccgaggctttcgggaaaagcactcgaaaccttgaaacttttttcgctttacacactgaccgagcggatccgtgagcttgcgcaggacgaactccggggcaaaatttcgcttccggagcgtccaaatggcggaaattggctcgcgatcggtcagatcgatgacaaatcctttccaaaatatgacagttccggtccggcgcagacgtcgcggacgagtgaaagcgggcacgggatggtcttcgattttcagtcggcgttcggcgacacacattgggtttacggtcaactgccccagccgatgtcgctgcttgaggcgcgcgatctcttcctcgaccttgcggagggcaggactcccgacccgcgtctgctcgaaaatctgcccgatctcgagcgtttgcacattgtaaaacgtgacggggccagcacaaatcttgacgttccggtcatgacgaacgcggagtacgcaaaattcaacgaaacaagctccatcattgtgaaggagcttttcgaggaagtcggcgggaaaataaaaaagctcatcgggtcgcggaagcttgatgtcccgaagacggtcgatgagcgcgaggcgtttgttggatattcgacgacacggattttaccgctcgcggtgattttcgcggctgtcgaatcggggattattgacgcgaaaattggtgaatcgccgatgattgtcgtggtaaccggataattttgttgcaggagcgaactaataacggtgcataggggctgtcgcaaaagcgacagcccctcctgcaatctgagaatttatttcttaagcttagcctgagccttgagtctggtagcggtatcgaggatacgtttgcgcagacgtatggacttcggggtgacttccataagttcgtcttcggcgatgaattcgatggcttcctcaagtcccatgatcttcgggggggtgaggatgagggcttcgtcggcgccggaggagcggatggcggtgaggtgttttttcttgcaggggttgaccgcaatgtcgccgatcttcggggattcgccgattatcatgccttcgtagacgggggtctggacgccgatgaacatctgaccgcgatcctgggtctggtagaggccgtaggatgttgtctcgccgtcctcactggcgacgagtgagccggtgtagcgcagggtgatgtcgccgcgatagggctggtaactgtcgaatattgagcttatgatgccttcgccgcgggtgtcggtgaggaattcgcttctgtagccgaagaggcagcgggcggggatgaggtattcgatgcgcatacggctgccgtggaggttcatttcgaggaggtcaccttttctggctccgagtttctggatgacggtgccgtcgtattcttccgggacatcgattgttacgtgttccatcggctcgcatttgacgccgtcgatggttttgaagaggacgtggggcatggaacaggtgagttcgtagccttcgcggcgcatggtttcgatgaggatcgagaggtgcatttcaccgcgtcccgcgaccttgaagcagtcggtggtctcgccgtcctcgactctgagggagacgtcgcggaggagttccttgtagaggcgttccctgagctggcgggaggtgacgaatttgccttctcttccggcgaacgggctgtcgttgaccgagaaggtcatctcaagtgtcggctcgctgaccttgacgaattcgagcggctcgacacagtcgacggcggttatggtgtcgccgatcgtgacgtcggaggcgccggagaagcagatgatgtcgcccatcttcgctgactcgaccggaattctctggagaccgtcgatctggtagagcgagacgatcttggtgcgcttcggcggttcggttgagtggaagttggttaccatgacttcctgaccgactttgatttctccgcgctcgatgcgtccgatgcctatgcgtccgacatattcattgtagtcgatggaggagacgagcatctggagcggacccttgtcgtcgccctccggtgcggggatatattcgaggattgtgtcaaagagacacttgaggtcggcgccgcgctcgtgcggaacgagagaagcggtgccgtcacggccgcagcagaatatcatcgggctgtcgagctgctcgtcggtcgcgttgaggtccatcagaagttcgaggacttcgtctatgacttcgtcgatgcgcgcgtctgggcggtcgaccttgttgatgacgacgatgactttgtggttgagttcaagcgccttctggaggacgaaacgggtctggggcatcggtccctcggcggcgtcgacgagcagaagaacgccgttcaccatcttgagtatgcgctcgacctcaccgccgaagtccgcgtggccgg

SEQ ID NO: 3217 - DNA, 23163 bp, Unknown
  16S sequences of unknown bacteria
catcctcccagtaatcctctgcatcctcatatccatcaaaatcatcttcattatcataatagaagtcttccgggtcatcataatcatacacatcatatgggtcgctgtattgataggaatgatatgtattgcctttgtaataattgttattcgatcccgatgattcttttttttccttatctttttcctcttttcttttttgttgttctttcagttcattatctatacgttgctcttcgcgtatttctataagtcttttacctccattttcataccaatgcttgtaggcatcttttacctcctggtaaaaactttttatctttaaacgctccatctcttttgatggcaacgacttataactccattcatcgtaatcttttatatatatgtatgcctgctcatacttcttgttatcatattcacgatgcgcccaacataattgaataagagcatctgtatctttgtaatgtccattatctatatggatcaattgtgacactgctgttgtatactctccctgtgcaatcaggtcaattgcttctttatatgctttttcattttgataatccacatatgctgccactgcccaataatatccaattactaatatcactattcctataattaaatgctttgtttttattccattcatagactttccctctttttactgcaatctgttaatcccacgcctcattccaataatcttctgcatcctcatatccatcaaaatcatctttattatcataatagaaatcttccgggtcatcataatcatacacatcataaaggtcatcgtatgtatatgccggctgataagtgtttcttctataagaaccaccacaagaacgatctgtgttggtgtcttcgtcctgaatattcaggtctttcaggattctatccgcttccatctccatttctctcttctttcgttcttcctcttcgtactcttcttttttccagacatcatatgcatcatttacttctttctgaaactcttcaatttgcagttcttcttcctgcttcgatgtcaaatacttaaacttaattccacccaaataccactgtgcgccttcataatcctgtccttcgtagcacatatgtgccttacataacctatccagatagtaagtgtcgtaataaagctcttgtttcctgtataatttatccaagtaaaaaggtttctgcaagagctcatccgccaatatctgcaattcttctctcgcttcctggtattcgccctcttccatcaaatcaagggcatgttcgtaagtatcttggagcttgcatttttcataaaaaacttttccaactacacatgaaagtaaaatcactactataataatctttttcattgagcatcaccttccccatctaaatgattttgttttgatttccctataattttatcttatcagaaaagatgtcccaaaaatagtacatcaccacatgttttccaacgcaacttcttttttgtacaaatcgtctcttacccacctatccaaaatatgctatacttgcctctgttacaacacaacaaagtcaaaagaaatgaggtgtacacctatgtctgatacagcaactgttcacgatcagtattatgagatggcaaatgcaccggtcaaccgaatcattccgaagctggctgtgccaaccattatcagcatgctggtcacatctatttataatatggctgataccttttttgtaagtcagcttggtaccagtgcttctggtgccatcggcatcgtattttctgccatggcaatcatacaggcactgtccttcatggtcggtatgggaagcggcaattacattgcccgttccatcggtgccggaaagcggcagcttgccgaacaggtagcttctgttgcattttttacgggattgatcgtcggactgctgattgcaattctgggaaatctgagtcttagaaatgtagtatttttccttggtgccacagagaccatcgcaccttttgcccaggactatgcacattatattttcctggccgcaccatttatggtcacttcatttattatgaataatctgcttcggtttcaaggaaaagctctgtttgccatggtcggtatcactaccggaggaatcctgaatatgatcctggatcctatctttatcttcagtctgggacttggaacttccggtgcagcattggcgactgctctgtcacaggtgatcagtttctgcattctactttttatgtgcaatacaaaaaaggaatgtatcacgatccatccgaagaattttcgtccaaccttaagtatctacaaaaatgtgatctacggcggtattccatcccttggccgtcaggggatcgccagcgttgcaaccatcatcatgaatgtaatggctcatccttacggagacgcagcaatcgctgccatgtctatcgtcagccgttttatgatgttcatcaactccgccatcattggattcggtcagggatttcagcctgtctgcagctattgctttggtgcgaagatgtatggccgcgtcaaagaagcctgctggttctgtatcaaagtcagcacagcaatcctgctggttttctgcgttactggttttgctttctccggacacatcatagaactgttccgaaaaggcgatcctgatgtcatccgcatcggtacattggctttgagattgcagcttgtgacacttcctttacagggtgtgatcattatgggaaatatgatgccccagtcgatcggctatggcatccgtgccacactggtctccatcggccgccagggactcttcctgatcccggcactgctgatcctgacaccaatcctcggtcttctgggaatccagatctcccagcccatcgccgacctctgcaccttcttccttgcagccttcgtcatgaacggaatcttcaaagaaatgggtgccgccaaataaaacccgggaagcacatacatatacaacctcaaaaagcccgggaagcacacctacatatgtaacctcgaaaaagcccagggagtgcttacatataagagcgctgctatgaattggagcggactgcatgacagaaaaatccggtcagagcgaacacttctttttagtgtccgatctgtccggattctttttgttatgctgtacgatacacttcatacgagccttatatgtatgcgcttcctgggcttctcaaagattacatatcttcatgtgctcccgggcttctcacctattcaatctgctccgcaaacatgaggcagaaactgataagcagcaggatacaagatccccagattaccggcacgccataatgaatggagagatttccaccaattccggcaccaacagcaaagaggaagatcacaccaaaataatgtcccacctgctccagctgctgctttttatgattcctcatgaaagcggataatgctgccattccgcttctcagattgccaatacacatggtgcttgcataggcatatccatccactttacgaaatgcctgtacctgcatggcacatgcaaaggataccagtgcagttgctcccatgttcatctctgccggcatgaatcctacaacaaacaggatcaggatctccatcagcaagatactctgtctccaatggagtttttttgcataacggaaccgttctgcgattctctcagctaccagtacacctcctgcaaaagccagaaggggcaccagatatcgaagtcccttctgccagtttccggtcatcaggttctgactcataaggactacgtttccagtctgtgcattggaaaagacttcatttctggtgttataggtatatgcatcctgaaaaccgccagataatgccagaaatgcattattgataaatgcctctgacatctgctgcttttttgataacttgtaaaaacttttcatgatgattaattttgatgctcctttagatacgcttttcttccatcatcataaaggttattaccctcactgtcaataataacaactaacggcatatcttctacgtacaattttctgagagcttctgcacccagatcctcatatgcgatcagttcacatttcttgatacattttgcaagcagtgctcctgctccgccgatcgctccgaagtacacaccactgtattttttcatagcatccactacttccggaagtcttgctccttttccgatcataccacgggcacctacagacatcatggttggtgcatacgcatccatacgtccgctggtggtcggtcctgcacttccgatgacctgtcctggttttgccggtgtcggtcctacataataaatcgttgcatccgcaggatcaaaaggaagcttctcgcctcttgccaatgcttcacacattctcttatgtccagcatcacgggacgtatagatggtgccggtcaggagaacactgtcccctgcatgcagagtctttgccagttcttcggtcaatggtaatgtaatctttcttgctgccatctaaatcacctccgtcttatggcgtgtcacatgacagttgatattgactgcacaaggcatgcctgcaatatgggtcggtaaagtctcgatattcagtccgatcgctgtggtctttcctccaaatccctgcggtccgataccaagcttattgatcttctccagcatctctttttccagatctgcatagaacggatccggattttcggaatccagcggacgcatcaaagctttcttagccagcagcgcacatttatcaaaggttcctccaatgccaacgccaaccaccataggcgggcagggattcgggcctgcggtctctacgacttccaggataaagtccttgattccctgaagtcctgctgaaggcttgaacatacggatcatgctcatattttcgctgccaaagcctttcggtcctacagtcactttgatcttgtcaccaggcacgatctctgtatagagcattgccggagtattatcccctgtattacctctgcgaactggatctttcactacagattttcgtaaatatcctttatcataacctctgcgtacaccttcatcaattgcttctgcaagatctccgcctgtcagatgtacatcctgtccgatctccaggaacacacaggccatacctgtatcctgacagatcggtacattctctgcatccgcaattttataattttcaatgatattatcgagtaccccctgggcgatctccccatcctcgcaggcacggcaatgctcaatagcacatttcacatcggatggaagatgctcatttgcctcgatgcacagtctctcgaccacatccgtgagctgactgacatttacttcacgtatcatgataaacctcctcttatggaactttttgtctattgtaacacggacagacataggatgcaaaatcttcctgcgtctgtccgtccagttttatcaattatcgctgctcatgtcttgcataattcggcagaagcatcggcgacatttttcctgtatgaatatctgcttgctccagttcatcttcataatgataaatatgatccagattcagcttgccaagctcaacatccttgcattttgctgcagcctttttgccggcattacgtccaaatacgatcacatccagcagggaattacccatcagccggttggttccatggattccacctgctgcttctcctgcaactaagaggttcgggatctcttttgtaaatccatctccattgatctcaagtcctccattctggtagtgaagggtcggatagatcacgatcggaacttttctcatgtcaatgccatagttcatgtacatacggaacattgccggaatccgtttttcaatggttccttcgcctccaaggatctcgatcatcggagtatccagccatacacctttgagtccgcccggaacttctacaccgcggccttctctgcactcacggatgacgccggaagcgttgacatcacgggtctccagcggatgaatataagcttcaccctcagcattgaccagctgagcaccgacagaacgtactttttctgttaccagcgcaccaaggatctgagaaggatatacagctcctgtcgggtgatactggatagaatcctgatacagcagtgctgcaccggcacggtatcctaacacaagtccatctgctgttgctccatagtggttagaggtcgggaatccctggtaatgcattcttcctgcaccgccggttgcgatcacaactgttttggctcttgccaccatataatcaccggtctccatattctggagaacggctcctgcaacctgacctttttcatctttcagaagctctacagcagaggtgaactcaaccaccggaattcccagattcagaacttcatccctgatggtacgcatgatctcagatccagaataatcctttgctgcatgcattctctttctggaagttccgccaccgtgagtggtgatcatggttccatctgtctctttatcaaactcaacacccagttcattgagccatttgatcgcatccggggcttccataaccagtctctttacaagctctggttttgcagcgaaatgtccgccgccgaagcaatccagatagtgctgtactggagaatcattctccttatctgctgcctggattcctccctctgccatcattgtattggcatcaccgattctaagcttggttacgatcataacgtctgctccggcgttgtgcgcctcaatggcacaggaagaacctgctccgccgccgccaatcacaagcacatccacatcataatcaatttttgtaaggtcgatcttctcatggagcagacggctggtggaatgcagcatctctgccagctctaacggtgccttctgtcctttgttcggtcccaccttgatctgggcaaatgcatctggattataatccggatggaactctttcagaagagcatccttttcatctgcagtcagacgtctgggctctgttgccatacgctctgctcttgtagcttctacctttttgaccgactccatcatattttctggatatggtgcatacatttttcatgccctccctatttctcaatctctctgttgttataaagctcctgcatctccgtgatcggcttgtgcatgatctgctcgatcagatcatcataagcaccttcatggatctcttccacccgtttggtcagatgctttgcttccggagcaatgtatttaccagtcagacgtcttgccagcagtcctaccatcgaatgagagatctctgccggacaacgaacagaacagcatccgcagcttacgcagtcaaaggactcttctgcacatttctccagttctcctctctgtgcataagcaatatactgcatgacattaagactctgggtacaggctttggtacaggcattacaaccaatacagctgtagatctccggataaagttccatcatcacctgctgacccggcttcagatcattgatatcataggttcgtttatctgtcgggaagaacggaatgcttgccacatacatgccttcctgtacctgcgtctgacaggccagacaggtcttcagctcattctttcccttgattctgtaaatggttgcacaggcaccacagaaaccgtggcggcagccacatcctctctttaatgtatatccggcatattccatagcagtcatgatggtcagatctgcaggaacactgtatttcttaccgaagaaatagacatttaccatattttccattttcgtcatcctttctctagtactccgcaggcatctcatccaactcatcgcaacggaataccgggccgtctttgcacacatatttggttccaatattgcaacgtccacatttaccaacaccgcacttcatacgaagctccaatgtggtatagacctgatctcttgaaaatccaagttcttccagacctgcaagtacaaacttgatcataataggcggtccacataccagagcggtcttatccgtgtcaaatccaatctcttttaaataggtcggaacaaatcccacatgaccgtcccagccttcctgttcccggtcaatagtcagatatacattgacattttctgccttcatccagacttcctggatctcttttaactgtaccagatcatctgcggaacgggatccatataaaatatcaacggttccgtaatctgcccggttgtccagcacataattgattacagaacgaagtggtgcaagtccgatacctccggcgataaacaacagatttttacctttcaacttatcctccaccggaaaatggtttccatagggtccgcggacggtgatctcatcgcctacttccagactgtgcaacatctctgtcagacttccgcatttcttgatactgaactcctgatattctttattggttggtgaggaagtaatagaaaacattccttcactgactcccggtacacacagcatggcacactgtccaggcatatgttcaaataattttccaccctccggagcattgacccggaacgtctttacatccggtgtctcctgacggatatctgtgatcactccaacctgagggatcagcacatcttctgtatagtttttatgacaggtacattcactcatgccttttctcccccttctttttcaaatgctttgatcacttttacaatattcagggcagacggacatttttccacgcagcggccacagccaacgcaggaatacatgcccttattgtttgccgggaaatacaccagcttgtgcataaaacgctgacggaatctctgcatctggctggtacggttgttgccgtgtgccatcatggtgaaatctgaatacatacaggaatcccagcagcggaaccgtttcacgccatgtcctgtatcataatctttgatatcatagcactgacaggtcggacatacaaaagtgcaggtaccacaagccagacaaggtttgtaaagctcctcccacagcggagaatcgaatctcgtctctgttgcatttccatcccagccttccaaagagagatggctgtatggaagcttctctacgatcgcacggatcgctgtctgttcttcagaaagcttcttctcgtcttctgtatctgcatccgtcaaaagtcctgacagaatttccgtcaatgtctgtcccttctcagtcagggctttccagtacagttcttctcctgcaaaccaggctgccacatctgcagccggttctgcacagtcaataccaaataccttgcaaaaacagctttcctccggctcatgacaggcaatcgccaccatggttccatgctctcttcttgctgcataaaagctgtccaccggatctgctaaaaacacctgatccagcaccttcacaccctgcacatcacaggctctcatgccaaatacggtaaatctctgctcttttaacgcttccggctcgactttgagcttgcgtccttcccgttcacaagtatagagattttcactctgggggaagaaaacatctttcggagactttacgctttttaatgtatcaatatctacctcggcatcctcggaccaggggccaaaatttacttttccagcggttttcaccggcacatacagttcctgctctgcggcaatggcacggaataatgccgtcagatcttcttttttaatcttgtacatccattatcccctttctcccacaatgctgggttccacatcatcaaatgtatagttcgtcagcgggcctttgctgtcggtatcttcaccggcctggtattcgccgtaaaactgatcaatatctttgataaatttccgattgaacaggtgcagcggaattccctgcggacagacacggctgcactctccacaatctgtacaccggcctgctacatggaaggcacggataatgtgaaacatcttttcttcaaaagaatcactgtttgctttctgagcactgtcaaattttgtgctgtcaaacacacattttctgcagctgcaggccgggcagacatttcggcatgcattgcagcggatacatttgctcagttctttctggaaaaatgcaaatctctcttccgggctcatggcctcgatcatctctacctctgcaaaacggtctgcatccttggtctctctggattcaccgatcagttcatcgtagatcttgtgctcttttcccttgcacacatgacagcgggataacatggcatccttatattctactgttttctctccatacagggtttccaccgtcagtgtgtctgcctcattttcaatctgggcacctttgatatctgtgatacccttgatgcctgtctcgcggatcttttcgatatcaatcttacctctgcagcccacaccaataatatatgctttttcacgatctactctgtgttcttttatcaactggttaaaactataggtatcgcacggcttcaggcagaccagtgtctttccatccagtttagaagcctcgatcatatatttacttaaattcgctccgcagaatccgtcgtatacaaactctttcagactttcttcggtctcaaaatatgccggttccggattccagggcatatctccggctttccagccaagcactcttgccacagttccatcagcaagcagctcttttgccctctttatcagttcctgcatcgtaaatcctccaatctcacatttctgccaagagatgtgatcttctctacaaattcattcatagtctgtgagaattttacaccctctgctgcagatacccattctacacgggtacggccattttccactccgatgaaatccagcatggaaaacagtaatgtcatacggcgtcttgcatagaagttaccagttgaataatgacagtctcctggatgacagccgcacaggatcactccgtctgctcctttttcgaaagcacggagaataaacatcggatttacacggcaggaacagggaacgcggatgatcttcacatctgccggataggaaagtctgctgcttcctgccagatcagctcctgcataactgcaccagttacagcagaaagcaacgatcttaggtctgaatgttgtttcgttgttttctatcgacatattgcatctacctccgcgataatctgtctgttggagaatcccttcagatccatggctccggacggacatgcaaccgtacatgcaccacagccctgacaaagtgctccatttaccactgccactcttctggtctcacggataccatgatcgttgacctgatgatcctcataggaaatagctccataaggacatacatttgcacaggtcgaacatccattacacaacagctcatctgactgtgcggtacacggattggtagtcagcttatcttttgcaagcaatccgataactttgactgctgcggcacctgcctgtgcaacggtctcaggaatatcctttggtccctgacatacaccggacaggaagattcctgcagtcggtgactctaccggacgaagctttgcatgggcttctgtcaggaaattattggtatcaatgctggcagtcagcatggttgcgatctttcttacatccggattaggctctatggcagctgccaggacgaccatgtcggcttcttttttgatctgcttattgtccagcaggtccacgccctgcaccagaagctttccatccggctgcgggattactttgcctacctgtcctttgatgtaattcacaccatactgctctacggctcttctgtagaactcatcaaagttcttaccaggtgtacgcacatcaatataaaataccgttacatttacatccgggtatttatcacggatcaacatagcgtgcttggcggtgtacatacaacagatcttggaacagtagctctttcctctgtcatccgcacaacggcttccaacacactggatgaataccatctcttttggcgcttttccatcggacaggcgctccagatgtcctttggtcggtcctgccgcattcatgatacgctccagttccagggaggtaatgacgtctttactctggctgtatgcatattcatcataattgtcaagtttgatcacatcaaaaccagtagcaactacgattgctccatatttctgtgtaatgatctcatcctgctgatcataatcaatggctccggcctgacatacttttgaacatacaccacattttccggttttaaatttgatacagttttcgcgatcaataaccggtacattgggaattgcctgtgcaaatggagtgtagatcgctgtacggtttcccagacctctgttaaattcactcgggatcttcttggacggacacttttcctgacagacaccacatccggtacacttgtccatatccacgcttcttgcttttttacggatatctactgtaaaatcaccaacaaatccactgactttttctacttcactatatgtatagatcgtgatcttttcattggatgctgcatctaccatcttcggagtgagaatacatgcagaacagtccagtgtcgggaatgtcttgtcaagctgtgacattcttcctccgatacttggcgtcttctccacaatatccacttcatatccagcatctgcaatgtccagtgctgtctgaataccggcgataccgcctccgatgacaagagctctcttagttacctgactctctcccggtgtcagcggtgcattcaaattgacttttgcaatggcagcacgtgccaggatcactgccttcttggttgcctcttccatatccttatggatccaggaacaatgctcacggatattggcaatctctaccatatacgggtttaagcccgctttctttgctgcatttctgaaggtggtctcatgcatacggggtgagcaggaacaaacaaccattcctgtcagatgcttttctttgatagctgcagcgatctttgcctgaccagcttctgagcacatatactgatagtcctctgcatgaaccacacctggctcctgctgaaccatttctactacttttttcacatctaccgttgcagcgatattactgccgcaatgacagacaaatactccgattctctgcatcgggtcacctcctgtatcttctgaacgcactgacaagaagctgctgcggcagttcttcatccagcagttccgggatctcatctgcggtcagatagttctgtccacgctgacgaatcaccagctgtcttgctgcatcgatcagttttcctggtttcacatctctcggacaacgctctacacacgcgaagcaggagagacatttccacagagatttcgattgtaccagtgcttcaatattttcattctgcacataggagacaaactgatgcggtttgatatccatctcgtcaaatgccggacaggacgccgagcattttccgcatttcatacatttcagcggattcacgccgctgacttccttgatcttttcagcctgtgagcttactgtattcatgcgttgtctacctcctctttcacaccaagggcttctgccagaagctctgtgaaataataaatcggaagatctcctgcggtatttttattcaggttatacatgcaaaggggacaggcggtgatcagcatgtctgctccaaatccttccgcactttccacgatcttgttgcacatgttctttgccatgtctttttctttcaatgaaatgtaaccgccgcagcactcattccgatatggataaatgaccggatctgctcccagtgcccggataaaatcttccatgatcttcggattttccggattgtcaaattccagaacttttccaggacggagcagcagacatccataataagcacctatttttttgcctgtcagcggatgggtcactttttctttgatcacatcgaatccgacccggtcacggagtacttccagatagtggagcacattggtctctcccttgtagggctcttccagcttcagatagttgttggctctggtctgaatatcctccacatgcttcatatcatcgttgactctcttcaacacatgatggcaggcggaacagacggtgatcagttcctgtcctttttctttggcagcctgaagtgcacggatggatgcaagcttggttgcgatctcatcgctgcccagcggatatacaccgccgcagcactgccagtcttcgatctcttccatctcaaatccaagagcctccgcagaagctcttgcataagcgtcaagatctctggctttgttcttcagagtacagcccggataataactgtatttcatagcctgatgatcctttctttgtctcgtaaaaataattttacaggttgatctgtgcgatcacagatttcagtgcttctgcactggcctgaagtttctttgtctcttctttgttcattctcataggaatcttaccgctgatacccttcggtccaaccagtgtcagtgtgcttaaacatacgtcttccacaccatactcgccatgcatcatggaagataccgtcacaacggtctctgaagatgccagcagggtcttgcagagctgacatacggatctggatacggcatagaaggtagctcccttcttcgcgatcacgataccgccggatttccgtacatactcgatcatctcgtctttgtcgataggctttatgtctttgcccatatgctgcgccacatttacgtactcatccacatggataccggaaacatagacacctgtccatggaatgaaagaagtatcgccatgctcaccaaatacataagcatgaatatttttctgtgccacctgaagcttttcagataatccgcagcgaagtcttgctgtatccaggattgtaccagaaccgatgatctgacgctcaggcagaccggagatctttgtaaatacataagtcatgatatccaccggattacttacgatcacatataatgcattgggtgcttctttaacaatctgaggggtaatgctctttaagatattaacattcgtctgtgccagatcaatacgggtctgtcctggctttcttgcgattccggaagtaatgatcacaatgtcagaatccttggcatctggataatcaccggcgatgatcgagataggctcacggaaacaggttccctgttcaatatccataacctcgccctctgctttgtccttgttgatgtcgatcataacgatctgggatgccagttcttcctgggacagagaatatgcaatcgtagatcctacacttcctgctccaatgatggtaatctttctgctcataggtactcctttcaagtaagacatttttgttatttttttaacaaattacttcaaaaaaattgcccgagtgaccgggcaactcattgttaacaaaataacataatgttaaaaaaatatcaatactaaatctattcctttttgttattgattctcaatttgccagtcaataggctccataccatgttctttcaggaattcattcgccttactgaaatgcttgcatccaaagaaaccgcggtatgcagacagtggactgggatggggtgcttccagaatcagatgcttcggattgttcaacatggatctcttcatctgtgccggtcttccccagagcataaataccataggtctgtcctgctcattgagcacacggatagccgcatcggtgaattcttcccagccgatgcctctgtgggaattggcctgatgagcacggacagtcaataccgtgttcagaagcataacgccttctcttgcccatttttccagataaccgttattgggaatatagcagccgcagtcatcgtgcagctccttataaatattgacaagcgatggcggaatctccacatcaggcttcacagaaaagcaaagtccatgagcctgtccattattatgataaggatcctggcctaagatcaccactttcacctgggacagcggcgtaaaatcaaaggcattgaatatatcatcggcaggcggaaagatctcatgagtgctgtactcttccttcactgtcttatataatctcgcataataaggctttttaaattccgggcttaaaggctccagccagtcattggatattgctcccatgtcagttcctcttttctcttgtgattctttctataaacgtaccgagattccgttatcgcggagatattctttcacctgacggatttccagttccttgtaatggaacaaggatgctgccagagctgcatctgcttttccatcagtcagtgcttctctaaaatgttccagtgttccagctccaccggaggcaatgaccggaactgacacattctctgcaatggttctggtcagttctatatcatatcctgccttggttccatcacagtccatactggtcagaaggatctctcctgctccaagctcacagaccttcatggcccattccactgcatccatccccatatctacccggccgccatttttgtaaatattccagccactgccgtctgcacgacgtttggcatcaatagctacaactacacactggcttccaaacttatctgctgcctcgctgatcagttccggccgcatgatggctgcagagttgaccgagatcttgtccgcaccttctcttaacagcactttaaagtcctcgactgtgcggataccaccgcctacagtaaacggaataaatactgtctctgccacccggcgcaccatatccacaacagtatttcttgcatcagaggaagcggtaatatccagaaatactacttcatcggctcctgccttgtcataagctgccgctaccgccaccgggtctcctgcatctcttaaattaacaaaattaacaccctttaccacacgtccgttattgacatccagacagggaatgattctctttgtaaacatctgaccactcctccttacagttcggcaaaatttttcagcatctgaagtcccgcccgggaactcttctccggatggaactggcaggcaaatacattgcccttctccacagacgcatggatcgtaactccatactgcgtcgttgcttttacgatgctctcctcttcagctttcagataataggagtgtacaaaataaacatacggatgctcttccagacctttgaataatctgccctgattctgaaacgtcagggaattccatcccatatgcgggatctttaagccttctgtctccgggatcttcagaatctcgcctttgaggattcccaggccttccacccccggactttcctcgcttcgttcaaataaaagctgcagccccagacagattccaagaaatggtttctcaagttctgtcagctcatggatcacatctaccagtccgtattcctgaagatggttcatagcgtctccaaacgatcccactcccggcaggatcactttgtctgcccgaagaagggtatctctgtctcttgtgatgcagacatcctgtcctaaatacttcatggccttttccacactacggatattgcctgcatcgtagtcgataattccaatcataagctgcctcctcttgtgtatctaattagcggtaaataattttaccggatcttccttcacagatgttcctctgtcagcgatctcctctgaaagctgtggaaattttccgctgactctgatatatcttgattttttattaaaataagccgtcttctcaaagggaaaacgcacaagctgtggatgtgcgaatccaacgcccagctccagtacacagagtttctggttcaaggtgaatgacagccagtgaagatatttctcccagctttcatgtccctctggatccacaagcggcgcagtgatctgctccggtgcaagccctgctgcttccagtccttctctgtccttcagtgtcacaataaaatagtccttatgttccagcagtccttttagctcctggtaaaatgccgccatatctccggtcagttcttcaccaagccccacaagcaccagacttgcattctgaacttcctgtctgatttcctctaatgtcaatgtgttgtctccttgctctaaactatcttttgaacggtattataccatagcgtaaagcctttattcaattatcaaaatcaaaacagcttctcatgctgcttaatggcatgaaaagctgtccttatttaacaataatattttttcatttttccaacaattatcatacttccactcaaagtaagcagaatcagtgcaccccacagaagcggttgctgaacatctccggtacgcggtgccccaattgcagccggtggctgctggattaccgttgtatatgtcacagtttcttctgttctatgatgatgactgcttccacccccgttgtttcccggtgcatcataatggttctggaactgaaccgcatcgtttttcatcgtggttccttccctgactgcccacagctctgctgtaaggccgccttccgcatcattctgcacccggacggtcactgtatagaccgtcttatcataggtgaaccggtcagtgcttccgcttttctgatagatcttatactgatagtctcctggtactgtataatggatctgtccaaaggaaaccgttccactattcagcaccttctgtgtcatgttctccgctacaggtgcatctttggtgatggcttccataaccacttcatagacttcccctgacggaatcctgtctccgctcacctgcaccgttgccggtatggtcacatcacatgcatattccttcgcatgtacagatcccggcaacaaaaggaatgcaagcaggcaaggaaaccatgccaggcaccgaagcttccgcatcatttgcatcctcatcatatctacctccttcttgtgttcaacttattttctccaaccgtccgaacacgatcacacggccattggtccttgcatctgcacaggtagacaggccgatcacctgcgccggtctatctgttgtcatattcttataaacaactgcatgttcttcaatataagaaagcagtttattcagatctgtatccgctccgcatccatagatcatgctgtcatatgcatcggtctccacacaggcaaacatctggatctgataggttgcatccgcaagatacagccagccttccatatgtttttcaaaatacgatatatccgtatattccaccacatctccgaacattcctccatgatccatatggtgtccataaatcaggctgtatccatcggaaaaatcagaactgttacgacaggacaggaataaggatcccgacagagagaactcaccaaacacatctttattgatgtattccatatcatcattcccctggagcaccggataatcaatatgcgtatccgggatcgtcagccatccccgggtatctggattgattaaagccagttcctgcagcgaaagatgttctccctccgtctccgaagttggtttatatttcagaagttcttctcccacagccgcatttccatagattctggcggtatcccacagggaataaccgccatagagaaacatgaccagaatcagaaaacctgccagaatacttaacaatctgtctcccagccttaccagtctgagtgtgatctgcaatagttattcttccggacgctgttttttgcggaggaataatgcgccaagagaaccagccatgccaagcatcagcgcatatggtacaacagtagttaccaaacccgtcggagaagctgcatctttatggttggttactgtaatcgttgttccatctgcagtcagcgttccaatattgctcttattggttgttttatatccaagactgctgtaatcgtcctcaatgatactgtactggtcagactcactgagccccagaacctgaatggaaccgccatgtttgatggaatagctggttgcctgtgcaccgctcactacatgatattcaactgcggctgcatcagctgtctcttttaccagcacctgataccattcaccttctccgccatccacagacactgcaaactgaaattcctggcttgctttatttcccatagttccggtaacctctttgatcacagtgatatcatgggtactgtcattatcctctctggctccataatcgttggtaaatgcaagatcagctttgtctccatttttcactgagactgcatttcccacatagagtccgttattggaattgtacacatatagatatacatcataggtgctgttatcatagtccatcccttcataatcaccagatacctctgttaccagataatggtatactcccggagaggtaaatacactgccatcaactgccagacttccattcgctgtataagaagccaaaggagttgttcccgacggtgtaaatacggcattctcatctgctgccagtccgcctgtcacaccggcgctgaccacattgccctcaaaggttccttctccgccatttgccactcggaagctaaaggatgtatccggtgcgtaagtatgtccatccgtagccactgtcttctgaacaggcactgcttctatagcatgatcgccatcaccaacgatcggtgctgcacatacactcatacctgccatggataccatcattgctcccgtcatcacagaagctgccacttttctggaaatgtttcctcttttcattctcaatgatcctctctttcctgttaccgatgccggtgcactcaattctccctagatccctgatcttcgaattgccgtgatcaccgttccctttaattccttcttcgttaccggtccgaaataccggctgtcttttgcgccttcccgataatcacacagcataaacacttcctcatcagtaagtgtgacaggatacttgatcccctcctcatatggttctgtcgaataatagatctcattttccacaatggcatttccgttgatctgaagcaatgcatcttcccggatctctaccgtatccccacctctggcaaccactcttcctacataggtcttgccttctttttcaaacaccactacttctctgtctccaggcgtgcgatccagacggtaatacaacaacagatctccggctgccagcttcggcatcatggactgatccttcatgggcataactccgaatacaacaccaaagatcacccacagggtcacagccatgatcgccgcttttacaagaaatgcatgtatttctgcaatcagcctttttctttcctccacttgctatgcctctatctctccctttatctgtcttttttccgctctgtcaattccagaacaactgtcattcctgccagcaccaacatccatacaaatggcagcgtctccgtcgcaagaccggtaggcggcttaatctcgatctcccactgagcatagagcttgttcgtctcctcgtccaacgtatcgacccggatcttatcacctttctgatagagcgttccatttcctgcctgatcgattgtccagccgatgaactggtatcctgtcctctccgggttattttcctcaatcgcatacagggcgttaggtgtctcgattggaaccgtggtcggatctggtgcaccttcataattataaacataagttaatgaagtctcccggatcaatgcccactgtgcgtacaatgtcacatcatcggcaggcattgtaaacgggtccgatgggtaataagagattccatttccatcagctctgctattccaacacagaaaaccataatgctcctgcggagcctgccagcctttcgggcactcccacagagaagcttttgctccatctgcatataatctggaatcagtcactggagcgccgacacctgctcccggatcataagtcagagtaaaacggctattgctgatccatcttgctttcagagtcgtatctgctgtgataccggttccaaaatggaagggagaatctgctctggtccatccggcaaaggtatagccttcccgcaccggatctgtcggtcgtgtaacaatctctccttttttcacctgctgatcatcataagcatctgagtcagcctgttcagcaagatccgctccattcaggtcaaaacttacctcatagaccggctctgtccatttggcatacaatggaaaatctccagccggcatggtttttccttcaaaggaataggcggttccttccagtgattcattgtcataccatccctggaacacataatcttccttgcctgttggcggctgtggcgtaaaatcagctccactgatgtcttcctgatacttgaaggtcttgctggtcagctcattttccccatcatagaaatggatcgcataggaatttctggagtaataaaaattccagccatagatattttctctccagtcaaatgttgtcactctagacccgatccggggactggatggatcaccactcattcttactgtaaatcctttgatgggataatagtcattatcggtagttgtccagtctcttctacgtgaccggaaggaatctgtgtgatccagtacatagttaccatccagcccctccagataaaaacgtgtctctatggtataatttccgttctgatccacataatagaatacatttggattagctgtatcaccgggtatcggcatggtcgcaataccgctctgatacttgtctccattccttgatatcctccagttacttggatacgtattgtcaagatcttttctgcggcttggccactggttgctgatatttgcaccatatttcgctgtgatggtcagttcttcaattgcccttccattccgcatgaatttcactgtgtagatattccggtcataatacacatgcactaccgtagaaccatccccggcaatcgtctgctgaacgaccagttttctcgtacttgcactgaagcccttataggtttttgatgcggatgcttctgtcaacgctcccgtcaatccctgtctgacttctgactctttcagagagtatccgtcatcgtctgcattttcctgccagtacagcaccgtgtagttgacccgaactgcatcccattttgcatagagagttacattggcagccaactctcctccaaaagaaaatgctttcgtgcatgcttcatcttcataccagcccgcaaatgcataccctgcacgaactggatcttccggctttgtggtggtctctcctgttctcacaaatacaggctctgtcacactgccgccatcagacttaaatgtgatccagtgtgcctttgccactaccggataaagcgtcagatcatcgccttcgatggccagatcctttgttccagcaaaagtatccggatcttccttcaagtctgtggaccagcc

SEQ ID NO: 3218 - DNA, 6726 bp, Unknown
  16S sequences of unknown bacteria
cgttcatccagcggcaaaatcaccacgccgccgggatgttccactatttcgcgctgggatgttttcccattgggcagccgtacttcatccatatgaatatccacgatgcggccgtgatacaccgtgcggccgctcagtttggtttcggtcagttccattgcatctgtcctccgtttcagagaatctgtgatctgaaattatataaaataaagtataccataggcgtttggaaaaagccatataaagcgtgaaaaaagcgtgagcggcctgcgggtacaaaaagatgtgacagcgcgtatgaaacggtgtctatagcgtaaactaaacccggatggagggggaaaaagcatgcggaaattttgtcagacggtggatttgtttgctatgggcggcgggacgtatggacttattgaagtgctctggcgcggatacactcactggagcatggcgttgttgggcggtgtactgtttttgctgattggggcgggaaaccgccttctgcctgaaggtacgccgctgctgatccgggggctggcgggcgctggcgtgattacggcggcggaattcgccgccgggtgcattctaaatctgggcctcggcctggctgtctgggattattcggacatgccctttcagctttttgggcagatctgcctgccttacagcatcctttgggcagttttggctatggtagcctcagcgctgcacggctttatctgccgggaggcctggcagggagaggcattgcctggtgctgtgcaaaaaagcggttgcgccgcgccgcggaagggtataggataagggcacgaaaacaagaaagagggagagagccatgtgggccgatgaaacggtattttaccagatttatccgctgggattctgcggcgcgccttttgaaaatgacggcgtgcaggagcaccgtgtgttgaaagtgctggattgggtggagcatttgagacggcttcatgtaggggcgctttatttttgcccggtgttttcttcggacactcacggctacaatacgcgggattttttccgtatcgacgagcgcctgggaaccaacgcagattttcgggaagtttgccggaaactgcatgaaagcggcatccgcgtggtgctggacggcgtattcaatcatgtgggccgtggcttctgggcgtttcaggatgtgctgcgcaaccgggaacgttcaccctacatagattggttttacatcgatctgggcggcaattcctgctatgacgacggcctttggtatgagggatgggaaggaaattacgatctggtcgagctgaacctgcgcaaggaagctgtggtggagcatcttttggaagcggttcgcttctgggtgcaggaatttggcatcgacggactgcggctggatgtggcttattgcctggacaaggattttttacgccgtctgcgtgccttctgcagtgatcggaaggaggatttttttctgctgggcgaaatgctccacggggactaccgggagcgtatgaacggcgaaatgctgcattcagccaccaactacgaatgctataagggcctctactccagtttcaacagcatgaacctgtttgaaatcaaccattccctgcagcgccagttcggcgcggaggactggtgcctctaccggggggcgcatcttttcagttttgtggacaaccacgatgtgacgcgggcagccagcattctgcagaacgaaaggcatctgccgctgctctatgccctgtgctttggcatgcccggcattccctgcgtgtattatggcagcgagtggggcgcccggggacgcaaggaggagggcgatcgcgccctgcgcccctgttttgcgcagccggagtggaacagcctgacagactggattgcccgtctggcggaggtcaaacgggcggaaagggcgctgaattggggggctttccgctctgtggtgctgaccaaccggcaatgtatttttgagcgccgatgcggtgaagaatgtgtctgggtggcggttaatgccgatgagcagccttattgggctgcctttgacgcgccgggagcgcgcgcagcggatttattaagcgggcgggaggtggttccttccggcggtatggaattgctgccctacagcgcagctttctggaaatggcagaattgaaaacaatcccccccgcgccactttgagcggcgcggggggattgctttgcgttggatcagccaagcatggcgcttagatccgcttccggtgttgtggtgggcgcaatgtggtactgctcggtcagaagcgccagtaccttaggggagagaaacgcaggcagcgtggggccgaggcggatgttctgaatcccaagatgcagcagtgtcagcaaaatacaggcggctttctgttcgtaccaagacagcaccatggacagtggcaggtcattgacgccgcagccaaaggcatcggccagcgccagcgctacctgaatggcgccgtaagcgtcattgcactgccccatatccagcagccgtggcaagcctgccacggtaccgagattcagatcgttgaagcggaatttgccgcaggccagcgtcaggatcacggtgtcctggggcgtttgcttaacaaaatcggtgtaatagctgcggccagggcgcgcgccgtcgcagccgcccaccaggaagaagtggcgaatggcgccggatttcacggcttccacaatttgtcccgccgcggatagcaccgcgctgcggccaaacccggtggtcacgctttggccgccgttaatgccggtgaacggcgtgtcttcggagaacccgcccagcatcagggctgcttgaatgacgggcgtgaaatctttgtcacggccgatatggtgcaggagtggataggatacggcctcggtggtgaatacccggtcggcatagttttcctttacaggcatcagacagttggaagtgaaaagaatgggcgcgggcagatgggcaaattctttttgctgattctgccacgcggtgccgaagtttcctttgagatgggggaatttgcgcagttccgggtagccgtgggccgggagcatctcgccgtgggtgtatacgttgacgcccttgccttcggtttgttccagcagcagtttcaggtcgtacaggtcgtgacccgtgaccacgatgaatggccctttttccaccttcagggaaacctctgcaggggtgggagtgcccagcgtttctgtattggcgcggtcgagcagggccatacactgcagattgaccgcacccagttccatggccagggccagcatttgttctgcgctgaagtcctcgcccaaggcaagcagacccttataaaaatagcggtttaccgcctcgtcgctgtatcccattacaccggcatgataggcgtaggcggccatgccgcgcataccgaataaaatcagagatttcagggagcgggtgtcctcatcggcgctccacatgtgagccatatcatagtcgccggttttaccgcagggcgcgttgcaggcgctgcagccgggggcgagccggttcttttctgcgtggacgcggtcaatcagggcggtaatggtgttatcgttgaaactgacattggtcagtgttgtgaacagagcttcctgcaccagggtatgggtggtggcggtcagcaggttttcgtttccgctggcggcgcgggccaggctcaccagcgcgccggtcagttcgtcctgcagccgggcggtggcggcagatttgccgcacacgccggcgcggccggtgcagccggagcagtttgccgtctgctcgcactgaaaacaaaacatctcattcatggaatgttcgtcctttcttttcaaaataggggggatcactttcggtgtccggagacgcaggcagcatcctgcttctgtgctccggggggcggtgggatcaggtgttgtcggagaacacaatgctcaacagcattttgaacgcttcttccgcgtataccgcatggggcttgccttccggcattacgatggtttgtccggcgcggcagatatggggcgtgccgtcgatggaaaaacgccctgtgccctcaagcacggtgaccatggcgtctccggaagcagcatgggcgctgatctcctcgccttggtcaaaggcaaacagcgtgatgctgacggctttgttctgtgccagggtcatactgactacctgaccgggcagaacagcaatttgctcgctcagggcgagggccgtttcgtgggggatgtttttgatctgattcataaaagtacgctcctttcctccgttcagctttccagcacacggccgtcggtggacagtgtgaccacctgccagggcaggaatttgccgctgtttttcagcgcggtaacggcggcctgttcgataccgccgcagcagggtacttccatgcgcacgacggtaaggcttttaatcagattttggcgcaggatttctgtcagcttttcgctgtagtctgcgccgtccagcttggggcagcctatcagggtgactttgccgcgcatgaattcctggtgaaagttaccgtaagcaaaagcggagcagtctgcggcgatgagcaggttagccccgtcgaaatagggagcgcagagcggggccagcttgagctgtacgggccactggcgcagctgagaagaaatggtggcgccggcgggcgctgcggtgacgtcttcgtgcatcaggacgcggctccggctgccggggcagcccccgccgggcggcgtctgtatgggtgcgctgttgcgcagggctgctgctttccgggccagtacggcggcttcatcgtaagcagctgcttcacgctgtacaaaagagatggccccggtgggacagacgggcagacaatcccccaggccgtcgcaataatcgtcgcgcaggagcctggccttgccgtccaccatgccgatggcgccttcatggcaggcagcggcacacaggccgcagccgttgcattttttttcgtcaatttgaatcatttgacggagcatcgtttttcctcctgttccggcaagaaatctgcattgccgtttgactttatatccacactatagtagcatggaggtaatcagtatgttgttttaacaacaaaaggagaaaaacatgacacaattattgaaaacgctgggccgcacagcgttgtttcgcggtctgtcagaggaggaagcggagaaagcgctgtcctgccttggcacgcagcgccgctgttatgcaaagggagaggcggtgttgcgtgccggcgaccatgtcggcagcattgcactggtgctttcgggcagcgtctgtattgaaaacaatgacgcttggggcaataaaagtgtgctggaccgtttggggcaggggcaggtgtttgccgagacctatgcctgtgttcccggtgagccgatgatggtcagtgtggtggcggcggaaagggcggaaatccttttcctgcgtgctgctcccttgttggacgaacaggcgccgccggctgtgcagcgactggtgcgcaatctgctttcagtgtcggcgcagaagaatttgatcctttcccggcgcatgttccatatttcggcaaaaaccatccgcggacggctccagtcctatctctccgatcaggcggcccgccggggccggcaggagtttgatattccctttgaccgccagcagctggcggattatctgggggtggatcgcagcgcgctgtctgccgaactgggcagaatgcagcgcgaggggctgctgcgtgtgcggaaaaatcattttgtcctttctgcggaaaaagacggataaaaaaacggcaggctgtttcaaagcctgccgttttgtcttgttttatgctttgctgaatgcccaaagattggagatctgtccttccagcgtttcatagctccaatgctggctgctgcgcatcgggctgttgggatcgtttacggtgaatccgttttcatcgtaaccggtgagaatgatgtagtgtccggtggttgtaaagtcgccgggagccatggcgcataccaccgggcggccttcttcgacagcattgatcatatattgtttgaccagaggaagctcttcggcgcgcagcccgaagtgggcgctgccctcggacatgaatgtccaggaagtgccgctgccttcggcataatagccgttctcctcagcccagtgagccacggaggcgggatcccaagtttcgttaccggtcaggtagagcgccagcatggacatgcaggtggggccgcagcctgtccagccgatcaggccgctgccgtattcttggtaaccccagcgctcgtcccactgcagcagcagaggaactgtgttttgtgccgcctcggaagagaggtcaatggcagggcgtttatcctttttactgggataatccaccacataatcgatcgcttcgctgtttttcagcgccagggcgatcaggtcttctgaatagctgtcgatctcatcgaggatcttcttgacctggggatattcctgtgccaattctttcaatgccaataccgtttcggagtccccgctctgaggcgtgaggtccacatgctccaaagcatcgtctccggccagctggcctgtcccgttggcgccttgggacgcaggatcttctagggaggaaggcgtgacgctgtccggccagaagcggagcagcgcaatgcataccacggcgataacgacgcagcccgctgcccatgtcaggcgtcggcgctgtcgccgccggcgggcgactctacggcggcgttgccgatcctgttg

SEQ ID NO: 3219 - DNA, 3813 bp, Unknown
  16S sequences of unknown bacteria
tccgatctccgcgcaccagctgatagcccgcgtattccatcgctttcataatggtcaggctttcgggcacctgataccttttgccgaacaggtaaacgtttaccaaattttccatgcttattctccttcgctcaatactcgtcgggcagttcgtccaactcgtccatacggaacacgggaccgtccttgcagacgaatttatcgccgacattgcaccttccgcatttgccgatgccgcacttcatgcgaagctccaacgtcgtgtagacgcgggatttttcgaagccgagttcgagcagccctgaaagcgtaaatttaatcatgatgggaggtccgcataagacggcggtcatcgtggaatcgagccccagttccttgacgtacgcgggcacgaagccgacgtgtccgttccagccatcctgaggacggtcgattgtaagatagacctcaaaattcggttctttttcccattcgttgcggatttcctcgatgtccacgaggtcgtccatgcttctcgcgccgtaaacaatcaccactttaccgtaattgttgcgataatgacgaacgtaattgatgacgctgcgcaaaggcgcgagcccgatgccgcccgcgataaagagcagatctttgcccttgaaatctccctcgacggggaaatttttaccgtaaggcccgcggacggtgatctgctgtccgacttccaaagaatggatcacctcggtgacgcagccgcattttttaatggaaaactccatgtactctttgttcgtaggcgaagacgtgatagagaacatacactcgccgacgccggggacggaaaccatcgcgcattggccgggcagatgctcgaacggctttttcccgtccgtgccgacgacgcggaaagtcttgacgtcgggcgtatccctgcggatatcggtgatgactccgattttgggtatcagattctcgttaatcatgcttttctcctcctatcgtcttgactactttcacgatattcagacgctgcgggcacttattgacgcaccgcccgcaccccacgcaggaatacagtccgtcgtgctgagcgggataatacacgagtttatgcatgaaccgctggcgatacctctgcatctgcgtcgtgcggctgtttgccgccgccatcagcgtaaaatccgagtacatacaggaatcccaacagcggaaacgaatcacgccgtcgttcgtcttgaaatcgcggatgtcgaaacattggcaggtgggacagacgaaggtgcaggccccgcagcctaaacaagcctccgaaagggactgccagacgggaagttcgaaaagctcgttgagattttcgggcttgaaacgggaaagatcgagatgggagaaaggcagtttttcgacgatctccctcgtctttttctgctgaacctccacttccgcttccccgcctttttcgaacagcgccgcaagggaagaagtcaaagattctcccttctccgtgtttgcgcgccaatagagatagttatcgtccagccatgcggtgacgtcggccataggctccgccgcgtcgatgccgaacgccttgcagaaacagctttcctcgggacgggaacaggcaagcgcgacgatgacgcccgcgtttcgcctcgcctgataataagtgtctacgggatcggcgaggaatactctgtccaaaacgtcgaacgccttgaaatcgcaggctctgacgccgaaaaggacgaaaggcttttgttcttcgcggacgtcgaggatttcgatattctttccttccgtcttaaatttcatcatcgtttcgctctggggaaagaacagatccttgggcgatttcaccgttttcagcgtttcgagggaaacttccgcgccgtcctcatacaggccgtaattgacctctcccgcttttttaagcggcagatacaacggcatggcggcggaaatttttgcgtataattcgtttaatttttcctttgaaattttaaacattatttttcctccgcgtaaaagacgtctttcggctccgcgtccttttccgtatattcggtgagcggcgtttttccgtcggcggtttcgcccgcctgaaattccccgtataaggtatccatgtctttgatgaacttgcgattcaaaagatgcaaagggatatgctgcggacagacgcgactgcattcgccgcagtccgtgcaccgccccgccacgtgaaacgcgcggatgatatggaacatctgttcctcgaactccgtgtcgttggccttggcggcgatccccgaagcgggattgtcgaaaacgcacttcacgcacgagcacgcggggcagacgtttcggcacgcgttgcagcggatgcatttggaaagctctttcttccagaacgcaaaccgctcgtcgggcgtcatcgcttctatctcggccacgcccgagaaacggtcgttcttcgtgtcgggcatttcgtgcaaaacgatcgtttcgtccgccgccatatgtttctttcctttgcaggagaggcatttatcgagcagaatttcctcgcgcgcgatctttgcgtccccgtaaagggaggacacggcgatccattcgccctcttcttccacttccgtaacggcgtccacgcccttcgacttgatcttttcgacgtccagctttccctgacactcgacggcgatcacgcgcacgttttcgcggacgacgcggtgctctttgacgagttcgttaaagctgtacgtatcgcagggttttaaaaacacggccgttttgcccggtttcttacacgccgcgatcagatatttggaaagattcgcgccgcagaagccgttgtagacaaagtcattcagttcctcttccgattcaaaggaagcgggactcggatcgaagtaaaactcgccctttttccagccgaccacgcgggcgacttcaccgcttttcaaaagctcggcggctctttcaatcattttttgttccacgtcacgcattgtccgagccctcctctttacagcgcaggtcggcgaggcgcttgttttcgcccagcgcggcgaccgtctttacaaaatcgttcatcacggcggaaaaacgcgcgccctccgcggcggacacccattccacgcgggtgcgttccttctcgatgccgagataattcaaaaagctgaacagcgtcgccattctccttctcgtataataattgcccgtcacgtaatggcagtcgccggggtgacagccgcacagaattacgccgtccgcgccgcgctgaaacgcctttaagacgaacatgggattgacgcggcaggaacagggcacgcggatgatcttgacgttggcgggatagctcagacggctcgaccccgcgagatccgcgcccgcgtaggagcaccaattgcagcagaaagcgactatgttgggtacgtattctttcttttccgtcgttacatcctgcatatcgcttccacctccgacataatttgtttggaactgaatccgtttaaatccatggcgcccgaaggacacgtgaccgtacacgcgccgcaaccctggcacaccgcgggattgacggacgcaactctccgcatttccgtcttaccgcccccgagccggaattccttttcgacataggtgatggcgccgtacgcgcagacatttgcgcattggctgcacccgttgcacatcgtttcgtcggcgcgcgccacgcagggattcgttttgagcttatccttgacgagaagcccgatgactttggacgcgcaggcggaggactgggacaccgtttcgggaatgtctttgggaccttggcacacgcccgcgagatacacccccgccgtgggactttccacg

SEQ ID NO: 3220 - DNA, 4955 bp, Unknown
  16S sequences of unknown bacteria
aaagtacgcaacctgcgcggcggctctttccgtgacaaaagcgggagcgtcctcttccatcccgacaagagcagaggtcatagcctacgcgaagaacaaagtcgcggctgaaaacggaactgccgacaatgcggacgccgtagtaaaagacgaagcagaggagaaataaatgataatagtcggaatagacttcggagacgcgcgcacgggaattgcggtctgcgacaaatacgagatgatggcgacggaagcgggatgcgttcacgcggattcatacaaaaaggctctcgcggctgtcggagaaaaggtcgtcgagcttaaagccgagcttatagtcgtaggaaatcccatcaacatggacggctcgcaaggctcaagaagcgagaagtgcaaggcgttcgcaagggagctgtcggagcttaccggaattcccaccgagatgtacgacgagaggctcaccacagtctccgcgcacaagatactgaacgacaacaacgtcaggggcaaaaaacgcaaggcaaccgtagacgccctctccgcaaggctcatacttgaagactatctgagactgcgcaagaacaggcaaaacgctgactaaatcaaacgactaagtcaaaaaatttacttaacataaaggagacacacaatgaataacgaaatctcatgcgaaaccatgaaaaagctcgacgcgtactgtgaaaaggacgttgtccgcagagcgctcacctcggttttctcaaagaccaacatgaacgacatggcgtttagcacctccaaggctaaggctaaccagttcattttctccatcgacaacaaaaccatgggcgcgacaagccagaacgcaagcggcagatgctggctctttgcagcgacaaacgtactccgtgaaatcgttgcaaagaagctgaatcttgaatcctttgagctttctcagtcgtacctcgcattttgggataagtttgagagaatcaactactacatcgactccgtaatcgcaaccgcaaatgaagccgcaagctcccgcgttgtagactacatcgttgctacaggcgtgcatgacggcggtcagtgggatatgttcgtaaacctcgtaacaaagtacggcgttgtacctaaggtagcttatcccgaaaccttccagtcctcaaacaccggcaacgtaaaccgtcacatcaacaactatctgagagctaaaactcccgagctgagacgtcttgccgctgccggagaagaagaaaagctcaccgcgctcagagaagaaatgctcgagaagacatactccttcctctgcgcctgctacgacgttcccccgacggaattcgactttgaatacaaggacaaggacggcaaggtattcgttgaaagaggtcttacaccgaagacattcacagaaaaatacatcggcacattcctcgacgactatgtttccgtaatcaacgctcccacagaggacaagccgtttgacaagacctacaccgtaaaattcctcggcaacatcgtcggcggcaagaaggtctgctacctcaacctcactatcgaggaaatgaaggagcttgtcgtaaagcagcttaaggacggcgagcttgtctggttcggaagcgactgcggcaagtacggcgacggtgcaaaggctgcatgggatcccgagcagtatgacgacgcggctctcacaggtcttgactccgctatcacaaaggaagacatgctgaactaccacgtaagccagatgaaccacgctatggtaatcaccggcgtaaacctcgaccccgacacaggaaagcccacaagatggaagatagaaaacagctggggcgcaaacggagctaaccagggatatcacatcgcgtccgacaagtggtttgacgagttcgtattccaggcagttatcaacaagaagtatctcggcgaaaaggcggctcttcttgacggagaaatgaccgagcttgagccttgggacccgatgggaagccttgcagactgaggtaaaaccgatgctgaactgctacaaaggcaaccttcatatgcacactgccctctcggacggcgctctcacccccgaagaggctgtgctgaaatacaaaaaggcgggatatgattttctcgcgctgaccgaccactgggtacagtccgaaaacggctacatgagcggagttacaatgctctcgggctgtgaatacgacttcggacgcaatacagtcgagggtgtgtaccatgttgtcggcataggctttgagtccgaccccggaatcacacgcggcgacggagttaaaaccgctatcgagaagatacataaggcaggcggagtcgctgacattgcgcatccggcatggtcgatgaacaccgttgatcagctcatgaacgctgcggatgcggactacaccgaaatattcaactccgtgtccgatcttcccgcgaattgcagaccgtactcgggagaggtcatagacaaatgcgcggcaaggggacttatattcccgatggcaggcgttgacgactctcactggtacaaaacggagttcgcgcgcagcttcatctacctctttgcggaagaatgctcgcccgaggctgtaaaggacgctctgttcagaggaaacttctacgcctcacaaggcccgagactcagtgtgttccgtgcggacgacagaatagttgtcgactgccccaaagaagacggcattgagatagccacattcttcaccgacaccgtatgggaggacgagcgctccgttgtaggcgaaaacctcactcacatcgagcacaggctgagaggacatgagactttcatccgtgttgaagtgagaaacaaacgcggagaaatcggctggagccagataatcaagctgaactaaactgaataaagaaaaggccgattcggagaaaatttccgtttcagccttttttgttatccatgcgatgttatttctttgaggtttcctttgattccttggaagtctttgtttccttcgcttccttgctctttgtttccttggagtccttcgcgtcctttgaatcctcgtcggagtccttgtctttatccttggaatcccacgggaacttcatttcgtgctcgttttcttcctcttcttcttccgaaacgggaggagcgagctttgttacggtcattttcgagattctgtgatcctttatctcggtcacgcgaacattaagtccgggaagctccacttcaaattcactgccgtcctcgggaacaacgccgtagcttgcgaatacgtatccgcccatcgtgtcgtatttgtcctcgggaagctccatgtcaagctccttcgccacgtcactgagagaagccacgccgtgtatctcccatgtgtcgtctgatatcttctttatctcgggctcttcctcttccgtgtcgtcgctgtcgttgaggtcgcctacgataagctcaagaaggtcgttcatcgtgacgatacccatcattccgccgtattcgtcaagcacaaccgcaaagtgatttcgtgtggtctgcatctgacggaacagcacatccgcgtgaattccctcgggaacaaagtatgcgggctttactgcctccttcattatagtagcacggtcggcgccgcggagtctgaaataatccttcacggagagaacgcctacaacatcgtcaatcgtgtctccgcagacgggataaatggagtggcgcgtttcgtgaatggtgttttcccatgtcgcgtcgtcctcatccgcccaaagaatggatatatccgttctgtgtgtagcgaattcgctgacggtaaggtcgtcgaactcgaacacattctgtatcattttctgttcctgctcgtcgataacgcccttctgaccgctttcgtcaaccataaggcgtatttcttcctcgccgacttcctcatcctcttcgttcgggtcgattccgataagtctcagcacgccgtttgtggacacggacagaagccacacgatgggtgtgaatatcttagctactccgtagagcatgggagccatgccgagcgacatctgttcgcttttcttcatggcgatacgcttcggcacaagctcaccgaggataagcgtaacatacgagagaatgagcgtgattataatgacggagatgctctggagagtgttcggattgatcttcacgccgagtgaaacaagccagtttacaaggcgggaggcaaagttatcagccgcgaacgcacttccgagaaatcccgagagtgtaatggctatctgaatagttgaaaggaattttgaaggctgctcaatgagcttatggagctttcttgcttttttgttgccgccttcttcgagtttagttatctttgcttcatttaccgacagaaccgctatctcggcacaggcgaagatcgcgtttaagaatatcagtacaagttggagaagaagctgtccccaaacagatttcataattaagtattttcctccgaaatatgtaagtgatttgaggtgacagaattaaacgtttcacctccgataaaaatgacgtccgcaggaaaatatcaggtcagaagcctgcgaaaatgcaaaaaggcatacctgtaacccacaaatgagcgcagcaatgccttcttaaaacagtgatcgcctgcctcatgcccgcgataaatgaccgaacggaaaaaagcgcacttatcgttctctgcgccgcagggcttccgatgctttgatattgtgaagcctcgtcgtttcccgtctgtacagtctccgctgtccatgattagcatgatcctcctgattgattttttgaattttagatgtttgcgtttattataccatgcgccgacgaaattgtcaagcggtatttagtgtgttttgcaggacgagcggtttgttgtatttttgcctcgtttgactttttccgttcttacattcaaattcatgtgcgatttccatcaaatttatgatataatatttttgattttataaaaaccaacaaaggaaagtaaaatgaaaag

SEQ ID NO: 3221 - DNA, 29922 bp, Unknown
  16S sequences of unknown bacteria
gaggaaagtctaacgaaaatggcggctcttccttgtttattttttcaccaaatctccgggcgcacatttgcgcgcttttcccgcgattctccctttgtttccccggcccaatagtgtataataagctgaatctcatagatagtattgaagaaaggcggtatgacacatggcatttgtgacaaccaaagaaatgttcaaaaaagcatacgagggcggctatgccgtaggtgcgttcaacgtcaacaatatggagatcattcagggcatcaccgaagcggccattgaaaaccgcgcgccgttggtgttgcaggtttccaagggtgcccgtgcttatgccaagcacgtgtatctgatgaaattgatcgaggcggccatccaagacgccgagcagtctgccgggtttgatctgccggtgtgcgtgcatctggaccatggcgacagctttgaactatgcaaaagctgcatcgacggcggctttacctccgtgatgatcgacggctcttccaaatcctttgaagacaacattgcgctgaccaagcaggttgtggaatacgcacacgatcacggcgtggtagtagagggcgagttgggcacgctggccggcgtggaagacgaggtctgcgtttccgcagaggaatcctcctacacccgtccggaagaggtggaggaattcgtatcccgtaccggggtggattccctggccattgccatcggcaccagccacggcgcttataaattcaccgctgcacagtgcacgcgcaacgaagaaggcatcctgatgccgccgccgctgcgctttgatattttggacgaggtatccaagcgcctgcccggattccccatcgtgctgcacggcgcttcctctgtgccgcaggaatttgttaagatcatcaaccaatacggcggcaaaatgccggatgctgtgggcattccggaagaccagctgcgcatcgccgcccagaaagcggtttgcaagatcaacatcgactccgatctgcgcctggccatgacggccagcctgcgccagtattttgtggagcatccggatcattttgacccgcgccagtacctctcgccggcccgcaccgccatcaaggaaatggtttcccataagatggtgcatgtgctgggctgcaacggcaaagcctgagcaaagtacgatagagaaaaagaggaagcgaatcgcttcctcttttttcatggtctcacttttccagcttttttctgagatagagcattgcgtcccttggcgttcctttcaaaaactcggatttaggcaatacgatacaaagcgttttgctgtacaaaatcaataggtgtttcgactcgtataccgccgtgtacatctcgtagggatattgttctatggtcagcgaattgccgtttttgtcgtatccagccatggtcacttctgtttcccccaaaaaacagaacttctccgccgcatttgttttccgcttctctaaatcgcggtaattgtttttcaatctcacccatattatcacattgacaattactattgctgcaaaagtgaaaacataagacatatccaattccgttatggcaaacaacgagagcatcactgtaaaacacacactaatgaaaaactgtttggatctggttagaattgttctgatgtactcccaatatatctcttgattcatttgcagctggcaaacaaagtgtgccctttcttccagtacctgtcggtttttctcttccatttgttttctctctatccacatttatcatgtcatcgccgttccaacttttttataaagctgcttggcaaacaaaagcaggattttccgctgtacttatgctcttctctccactagcttacatgcacttagtggtgttggcggtgcagcatcgcagcgcctaccagccccgcatcgttgccgagctgcgccaagaccagcttggtcgtttgctggccggggcgggcatagctctggccctccatggccttttccaacgggcgcatcagtgcttcccctgccccggaaatgccgccccccaggcaaaggacgtcggggtccagggaattgacgacgttgctcagccctaccgccaaggcttttacatagaaatccagcacggcctgcgccgttgcatcccccatggccacggcctggaacaccgtcttgccagatacctccgaaagctgcggcgccgcctgccacagcttggattccgggtgcgcctgcatagcgctctgcgtctggcggatcaaagcgggcgctgccgaatacgcttcccagcagccgcgccgcccacagttgcacggctcgccatccatacagatgacggtatgccccagctctccgcccgcccagtgtgcgccggcgtacaatcttccatccagcaccaggccggtgcccaccccggtgcccagcgtcaccgctaccatagaacggctgccccgcccggcgccggcatagtattctcccaacgccgccgcgtctgcatcgtttgccaggtaaaccgggcaatgcacccttttctctatcatgctgcccagcggcgtattttcgaaatttagattgttggcaaagcccaccaccccagtctgcgggttaaccgagcccggcgtgccaattccgacgcattcaaccggcgccggcgattgcgccatcatctcctcgatacaaagcgcaatatccactgcaatctcctctgcgctgcgcggcattgccgtcggccggtgcacacgggccaaaagccgtcccgtttcatctgccagcgccgctacgatgttggtgccccctaagtctaccccaatggtatatggcatcgctgctccccctttttcccttacaatttatattcttagtatatcatcttttccccttcccgtctcttgcttgacattctcccttcccatcgggtatgctcagtgtcgacaatgtaacgcatggctcgttatgcataggaggtagtatcatgtctgaaaaatgtgaaatcggcctgattggcctggccgtgatgggccaaaacctggtgcgcaacatggcgcgcaacgggttcaaagttgctgtatataaccggacctctgccaaaaccaaagcatttgtggagtccgtgcccgaaaaaggcattgcgcccggctatacgttggaggaattcgtcggccttttggaaaagccgcgccgcatcatgctgatggtacaagccggcaaggcggtggatgccgtgatcgaagagctgctgcctttgctttcccccggcgacctcatcattgacggaggcaattccttttttaaagataccattcgccgcaccaaaaaggtggaggcggccgggcttatgtatatgggcgccggcgtatccggcggcgaggagggtgcgctcaacggccccagcatcatgcctggcggcacgcaggaagcctggaaggccatcggccccatcttccgtaccatctgtgctaaatccgacggcgagccgtgctgcgattatgtaggggcggacggcgccggccattatgtaaagatgacacacaacggcattgaatacggtgatatgcagctgatctgcgaagcgtactttttgatgcgtgagctgctcggcatgtctgcgcctgaaatggccgaggtcttcaaaaaatggaaccagggcgtactggacagctatctcatcgagattacggcggatattctcagccagaccgatgaaaagaccggcaagcccatggtggatgtgatcctggacagcgccgggcaaaagggcaccggcaaatggaccagccaggagtccttggagcttggcgtagctgcgcccactgtggcggaggccgtctttgcacgctgcatgtccgctgccaagcagcgccgggtagaggccagccggctgctgcccgccgatgtgcagccttttaccggcgacaagcaagccttgatcgacgacatcgagcaggccctgtacgcctccaagatctgttcgtatgcccagggctttgatattctgcaccaggcagcagaggaataccattgggatctgcattatggcgatatcgcgctgatgtggcgcgggggctgcatcatccgcgcccgcttcctgggcgaaatcaagcgcgcctacgatgccaatcctgcgctttccaacctgctgctggatccctactttaccggggtcatcgaaaagggccaggcatcctggcggcgcgtggtcgctgccgcggcgctcagcggcattgctgtgccctgcttctcctctgcgctggcatattacgatagcttccgtacggccaacctgccagccaacctgctgcaagcgcaacgcgattattttggcgcgcatacgttccagcgtgtggatgaggaaggcgttttccatcatcactggttctaaggtttccaaagccgctgcgctgcagcggcttttttcaatggattgaaggaggtttcccatgcaaattgaaaacgcacgcccggaggacgcggctgagctggtaccgctgatggatcagctggtggatacgccggcagagttatcgctcgttgagcagacgctggtccgcatcctggcggatccggcgtatcacctgctggttgcccgcgaacaaggacatatcctgggcacgatgatgggcattttgtgctatgatctcaccggccgctgcgagccgtttatggtggtggaaaacgtcgtcaccgctgcctccgcccgcggcaagggcgtagcgcgcgccttgatggccgagctggagcgcatcgcccgggcgcatcactgcacctgtatgatgctctgctccggccaggagcgcacaggcgcgcacgaggcgtaccgcaggatgggcttttccgataccattaccaagggctttaagaaaatgctgtaagatgctttggcgcgccggcatccaggcgcgctgtttttttctcttgactctcacacaatggcaggctgtattctcatcctgagctcaaaataccccctaggaggacgataaaccccatgctgaaaatcggcgacttttccaggctatccaggatgagtgtgcgcatgctgcgccattatgacgagctgggcctattgacgcccctgcataccgaccctgccagcggctaccgctattacagccccgcccagctgtcgcgcgccaaccgcatccgcgctttccgcgatatgggctttggcctgcaaagcatcggcctgctcttgcagcagggcgacgacaaggacgcgatccgggcccagctctacgcccagcgcgctgcgctccaaacccagctggagacgacaagacggcagctgcgcttgttggaaggcgccctttctcagctccgaaaggatgatttttctatgcagtacaacgtgaccctcaaacaattgcccgctatgccggtggccagcgtgcgcggacagcttcccagctatgctgaggaggggcggctctggcatcttctgatggaggaaaccgctgcccatcttccccctgcccagccctgctattcccttgccattttccatgacagggaatttaaggaatcgcaggtggatgtggaaatccagatgacggtcaaacagctatcccccgataccgagcatatcaaattcaaaatgacagagccggtacagtttgcctccgccattttccagggcggctatgaaaagatcggcgaagttaaccaggccgtggcgcattgggtagaggaaaacggctatgcctttgccggcagcatgttcaacatctatcacgtcggcccgcaccaaacccaagacccagcagactatgtgacggaggtctgctatcccgtacaaaaataaccagcttcaggcgtatggcagaggctatacgcccatttgttttgaaaaaagcctgcgttttggccgcttttctttgcaatacacattgactttgccaaccgcactggcgtataatcaatgcttgaagtccgtgccctgtgcacggtcttttcacgatatttgagatacgcagggccccgccctgtttagatttgaagggatttactatgattagaaatgatttgcgcaacattgccatcattgcccacgttgaccacggcaaaaccaccttggtggatgaattgctaaaacagggcggtatttaccgcgataaccaggttgtcgaggagcgcgtgatggacagcaacgacctggaacgggagcgcggcatcacgattttggcaaagaacacctcggtgcattacggccataccaagatcaacatcgtggatacgccggggcacgccgatttttccggcgaggtggagcgcatcctcaagatggtcaacggcgtattgctgctggtggatgcggccgaagggccgatgccgcagacgcgctttgtcttgcaaaaggcattggaactcaaccatcccatcatcatcgtcatcaataagatcgaccgtgcggatgcccgcatcgacgaggtcgtggatgaggtattggagctgttgatggatctaaacgccagcgacgagcagctggacagccccattctctactgttccggccgggcaggcgccgcttcggacaagccggacgatgtggaaggaaaaaacctggaggtgctgttccgcaccattttgcagcatatccctgggagacgaggccggcccgctgcaaatgcttgtttcctccatcgactataacgactatgtcggcagaatcgctgtcggccgcatcgaacgcggctctatccatgccaacagcgaggtgatggtatgcgattaccatgaaaagcataagccgtaccgctctaagatcgtcaacctctaccagatagatgggctaaagcgcgtgcccgccgaaagcgcaacggtgggcgatatcgtctgcctttccggcatcacggacatcaccatcggcgacaccgtaaccgccgtggatgcaccggaagcgctgagctttgtaaagatcgaagagcccaccgtagagatgacctttgccgtcaacgacagcccgtttgccggcaaggagggcaaatatgtgacctcccgccagattcgggaccgtctatttcgggaattgctcaaggacgtgtccctgcgggtggaggacggcgataccaccgataccttccgcgtggcaggccgcggcgaaatgcacctttccatcctcatagaaactatgcgccgcgaagggtatgaattttccgttagcacgcccaaggtgctgtataagcagatcgacggcaaaacctatgagccggtggagcgtttgctcatcgatgtgccggaggaatccgtcggtaccatcatgcagaagatgagcgcccgcaaaggggagatgatgcaaatgcatcagcagggcagccggatgcgcttggaatacctcatccccacccgcggccttttgggataccgcaacgagtttttgacggatacccgtggcgaaggggtgctcaatgccgtgtttgatagctaccagccctttaagggggaggtcacccgccgcttcaccgggtcgcttgtggcttttgaagcgggggacgctgtggcctatggcctatacaacgcccagcagcgcggcgcgctgtttattgagcccggcaccgcggtgtacgagggcatggtagtaggccaaagcccaaagatggaggatatcatcgtaaacgtctgcaagcgcaaacagctgaccaatatgcgcgcttccggcagcgacgacgcgctgcgcctgacccctgccaagcaaatgagcctggaggcctgtttggaattcttggccgatgatgagcttttggaggttacgcccaaaagcctgcgcatccgcaaacgcattttggataaggcggcgcgcctgcgtgcccaaagcaaaaacaaataacgctctacaaaagagcacggcgcaaggccgtgctttttttgcatcgaaaaagccatccgggccccggatggcttttgtctgcctgtgtcttacctgtcatctatgtaccgcgcacagagacgggcggctgttaaatccgcagccggcgcttggccggcgctgcgttgccgctgggttggtctttgccaacatacgggcgtttggttcgcccagcgccaaaagcgtttctcttcccttctctcggcgcttctatttgattctctgcgttgtcttcgcagaaatggttttcaatcttttttctttggggggaactatgtttggtactctccgtttggctaacccatcgtgcgcctcctttcctttccacggcttcatcataccggtaaattatggtatgcagttggccaaaatccaaaacattttgccccaatgcgaaaaaaagggcaggaagaaatgatccccctgcccttttttatgctgatttgccctatgcaccggcctttggcccttggccgcaatgcgacatatttttgccgcattacggatgaagcatgcactctcccaatgtcaattccagcttttccaacaaaacatgctctaggtcaatgatggcctctagcgtttggcgtacggattggcccacggccaacccatcgcttgcacaggctgcgtgggcgcctcgcatcagccgctgtgcttctgcggccaataggttggcaatgcccatttcctccctggcgatggattcgagcaactgtgcccttgcggattgtaggctgcacggctgctttgcttggcagcggcatgcgggccgctgcgaccgtaccatgcccgcctgggatgcctgttgcgcggcatagcgctgggccgtttggccatcgccctgccctgtcatctggcatgtatgcggatgcggctgccggctgtatggcgggcagcatctgcgaaacatcatcttttgttcctccttacctcagtttgctatatactacgcaaaattcggcgctttggtgtctggcgtccctcgggcaaatgccctataatagaagtaactttcgtgtaaccataaggagggaatttagcattatgtctgagcgatatgcatacgcacagcagcaatatcaagccattggggtggataccgagcaggcgatagaaaagctgtcccggctgccggtttccattcattgctggcagggagacgatttaaccggctttgaaaaccgcgggggtacctccggcggtatcctggccactggcaattttcccggcagggcaaccacgccggagcagctgatgcaagatctggatacggccttttccctaatccctgggaaaaagcgtttgaatttgcatgccgtttatgccgtaacaggcggtaaaaaggtagaccgtgatcagcttttgccagagcattttgaggcctgggtggaatatgccaaagcgcgtgggctgggcttggatatgaaccccacctatttttcccatgaaaaggtcaaagacgggctgaccctttccagccctgatcccgaagtgcggcggttttggatcgaccataccaaggcctgccggaaaatcgcagagtatttcggcaaagagctgggcacgccgtcgctggtagacgtctggatcccagacgggctcaaagatgtgccggccgaccgcatgggcccccgcaaacgcttaaaggaatcgctggatgagatctacgcgcagaaagtagatccgcattgcgtcatcgactgtatggaggccaagctgtttggcatcggggtggaatcctataccgtaggctcgcatgaattttacatgaattatgccgccaaaaacgatttggtgtatcttatcgacaacgggcattttcatccgacagaatcgtgcgcagataaactgtcctccctgctgctatttagcgacaaggtggcgctacacttgacgcgcggcgtgcggtgggacagcgaccacgtcatcgcgctggacgattctttgaaggaaatgtgccgcgaaatcgtggcctgtgacgcgctggaccgcgtcatcatcggctcggattattttgatgcctccatcaaccgcgtggcggcctgggtcattggggcgcgcaacatccaaaaggcctttttgtatgcgctgctcattccgcatgcctcgctggccgctttgcaggatgaaggccgctttaccgagcttttggccatgcaggaagagatcaagaccttcccgtttaccgatgtatgggtggagtattgccgacggatgaaagtgcctgccggcccggactggatgaaaaccatccacgcctataccgaggaggttttaagcaaacgctaacacaacaaaaaacgcctgtaaaccaggcgtttttttattctctgaaatcttgcgtttccaagggcttcggcctttcctctctttcaaagggatcgtatccgccactgccgtaatactcgtttatcaaggtctgtttgcccatgagaaacgcattttcataagcatgatactcgacagtaacatccaaaaagctgttgaccaccgccagcattttctgcccgtcgcgcagcaccacgtgctccggttcatgcgaaaacgcaaggccgagcagcccgaattgcagcatgccccaagaaacggccgcgcccaaacacagcagcagcgtactaccgacccaatggagcgtttcatgcccatagcccgcttctttgttttcgccggatttggtgataaggatgctcgcgccggtaagcaccgctgcgatgagcaggggcgggatcaccaaaaagcccaccgttgtaagccaaggccgccaagcatagccccataggctcagcaaggcgctgctgagtacacccagcatccccagccccatggccccgccgccgcaaattgccagcaggatccatctgcctttcatggcgttctcctttcataggcttctcccgctatcttccgttattccatccaggaagggttttcgcccgtgccggcgtcttctatggaaagatccggcgtctccacggcatcagcttcacaaaacaacgccttatcccccataagaaatgcgtttttataggcataataatacacgctggtgtctcccagagagctatcttccaccactaccaccttttgtccgcccctctctgcaacatattccgaagtatcggagaacccatacaaaatcatgccaaagcctccgatcccaagacaaagaaaccctgttgcgatcaacaaaacgaaggtttctatcgtctttaccaccacggagctttcttcccacttatcggcaacggtgcctttgattgctctgcccatcaccgtcaaaactgccgcaacgagcagcacagtcggcaccacaatagccgccgacagcacccacggacgaagggcgcagccaaaccatcccaagcatttatcgagcagcggaatgcccaggaaaacggctcccgctgccatggccagtaccactgctgttttccctgtcttgctcatttttcatgctccttaaacgaaggggacaaaataagggaggctccaaggcgctcccctattgtatgatggctgaatgattttttatttcaatttccggctgccaggctttaccagctccaagccctgttcgcacagcgggcactgggacggctcataggattggatctccgtttcgtatgcggcctcaaacggcacgccgaaatcgattttgccgccgctgcggtctaccacgacgcagacgccgaccacctctgccttggcctcggctacgatatccataacctcgcgcacgctgccgccggtggtcacgacgtcctccaccaccagcaccttggcgccttccgggatagagaagccgcggcgcagcgtcatcgcgccgttttcacgctctgcaaaaatgttgggtactttgaattggcgcgccatttcatagctcatgatgatgccgcccaccgcaggccccaccaccatgtctatcttctgcccggcaaagcggtctgccagatctttgcagatcatctcgctgtattccggatattggaacagcttggcacactgcatataccgattgctgtggcggccgctggtcaaaagaaaatgcccttccagcatcaaacccgtttgtttgaaaatgcgttccatttctgctctatccatcttctctgcctcctaaactctcagttgccctatgatctcttgcacggaggacaggccctcctccgccaaaatctgttccatctcctcggcaatgcgcacgcaggcatatggatcgtacagattcgccatgcccacctgcacggcgctggcgccgcacagcatgaattccagcgcatccaggccgctgtctatgccgcccatgccgatgaccggcacgttgaccgcctgcgctacctggtataccatccgcagcgccaccggctttaccgccgggccggacaggccgcccgttacattggccaaaatgggccgccgggcgcggaaatccaccgccatgcccgtaagggtgttgatcagcgaaatggcgtccgcccctgccttttccgcagccagggcggttgccgtgatgtccgcggtattgggcgtcagcttgaccaccagcggctgtgtacagtgcgccttggccgcgcttaccacctcgtataccttatccggatacacgccaaaggccacgccgccttccttcacattgggacaggagatgtttaattctaccatatccaccggctggttggccaatttttctgtcatataggcatagtcttccacgctgctgcccgccacattcgccaaaatgcggcagtttagcttggccagacggggcagctccacctccaaaaacgcatcgatgcccggattttgcaggcccacgctattgagcatgccgctgggcgtttccgcaatgcggggggcggggttgcccagcctcggtttgggcgttaggcccttgatgctgatgccgcccagggcgtttaggtccacatactccgccatttcctgcccaaagccaaagcagccggaagccgcaatgacgggattttgaaacggtaccccgcagaccgataccgacagatccggcttattcatccagcatcacctcccgcagcaaaaataccgggccgtccttacagacccgtttatacgtaaagctgccgtcctggcgtctgattttgcagttgcacaccaagcaggcgccgatgccacagcccatgcgctcctccaacgaaacaaagcaggggatgggatacggctccaccgtttttttcaacgccttcatcatagcagacggcccgcacgcatagatggcatcatagtggttttctttgagcaaagtttccaccttttgtgtcacaaagcctttttcccccatgctgccgtcctctgtcaggacgttaaaatcatgcgccaaatgctggaaataccaaagccggtagctgaccttttggctgcggaagccaagcacaacatcaaactcaatatcgcggttgtgcagcagcaggttttccagcggcgctgcgcccatgccgccgcccaccaccaaggcgcggcggacgcccttggttgaaaattcgttgcccagcggccccagcacatccaaaaaatcgccggcgcctacatgcgacagcagcctggtgcccttccctttgatctgatagatgagtgtcagcgtgctctcctcgctgcgcgcaatgctgatgggacgccgaagcagcgtagcgtcgccgccgggaattttcacatggacaaactgccccggctccgccacatcggcaatgggtgtaaacagcgtcaattcatagatgccatgggcgatctgctcgtggctgaccaccctggccataggctgtttcattggtctcctccctgtaattcgtgtaagccgaccggggttacgtccttttccgtgagccccagctttagcccggccaccagcgctgcggcagtatccaggcttgtcaggcatgtaattttatactccgtggccgcgcggcgcagacggaacccgtcgcgttcgctgtggcggcctttggtcggcgtattcaaaatcaggcatacttcgccggaatggatcagatccatcatattgggcgaaggctccttgatgcgccgcaccatattcgtcggcacaaagctcttgttcaggacctgggtggtcccggctgtggcgtaaagcttataccccagggccgccaggtcctcggcgatgggcagcacatcctgcttatcgttgtccgcgatggacagcagcaccgcccccttctgcgggatggtcatccccgcgcccatcaaaccctttaacacggcgcgggtatagtctctgtctacgcccagcacctcgccggtggatttcatctccggccccaggctgacctccagctgcggcagcttttcaaacgaaaataccggcaccttgacggcatacgagccgccccacggcgccaggccggtttggtagccctggctttgcagcgactggcccaataccgcattggtggccagctggatcagcggcacgcccgtgaccttgctgatatacggcacagtgcgcgaagagcgggggtttacctcgatcaggtacagctcgttggcatagacgatgtactggatgttgatcatgccgaccacatgcagctcatgcgccaacttgatggtggtatcgatcatcttttgctgaagccgggggctcagcgatacggccgggtacaccgagatggaatcgcccgaatggatgccggcccgctcgatatgctccatgatgccgggaatcagtacatccttgccatcgcagatggcgtccacttcaaattccttgccatagagatatttatccaccagaatgggatgctcttgctcgttgatctggatgatggccatatattcgcggatgtccgcgtcgttccaggcaatctccatgccctggccgcccagcacatacgaggggcgcaccagtacggggtagcccagctggttggcggccttgagcgcttcttcggtggtaaacaccgtatggcccgccgggcgcgccatgtgcaggcgttccagcagcgcgtcaaactcctccctatcctcggcggcgtcaatatccttgagctgcgtgcccaggatgggaacgccggccgcctccacatccttggccagcttgatggcggtctgcccgccgaactgcaccaccacgcccacaggctgctccacatccaggacgttgagcatttcctcggtggtcagcggctcaaaatacaagcggtcggaggtatcaaagtcggtggataccgtttccggattgttgttgatgatgacggtatcataccccgcctttttcagcgcccagatgcagtgtaccgagcaatagtcaaattccacgccctggccgatgcggatggggccgctgcccagcaccaccacggttttctgttcgcttttgtgcgcttcgttttcttcctcgtaggtagaatagtaatacggactgacggcatcaaactccgctccgcaggtatccaccatcttataggtgggcaaaacgccccattgcttgcgcaacgtgcggatctccagttctgttttgcccacccagccggcaatggccttgtccgccatgcccaggcgtttgagctgtttcatcgtctccggcgttaaatagccaaagccctgctgcttgacggtttcttccaaagcgacaatgttatgcagtttatccaaaaaccataggtctatttttgtaatgtcgtggatggtatcgtacgatacgccgcggcgcagcgcctccgccacgcagaagatgcgttcatcgtcctgggtatgcagcgcctggacgacctgctcatccgtcaaggccggccccctgcgccattccatggaatgcatgttgagctccagcgagcgcaccgccttttgcagagcggcttcaaagctgccaccgatgctcatcacttcgccggtggccttcatcttggtgcccagcgtcctgtccgctttggtgaatttatcaaacggccagcgcgggaacttgacaacgacataatccagcgtgggctcaaagcaggcaaaggtcttgcccgttacggcgttggggatctcatccagcccatagccgatggcaattttggcggataccttggcaatggggtagccggtggccttgctggccagcgccgacgagcggctgacgcgcgggtttacctcgatgacggcgtactgcatgctgtccggattcaaagcatactgcacattgcagccgccctcgatgcccagtgcgctgatgatgttgatggaagccgtgcgcaacatttggtactcggcatcgcgcagggtttgcgacggcgctacgacgatgctatcgccggtatgcacgcccaccgggtctacgttttccatattacacacgatgatgcaggtgccgtttttatcccgcatcacctcgtattcgatctctttccagcccgcaatgctcttttcgatgaggcattggtgcacgcgggacaggtgcaggccgtcggcgcagatctccgccaactggccagcgttgtccgcgatgccgccgcccgtgccgcccagcgtgtaggcgggccgcacaataacgggatagcccaccttttccgcaaaggccagcgcctggtccacctgcgttacaatttcgctttctatgcagggctcgccgattttttccatcgtttccttgaacgcctcgcggtcctccgccttgcggatggaatccacgttggtgcccaaaaggcgcacgccctgctcttccaaaaagccgcattccgccagctccatggcaagattcagccctgtctgcccgccgagggtgggcaggatgctgtctggcttttccttgcggatgatgtttttcacaacctcggcatgcagcggctctaagtacaccttgtctgcaatgtcggtatccgtcatgatggtcgccgggttggagttgatgagcaccacctcgatgccctcctccttcaaggcccggcaggcctgtgtgcccgcgtagtcaaactccgcagcctggccgatgatgatggggccgctgccgatgaccaatacttttttgatatcctcgcgttttggcatggtacgcctccttacatcattgccacaaacctgtcaaacaggtaagcggtatcctgcggccccggcgcagcctccggatgaaactgcacggtaaagctcgggtggtcggtatagacaagcccttcgatggtctggtcgttccagttgacatggctgatgcgcatattatccttcagcgacgcagcgctgacggtgtatccgtggttttggctggtgatgcacacccgcccgctggatagatccttgaccggatggttggccccacgatggccgtatttcagcttttcggtatccgcgccgtttgccagcgccataagctgatgccccaggcagatgccaaagatcggcctttggccgatgagctttttcacttcctcgatgatgctgccgttgtccttggggtcgcccggcccgtttgtcagcatgatgccgtccgggttccaggccaatacctccgccgcctttgtaaacgcgggaaacacacggagcgcacagccccgcgcttgcaaagaggtcaaaatggattttttcaggccgaaatccagcacggctacgcgcttgccctgccccggcagcgcataggccgcttggcaggtcacctgttgtacggggtggtcgatacggatgcgccggatctgcgcaaaatcctcctctgtcggcggcgccaggcacagcctgccgcgcagggtgccatggttgcgcaggcgctttgtcagcatgcgggtatcaatgccgcacatcgccatgatgcccgcctgctttaggtaagcatccagatcttgctggcatttccagttgctgggcagctggctgtattcgcgcacgataaagccgcgcacctgcgggtgggcagattccgggtcgctgtcgtttacaccgtaattgccgatgagcggataggtcatggtgacgatctgcccgcaataggaggggtccgtcagcacctcctgataccccgtcatccctgtattgaataccacttcgccttcggtctggtgcagcgcgccaaacgcctggccttggtatacgcttttatcttccaatgccaagtatgctgttgccatgtttgttttgtctccctttacagcggcagatgcgctgccaggtcctcctgcatgcgctgggcagcctccaccgccgcctctaccgccggcttgtccgttttctgccaagccgttaaaatgccgcgcgagttgttgacgatggcaccgccgcccttttcatcaaacatccccacgatgtccttggccgaagcgccctgcgcgccatagccgggcagcaggaaaaacgtatgcggcatgcgctttcgcagcagcgcgccctgggtggggtgcgtggcccctaccaccgcgccgcagttggaatagccacggctgccgatgttggcctgcccccaggcctccaccagatcccctacggcctcaaacacggtacgcccgtccgcaaggcgcagatcctgcacatccaccgaggaggggttgctggtctttaccagcgcaaacactgccttttcgctgttggcctgcaaaaacggcagcacgccatcctcccccaaatagggattgatggttaaaatatccgtttccatcggcgcattgtccgccaaatacgcagcggcgtacgcccctgccgtggaggcgatgtcgttgcgcttgcagtccgcaatggtgataagcccggcctgctttgccatttgcaaggtcttaacaaaggcctgcatcccgggcacgcccagcgtctcgtagtaggccacctgcaccttgacggccggcacgatgccccgcagcgcttcgatgagcgcggcattgtaggccacaatggcgtctgctgcgccggcctgcgtatgcatatcgtatcgctgtgcaatctcctccggcacatgcgttttttgcgtatccagccccacgcaggtggggtttttcttttgcccaatggcctgggccaacgtatcaaatatcatggtttactcctttactatcgcgccgttttgataaacatggcggccgtccacaaacgtatccgtaacgcggccctgcacatcccaaccatcgaacggggtattgtgtcctttggaatagaaggtatttttatcgatcttgccctgccaattcaaatctaccatggtaatatcggcgggctttccttccgccagcacgccgccctctatgcccaaaatctcatgcggacgcacgctcatcttttctaccagccgcgctatcggcatgccgtgctttgccacaagttcagtatagctcaacgcaaaggaggtttccaggcccacgatgccgttggccgcgctgttatattctacctccttgtcgtcggcatggtgcggcgcatggtcggtgatgatgacatccagcgtgccgtccatcacgccctgtataacggcctgccggtccgcctcttcccgcagcggcgggtttacctttgtggccgtatccatgctctctaccagcgcatcggtggccaccaggtagtgcggcgccgtctctgccgtgacctttacgccgcgtgccttggcctcgcggatgagctggcagcctgttttggtggatacatgcgcgatgtgcaccttggtatccagcatttccgccaggataatttcacgggcgatcatgacatcctcgcatgcgctggggatgccgggcaggcccagcatggtgctggtcttgcccaggttcatcacaccgtgctcggccaaggccagatcctcgcaatgggaaatgagcagcgcgccgaactgcttggcgtattgcagggccagcttcatgatgcggctgttttccaccggccgcccgtcgtcggaaaacgcaatggccccggcctcctgcaaaaggcccatttcggtcagttccttgccctgcatgccctttgtgatacaggcgatggggtagaccttggccaggtttgcttccctcgccttttccaggatatagcgcaccagcgcctgattgtctaccaccggactggtattcggcatacaggcaacgctggtaaagccgcccgccaccgccgccatcgcgccggtacggatggtctccttatattcctggcccggttcgcggaaatgcacatgcatatcgcaaaagccaggacacaccgttttgcccgcagcctccaccaccacggcatcatccgccgccaagcgctccgccatttgtacaatgacgccgttttctatcaaaatatccaagcgcccctgtgcgcccttaggatttactacggttccgttttgaatcagcgttttcatttttcttctccttcccgtgtcagcagatacagcagcgccatacgcaccgccacgccgtttgtgacctgctctctgatgtacgactgcgggccgtccgccacctcgctggtcatttccaccccgcgattcagcgggccggggtgcagtacgatggcattgggctttgccaatttcatgcgttcacggtcgataccaaaataacggctgtattcccggtagctgggcaccagccctgcttcctggcgttcgcgctgcatccgaaggcccatcaccacgtccgcatcgcggatggcagactcaacattcgaacaaatatccacgcccagcacctgcatatccttgggaatcagcgtttccggcgccgccatttttacttcggcgcccatggtagtcagcccccaaaaattgctgcgcgccacgcggctatgctgcacatcgccgatgatggctaccttcagcccttccagacgcccaaaggcctgctgcatggtcagcatatccaacagcgcctgggtggggtgctcgttcatcccgtcgcccgcgttgatcacgctggcccttgtatgcgccgccaatagcttggctgcgccgctcatcggatggcggatgatgatcacgtccgtgcccatctgatccagcgtgcagccggtatcgatgagcgtttcccctttttgtaccgagctggcgctggcggaaatattcgccgccgacgcagacatgtacttgctggccagctcaaagctcatgcgggtgcgggtgctgttttcataaaacagcgtcaccacgcttttgcccgccagatacggcagctttttctctccgcgcatcagcttttccttcatctccgccgccgtggaaagaattttttctatcgtttccttcggcacattgcgcaggcccagaatatcctgtttcatctcgccccatcctctttcttctgtattttttcaccgtctgtctgcataaaaaaacaaccggggaaaaagctccggttgtaaaaggaaacaccaagccacacaggcgttttgaacagcgtctgcggatgaaaagcatacaggccggtttgggtatgcatcatcgtctgcatgaatgtcttcctttctgtggctcaaaaaaacgccctgccgaaagggtggcaaggcgcaacaaaacaaccccattgcactgctttggttttgcttgtctccttgccggcctcacgggaccgatttaaagggcattgttcacaatttttgatattatatcacacagatagggcgctgtctaccgtttctttgcatttttcacgaaacatacgagcggtcgacattgacgactgcataatacacatggtcctccatctggcgtacttgggtgctgatggcctgtaccagctccttttcggtcatcttaaagcgaaacggcatcacaacgtcaaagatcaagttggtatgcgtaggcccctgcaccatgcggaaatcatggatggacagcgccgggtctatatccttaaccagcgacacgacggcgtcatgcatgcggtttgtcaccgcgtcgttggtgacgatggggtccatatggatcacggcctcgcagttaaatttttcgtgcagctcatgctctgccatgtcgatgagatcatgcatttccaatatatcgctgtcgctgggcacctctgcatgcagcgagaccatacaccggcccgggccgtaatcgtgtacgatcagatcatggatgccaacgatctgctcatgggccagcacggtttgctgtatttcgtcgacaaaatcctgatccggcgccttgcccaaaagcggctttagcgtatcgttggccgtgctaaagccggtatacatgatgaacagcgccaccaatacgcccaaatacccatccagcagcacgcctgttgtcgcagtaatgaccgtacccagcagcacggccgtcgtagccgctacgtcgctgaggctgtccatcgctgtggcctgcatggctgtggagccgatcatcctgcccagcttacggttaaacaggcacatccagcccttcaccgcaatggagagcagcaaaatgccgatagaaagccagctgaaggataccgcctccggcgcaaaaatcttctctgccgagcccttgagcagctcaaaccccatcataatgatgatcagcgaaacgataagcccggcaatatattcgattctgccgtggccaaagggatgctccgggtcggccggcgcgcccgccatcttgaaccctaccagcgtgacgatggaggagccggcatcggataggttgttgaacgcatctgccgtaatggcgatggaacccgtcagcgagcctgcggtaaacttggccgcaaacaataacaggtttagaaaaatgccggtaataccgcccagctggcctacctgctggcgcccctttgggctttttagatcctgttttacaaaatgcctgaccaaaaaatccgtcatcgcttctcctccttccgctgcattgattccgaacttttttattatacgaattttatcaaccaaatgcaacgaagcgcatgaaaaaagagcctttcggctctcttttcagcttattgctctttgaaaaaggatttcccatttttgcagatggggcactgataatcctccggcatgctgtccaggctgccctcatagacatacccgcataccgtgcatacgcaggttttcttctccgttgcggccggcgtctccttgcggtaggtcggcgcatttttgggggctttgcccttgcgtaccgcatggtagtaggcatacgtcatcggcgttttcgcgtctcccttttgggcgtccacaacgcgcgccaaaatgaccgcatgcgtttccgcatccaccatctgtaacacctcacaggtcaaatacccaacggcgccctgctccacaatgggcaggccctccttggtatgccccgctgcaaagagtttgaacttttcctttgtgcgccccgaggaaaagcccagctctgcgatgacgttgttgtctacctcttcgcccaggatggaaacggcaaactgcccgctctcccgaatgacctcataggtatagttatccttattcatgctcaccgcgatgatggggttttccgccgtgatctgtacgatggtattgacgatacatcctttgtcctctgcgccatgctttgcgccaatggcatacatgccatagctcagctgccacaatacggtctcatccatcttttgcacctcccaatgcttgctttctccttagtatcattgcccgaaaatggaaaaaagtcaatgaaaaaagaagggcgtttgcccttctttattttgccaaggaatacacctgatatacatcctcgtgggaaaggtccacatacacggagccgccttcaaacgcttcgatgcgctgggcaagcatcctgccgtccttgtcgatgtcgatgcctacttcgcggaacgtcaccggcacgcccatggagcggaagaactgtttcatgcgctcgatgccctccagcgccacagccttatcatcctcgcccgtaacgccccagacctctttggcaaagcgcaccaggcgcggcaggtatgcctccaccttatacgtcagcagcgccggctccacaatggccagggtggcgccgtgcgtcaaatcgtacaggccgccgaaatcctcgcccaaggagtgggcgttcaggcaggtgatgcgatccacccctaccaggccgctcatggccagcgtgctggtcagcatcaattctgcgcgcgcatggtagttgtttggctctttcagcgcgatgggcgcaaactccaccacggtcttgagcagcgcgatgctcatattgtctgtcaaaacgcagtccggcgtgcgggtaaagaacgaatccatcacatgcgccatgatgtccacacagccgcaggccgtctgataggccggctgcgtcatggtcagttctggattaagcacagcaaacgccggccgcaaacacccgccgccaatgcccagtttggacatattctcgtcgttggtaatgacggcccattcgctggattccgagcccgtggccgccatcgtagccactacgcccaccggcagcgccgtggccaattctgccttgccaatggcaaaatcccatacatcgccctcgtacggtacgccggcggcaatggccttggcggtatccatgacgctgccgccgcctacgcccaggataaagtccgcgcccatttcgcgcgccatctggatgccctcatgcaccttgctcagcctggggttgggcaccacgccacccaagcattttgtttcaaagccttgggcctgaagcgcctgctccgaacggcccaaaagcccatcttttttcacacggtcgctgccatatacgatcagcgccttttttgccttggaaaactccgccgcctgagcgcccagctgcgcctcggcctctttgccaaacagcagacgggtgtaattgtcatagagaaagtcctgcatgtaaatctcctccaagtaaagaatttttatgcaacagacctccggagccaaagcggtccccttatccatctgatgacatacaagataatatagtatcgtttagtattatcagtatagcaaaatagcaaatgtttttatagaatgcaagcggttttcttattatatttttgaattatacctcaaaaaaagtatcgtcttgtattatttatagtccccgttcctctgcgctaaaaaaggaaagctggcaggcgcgctcagggcgctgcgtcaatgctatgatgtcctccatacggtaggccaggcgccgtgcccggcaggcctgtataaacgcctttgtcaacgcttgggcacgcgggcttttatgcagatacggctggccctggcgctgatactgtgcctttacgcccggaaacagacgatccagctgctgataaaaataggcccgttggttttcccgcagcgtcacgccaaaccccggatacacaaactgcgcccctgcgtccgcagcgctgtgcaccaaacgcagcacgttttcctccgtatcgttgatatatggcagcaacggcatgagcagcaccccgcagcatacgccttggcccgccaacgtttccatggcggccaggcgcgcgctggtcggcgccacatgcggctctatcctgcggcacagggcatcgtccgctgtggtcagggtaaatttaacaaatgccggcgccgtgcgtccgatttctaaaagcacatcggcgtcgcgggctaccaacgggcttttggtcgcaatggccacgccgaacccataccgctggatcagcgccagcgcctgccgcgttagcttcagcgtttgctccaacggattgtacggatcgctcatagcgcctgtgcccacaacgccctttttgcgcttcttgcgcagctcctccgccaccagcggtatggcgttttccttgatgcgcacggtatcaaacgcctcgatgccatagcagctgctgcggctgtcgcaatagatacagccatggcagcagccacggtataggttcatattgtaatccgtgccaaaccatgcgcggttctttgtgcgtgtcacgatggttttggccggcaccgtgggcacacggcccgccgtgttactttcgtcctgtggacccaaagccgccctccccgcgcaccgtatcgctcagcgcgtctgtctcagcaaaggcagcccgcagcacaggcgcgatcaccagctgggcaatgcgctcgccaggctccaccacggcggcctgcgcgctgtggttatgcagcgccaccataacctccccgcgataatcgctgtcgatcacgcctaccttgttggccggcgccagcccctttttgctggctaggccgctgcgcgcgtacaccaggcctaccgtgccctccggcagctccatggccaggcccgtcggtatcatcgccgtaccgcccgccgcaatttctaccgccgtttccaggcaggcgtaaagatctgcccccgccgcctctgccgagccatagctgggcatggccgcatgctccttcagctttttgatatatacaggcattgtctgcattgcatttcctcccatgctttttcttctatgctacacgacaacgcgcaaaactgcaaagtgtttttgtttacgttgacaagccctgaaatttatggtattttttgagaacatgaaaaacccgtgagggagtagttgtgcgcacgctgtgcgtggcaagtcaacatactggcatccgcctggcttgccttaatgaacgagactcatgcagggctttgtttggcccgtatgcgtctttttttgtatcccttatttgtgtgggctgggtttttcaatctttgtaggggttgaatggaatatgatgacttgggaactattgctcattgccgtagggctgagcatggacgcctttgctgtttcgatctgcaaagggctttccagcggccaagccagtatccggcattgtacggcagccgggctgtattttggcgggtttcagatgctgatgccgtttttgggctatgtgctgggccgccagtttcaatcgatgatcaccagctttgatcattggatcgcctttgtgctgctatgctttatcggcgccaatatgatccgggaatcccgccgggaagccgagccggaaaacgcggatttcggcccgcgcgccatgctgccgctggccgttgccaccagcatcgatgcgctggccgtcggcatcacgtttgcgtttttacaggtcaacatgtatatcgctctgccgctgatcggcggcgtcacctttctgctttcgtttgccggggtcaagctggggcatgcctttggcgccaaatataaatccaaggcagaatgcctgggcggcctggtcttgattttgattgggctgaaaattctgctagagcacctgggttttctcggctaaatacaaaaaaacaggccgtaggcctgttttttctttcgctttacagcgcgctgtttaccatatccaacagatccgccttgctcttgacgccgaccgacgccgccacctgctgcccgcctttgaaaagcatcagcgtgggaatggtcatgatacggaactgctcggccagcgcctgttcatcgtctacgtttaccttgccgacctttaccttgccgcccaattcctctgccaactgatccacaatggggctcagcatccggcacgggccgcaccaactggcccagaaatccaccagcaccggctcggtagcctgcattacttcctgctgaaaattgtcctttgtcaatgtaacgattgccattgtatgtttcctcctatgtcttttgttttttgcgtcttttgctttgttttctgttcgtcttgccctgcgggggcgttttatgcccttggttcctgttgtgccctgccggaaaagatcttatgcgccacatctgccagcgtaatgtgggaaaggcgctgtctacatagcgtatccagctcttgatacagggcatccatcaccccggccatgccggaggccaccaaacagggcaggtcctttccgccgctgtgccaagaggaacagacaaaccgctcccccagcgcctctgcaatttcgcacagcgtcaccgtttcaggcgcccgcgcgctttgatagccgcccacagcgccctctttggtgtccacaaggccggcttttttcaatttcgccattaccttgcgcacccgggccgggttggtacagatgttttgcgccagcacttcgctggaggccgtctctccccggtgatgcaggtacaccaagccgtggatggcaacggtaaactcgcttgtcatctcatccctccccaaactgtaatttttattgtttcagttctacatctgttattttaattgttacagtttggtttgtcaagcacttttttccatttttttgaaaaagacggccgcatatcgcagccgtcctttacgcccagcccagcagccgggcagccgtagtcaccaaaaagcagagcgccatgcccacggccgtaggaatggccatggccgccgccgtccatttccagctgcccgtttcctttcggatggtcaggcaggtggtagagcaaggccaatgcatcagcgaaaacagcacggtgcacagggccgtgagccacgtccacccgttttgcaccaagatgctcttgagcgccataagagagggcaggtccgtcaggttgcccgttgccatatacgccatgagaatgatgggaaatacgatttcattggcgggaaagcccaggataaacgccatcagaatcacaccatccaagccgatgagatgggcaaaggggtccaaaaactgcgtgcaatgtgccaaaattgtcgatcccccgatgtttacattggccaaaacccagatcagcagcccggcaggcgccgccactgccaccgccctgcccagcacaaacagcgttcggtcgcagatggaacgcacgatgaccttgccgatctgcggccgccggtaaggaggcagctccagcgtgaaggaagagggcacgccctttagaatcgttctgcttagcaagctggaaacgcagaacgtcatgacaatgcccaatacgatcaccgccgtgaggatcagggtggaattcagcgaggataggaacccgctctgcgccgtgcccgccacaaaaaacatcgagatgatggcaagaagcgttgggaaagcgacgttttgccaaagggggatttcctattgaaagtatagatgcaccgtgccgttgcgccatacgattttttccaagatctctcggtatatcgcttgcttttgcgccagcggcagcgtatgtagcggcgctggcgggggcatggtccgtatcatttcttgccgtttacgggccgctagctgctgcaaaatcggctccgcgtccggcaattccgaaagcagctggatggcccgttcgatctgcggcaggccggccgcctttgccgtatcattgtcccgctgcgcctgctgcagatagggagagatggcccgccaaacggcctgctcaatgctattgtccgctgtttcccccgccagattggggccttggcacgcctgtgttccctgccgccgctttcgccggcagacatagtcaaacccccggccatgggcgcgctttttcgcctccataggcgcgccgcatacgccgcagcgcagcaggccagaaaacaaggcatatcggttttgtggcaggcggttccttggctgttttgccagcttttgctgtacacgccgccataccccgccctctatcatcccttcatgcgcgcccagcgccaccacccattgcgcctgcggccgccaagcgccgggctttttcctgtgctgccgtttgttatacaccataaggccctgcgccccggtggcccgttccggcgaaaagcacagcacagcgccctgctcggcaaaatatcggtatgcttgctcgtccgctttacaatacaccggattgcgcagcatggattttacccctgccaacgtgtactctacgcccctttgcgccaatgccttttgcgcggcctgggcgcggcccgtttttgcaaaggcggcaaacgcttccttgacggcctgcgcctggtttggaactgtccgcagcctgtgtatggttttgacgccggacggcatttgaagagaggccgccacgctgcaaaagcccagcggcggctttccacccagccattggccggtacgcgccagtagctgcatattgtcgctgacccgctcggcaatggtctctcgttccagctgggcaaagacggacgcgatatagagcatggctttgcccatcggcgtggcggtatcgaattgctcccggatacagacaaagctgacctggcggcggttgagcgtttcaatgagggcggcaaaat

SEQ ID NO: 3222 - DNA, 1760 bp, Unknown
  16S sequences of unknown bacteria
gggcagattcgttggcaaaccgaaggtttgtcaacgatttgaaatggcaaaccggctgattggcggtttgccatttggcgttcaatcaaaaatcgcggaagcgtccggcgcgttacagtaggggcatttggtgtagctggcttttacggcctccagcagcgttacgcgcggcgtgtgttcatacacatatttgcaatcctgcgagtggtaattcttgccgcccgtgttgcaatacacataaatgggcgctggcgtgggttcggtgctttcttccatgcgcaccacgatgctgctgggctgcgcggagatggatttggccatgtcgctgggcaacggcggcccatagacttccacctctgtgcccgtgccgacgatctgcacgccgccaggctcccactgtggcgcctggaaataggtggacacagcaacggatgccacaacgaccaggcaaaccgccgcgacttttccccaaaaagcattgcgccgcctgcgcccacggttcccaccacgcttctgcaaagcacccacacatccgatcctacaatatagcagggtacagccacaccctacataccctatattgtacctcaaatggcgagaattgtaaacccattaacagacatttttcgacaaagtttgccaagtgcgccgcgatttgtccacaatcgcgcggctggcattttttcctttggcaggctgtttcttttgcgccatactgggtacaaaagttatgaaccgcgatttttcccaaaagtcatacggttttgtggaatgggcggctgaaaactgctataataggcctatatccatggtgcaaagaaaaaacaggagggatcgttgttgacaccggatataaaaacgggcttgacttgcgcacaagtggaggaacagagggccaaattcggcgagaaccggctgaaggaaaagaagaaaaagaccaatttgcagcgcttcctagagcaatttcgcgatgtgatgatcttgatcctgatcggcgcggcaatcatttcctttatcgtggcctgcgtagagggcgagccgaaggaattttttgaaccggcgctgattctcgtgatcgtaattgtgaacgcgatcatgggcatgctgcaggagagcaaggcggaaaaggcgctggacgcgctgaagaacctgtccgcaccgcacgcgcgcgtaattcgcgagggccaggagcaagtgatcgacgcggcggaactggtgccgggcgacgtgatcaagctggaagcgggcgatttcgtgcccgcggatgcgaagctcgtgcgctccgtgagcctcaagtgcgaggagagcgcgctcaccggcgaatccgtgcccgcggaaaaggacgcggacgcgcttgtggcggaggacgcgccgctgggcgaccggcacaatatggtgttttccggctgcggcgtgacttacggcacggccacggcggtggtcactgctacgggcatgaacaccgaaatgggcaaaatcgccaatatgctggaatccagcgaggaaacgcaaaccccgctgcagcagaaactggcgacgctgggcaaatatctgggcatcgtggccatcgtggcctgcctggtgatcttcgtcgtgggcctgttggacggcatggccgtgatggaaatcttcatggtggcggtttcgctggcggtttccgccattcccgagggcctgcccgcgatcgtcaccattgtgctatccatcggcgtgcagcgcatggtgaaaaagaacgccatcatccgccgcctgcccgcggt

SEQ ID NO: 3223 - DNA, 6503 bp, Unknown
  16S sequences of unknown bacteria
gagatctacactagatcgctcgtcggcagcgtcagatgtgtataagagacagaacgtatggtttggcatcacggccagcgtggataccgcaatctctatttggatgcggggcacatcgggcaaaatttttacttggcggcagagggcctggggctggcggcctgcacgatgtgcgtttttgatgatgtatcgatgaaacggcttttaaggcttgaaggagatcaattccttgtatacaccgcagcggcgggacaaaggcagccggagcctgccgcgccataagctatttttctatggaaggggccaaaaacagagccatggccatcagacccaagttgtcacggtaaatctgtggaaattgtgcgacgggcagtgggctggtgccgcggccgacctcaatggtataggaaggctttaggaaggtctgaataaaccaatccttgtacccggcaaaagaggaattgtagggggtatcctccagcgcatagccgctggcatcggcaagctgctggccgatctgctctccctgcggcacatgataatctaaaaattgccagaagatgacctctccctgggcatgataggatagcgttaacgagaaatgatggcgcagactcaatgcatgcagggcgcgagattccggctcggatagaggggaagcgcccacaaaatcgcggggagccggcctgttaaagcccaaggcatatttgatctctctggctgtggcccattcggcaggatagttcagattgagatctacgcctcgaatgttggctttccatccttccgggaagggaatgttgcgataagtgtttgcaatggcggaggccgaggcaaaggcaggattagcttcatctaggtagccagtcacaagatctaccccatctggattgaccagcggtgcgatggtcagcgcaacagtctggtaaagggcgtcgcttggtagatcgtatagggtgctaccgctggcaacagcattggcatactgctctaaaaaggtaagcacaacaggcgtcgtgatccattcattggcgtgatggctagcgttgaagaacacagaagtatcgccggcgccaaaggtaagggtatgcagcggctgccctaggatgctttgcccgatgttttgtgtgtggatctgcggatagcgcgccgttagcccatcgatgatgagagagaccagctgagaggaatagggaacctgagaagggaccacgggaaagccgaacggaacggtgatgcgctggcctgggatcagcagcgccggctcaaggccggggttggcagccaaaatggcaaataccgtggtattgtacaggcgggaaagttgatagagcgtatcgccgccatgcacgatatggtgaatatagccgcgtaaaaaaggcagaagcgcctgccaggtcaaggggccggcaacgccgtcgacgatcaaacgccggctaacctgaaacgcggtcagggcacggcgcgttgcgggaccaaaaaggccgtcgatctctccggggccaaaccctgccctggaaagagccaattgcaaataggaaacagtagggccatggtcgcccatacgcacaaccttcataggaataggagcctcctttatcgaaccatgacggaaatccttgtgctgtatcatatgggggtttaggggaaaaaagaacaaagagcaggaaccttgacgggaaggagagatatattatggcagaaacgatggaaagcccgggcggcgtgtatgcactgtgttgccgaaagagcggaacgaggcttttatgcgccacagtagatatgcagaaggaacgccaatggtttttggtgtgccaagaggaagggcattgccccaaatgcgaactggaaaaggagtggacggcatacgggccgtcggcgtttgcctttgaaatcgtagagcgggtaccgaaaaaacaggggcaggaaccagaggcctatcggcagggaattgaaacgcttaaagagtttttggcgatgcagccgtttggatgtggttaaaaaataaaaagacggcagcaccgtctttttttgtttgaattttattatgaaaattccactcgaagggtcatttcgatggaagaagagaaatcatattccactttttgtagaatccctacctcgtttacataaaaccgtttggtcagtgcgtcaatgacaataggagtctgttcatcatcgctggccaagagtagggcatcctgcggcacggtaacggtatagacagtcaagccgtcctgttggcccgtagagatgctgctgatatctttttgctccagcggggccaaattcacaccggcaatctccgatagggtctgatagcggatcttactgtcgtatacttcaaatttaccggggctgtccgcaatttcacgatacagcacctcatcttgatatttgtagagattgctgctgccctcggtttcgtattcctcccgggtaaaggcggcggacttaccctccaatgtgtattcgatggtttctgcggggtagacctctccttgctctacatagctgagctgaagagtgccgccggatgctttgttggcggtttccagtgcctgattcagagcttgtagactggggtctggcgcctgtccacagccgataaggcaggccgtggccaataaaaggctcagcagaaaagtacaaacgcgttttttcatagagagctcctttccgaacagaaaaatcggtagagtattataaattatacgatacattttcagttttgggaaatgtttgcctttgcaaggaatttccgctatcataaataaaatggatgaattggcagttatgggaggatggcatgagcaagcatacccaggacaatattcgtaatttttgtattattgcacatatagatcacggaaaatctacgctggcggatcgcatgatagagatgaccggcaccgtacagcagcgcgatatgcaagagcagctgctggatacgatggaactggaaaaggaacgcggcattaccatcaaaagccagtcggtacgaatgaattatactgcaaaagatgggaagcagtatgtttttaatctcatcgatacgccagggcatgtggactttacctatgaggtttctcgtgcgttggcggcctgcgaaggcgcgctgctggtggtggatgcgacccagggcatagaggcgcagaccttagccaacgtatacctagccttggacaacgacttggagatcgtgcctgttatcaataaggtggatctgccgagtgcgcagccggaggtggtgaagcacgagatagaacaggatattggattggatacctcgatgagcccggaaatttccgccaagacagggctgaatgtggaccaggtgctggaggtgattacagagctgatcccgccgccggagggagatgttgacgcaccgctcaaagcattgatctttgacagctattacgacaactataaaggcgcgatcagctttgtgcgcatcattgacggcgaatgcaggccgggcatgcgcatccgtatgatgggcagcaaaaaagagttcgatgtgacggaggtgggcgtattcgcaccgcagatgcgcagccgcgaggtattgcgcgccggcgaggtaggatacattggcgcttccatcaaaaatgtggcggatacgcgcgtgggcgataccattaccgacgcagagcgccccacggacgagcccttgccgggctataaacgcgcgacccccatggtattttgcgggatctatccggcggatggggcggactatccggatctcaaggatgcgttggaaaagctgcaactcaacgacgcctccatctcttttgaggcggaaacgagcgcagcgctaggctttggcttccgctgcggctttttggggctattgcacatggagattgtgcaagagcgcctggagcgggaatttgacctttccattgtgacaacagcccccagcgttatttatcatgtgacaaagacagatggtacggagctgatcatagacaaccccagtaacctgccgcctgctgccgagatcgattttatggaggagccgatggtcaaagccaccatcatggtgcccaacgatttcaccggcccggtgatggaattgtgccaggaaaaacgcggcgttttcatagatatgcagtatatggatgcgggcagggtacagatctattaccgcctgccactcaatgagatcatctacgatttctttgatgcgctgaaaagccgcagccgcggctacgcgtcgtttgactatgaaatagagggctatgaaaaggctgatctagtcaaattggatattttgttaaacggggaagtatgtgatgcgctttccatcatcgtgcatagagacagggcgtatgcacgcggacgttcgattgcagaaaagttaaaggacgtgattccgcgtcagatgtttgaaatccccatccaggctgccattggagggaagatcatcgccagagaaaccgtgaaggcaatgcgtaaggatgttttggccaaatgctatggcggggatatttcgcgcaagaaaaagctattggaaaagcaaaaggaaggcaaaaagcgtatgcgtcagataggcagcgtagaggtgccgagtgaagcgttcctggcagtgctgaaaatggactgagccatgcagcaaacggcggcaatttatatccatgtccccttttgcaagagcaaatgccggtattgctcctttatttcggcgtcctcctatgaaccggaaacgatggacgtatatttgcagcgcgtcaaagaggaactgacgcagcaggcagagccgttttctgcctaccgaatcgaaagcgtcttttttgggggaggaacgccttcgttgctgccaaggcaggcggttccagcgctgctatcggtgatacgggagagatacacgctgctggcggactgtgaagtgacttgtgaagcgaacccggattcttttgatttggatttggcccgatcttgggcagacgctggggtgaatcgcgtatcgttgggatgccaagcggtgcaggcgacgctgttgacgcttcttggacgcccgcatacagcagagcaggcgcgctcggcgattcgcattgccaggcaggcgggcattgagcgcgtgaatctggatcttatttatggcattcccacgcagacaatggagcaatgggaggaaagtctgcgctttttgctggaagaaggagtgcagcatgtatcgtcctatgctctctctttggagaaggggacgccgttgtatgccgatgtgcaggctggaaagctggctatgccggatgaggactttatggcggattgttatgaacgcatagagccgatggttcgcccttacggcctaacgccctatgagatcagtaactttgccgtgcctgggcaggcgtgcagacataatttggtatactggcgaaacggggtatacctaggctgcggaccggcggcacacggagccaacgatctgcatggctggcaacgcacgcggaatacagacagcatggaggtatacttaaaaagtggcccgatgacacagacggagcagattcccctggaggaggaaatgtttgaaaccgtaatgctgggcacacggctgaggcagggagtggatcttgctgcgtttgaaagacggttcggcataagcctgtcgcaggcgtatcccaaagcggtaccagcctgcttggcaagagggtgggcggtaatagggcgtggctattttgccctaacgccacaggtatggtacttgcaaaacgccgtattgcagctttttatggaacggcaatgaaggataggcacctgattgcgggcggctagatgattccaggagaacgaggatggataagcaagagatctataaattgctggagaataggcacctctggcacaaggtttttacccataaggccgtatacaacatggcggagatggttgccgtatcgctgccttatccagaagccgatgcaaaaaatttatttgtcagggatgataagaagcaacagtattatctgatgactgtacagggaaacaagcgggttaatttgaaagagtttaggaagaaaaacaatacgcggcctctgtcctttgcctctgaagaagaactgatggcgatcctagggctttttccaggggcggtgacgcctttgggccttttgaatgatacggagcacaaggtacagtgtttcatcgacagggcatttttggatgcacccgggatcattggggtgcatccaaacgacaatacagccaccgtattcctgaaaacaagggatcttatagagatgattcaaatgaatggcaatgtggtacaaatattagatttttaagaagcagaaacaaaccaacggatataaaaaagagccgcacagactgtatgcaggctcctttttataagcggggtaatcagtcgatccaaccaaaatgcttacaggcatattcgataccgtcttcgtccgagcgtttggttacaaacgttgccttgcgctttaacgcctcaatgccatttcccatggcaatactcgtccattcag

SEQ ID NO: 3224 - DNA, 6533 bp, Unknown
  16S sequences of unknown bacteria
atagatgtcgccgaatcctgcctggatgcgcagggttgcctccatgacggcctttaaaccgctgccgcacagcatgttgatgctctgtgcgcagacttcgaccggaatgccggccgcgatgctgacctgacggccgatgttctggccgaggcctgcggcgatgacgttgcccacgagcacttcgtcgatgtctttcgggtcgatgccggactgcttgatggtctctttgaggaccgtggcgcccagatcgaccagcttgatgttggtgagaccgcccatgaagctgccgatggcgcttcgcttggcggctacgatgtacgcttttctcattgggatgacctctctttcttggcggactttcgtccttcgcgttcagtttactatacaggccgaaggcaagtcaatgaacagggggcgaaatcgaagcggttacatcatttcccttataataggaaagcgcggaaaatcgtatgaaaaatcgtcaaaaaggccggagaacaggcagaatcggccgcttgtgaaagaattggcaaaacgtacttttttctttgttaaaaatttaacaaagttgttgacgctcgcatggttaagggatagaattaacagtggattatgtgaaagatggactgcacacaatccagttcatttattcaaggaggagaacaatatggacttcatgttaacagaacagcaacagatgatgaagaaacttttcgctgaattcgctgaaaaggaagtaaagcctcttgcagccgaagtcgacgaagacgagcgtttcccaagagagacggtcgaaaaaatgaaagcatgcaaaatgatgggaatcccatattcacgcgaatacggaggagcaggcgctgattacctgtgctacattcttgccgttgaggaactgagcaagaagtgcggcacgaccggtgttgtgctctccgcccacacttcactgggcacctggccgatcgcgcagttcggtacgcctgagcagaaggcaaagtatatgccggatctgtgcaccggaaagaagctggccgctttcggcctgaccgagccgaatgccggaactgacgctgcaggacagcagacgaccgcggtcaaggacggtgaggattacatcctgaacggaacgaagatcttcatcaccaacgctggcgaggcagatgtatacatcatctttgccatgacggataagacgaagggaacgcacggcatctccgcattcatcgtggagaagggcatgccgggcttcactgtcggtcagcacgagaagaagctgggcatccgcggaagcgcgaccagcgagctgatcttcaacaatgtacgtctgtccaagaaccacctgctgggtcaggaaggaaagggcttcaagattgccatgatgacgctggacggcggccgtatcggtatcgctgcgcaggcactgggcatcgcgcagggcgccatcgatgaagtcgttccgtacgtgaagtcccgtaagcagttcggacgtccgatctccaagttccagaatacgcagttccagctggctgacatgcagaccaaggtcgatgcggcaagatggctggtctacgacgctgcgatgaagaaggaaaagggaatgccttactctgtcgaagcagccaaggcgaagctgttcgcttctgaggttgccatggaagtgacgacgaaggccatccagctgatgggcggatacggatatactcgtgattatccggtagaaagaatgttccgcgacgccaagatcacagagatctacgaaggtacttctgaagtacagcgcatggtcatcagcggcgcgatgctgaagtaatcggacacatcagatagataaaataaagaaaggatacgaagatcatgaaaattatcgttcttgtaaaacaggtaccggattccacagagatccgtgtagacaaagtcactggtacgctgatccgtgccggcgttcccagcatcatcaacccggatgatctggctggtgtagaggctgcgctgcagctgaaggagaagatgggtgcgacggtcaccatcgtttccatgggtcccccgcaggcagcggaaatgctcaaggagctgtatgcgcgcggcgtggatgagtgcgtgctgatcacggaccgcaagttcggcggtgccgacacttgcgcaaccagcacgacgctggccggtgcgctggagaagatcggctatgacctgatcatcgccggacgtcaggcgatcgacggtgacaccgcacaggtcggaccgcagaccgctgaacgtctggacatcccgcaggtcacttatgtcgatgagatcatcgatctcaacgagaagacggtcaccgtcaagaagtcactggaagacagcgaagagatcattgaggcaaagctgccttgcgtgctgacgacgctgagcggaatgaacgagccgcgctatatgaactgcaacgatatcgtggattccttctccaaggagatccgcatcatgactttcgacgatctgggcatcgacgagagcaaggtcggtttagccggttctcctaccaaggttcacgccacattcaccaaggatgtgtccgcagagaccgaaacatttgatatgccggccgctgacgccgcaaaactgatcgccaagacgctgaaagagaagcagatcatcacaaaataggaggaacttgaacatggctaaatttgaaggatacaaagacatttatgtatttgtggaacagaagaacggcgagatcgccaatgtcggatatgagctgatcagcgaggcgagaaagctggtcgcttccattccgagcctgagcttccaggtggtcggcgtcctgctgggccacaacatcaaggataaggcgcaggatgtcatcgcgcatggcgcagacaaggtcatcgtcgtcgatgatgcgctgctggaaggctattccacgcagttctatgcggatgcgctgacgcaggtcatcacggaattcaagccggattccttcctgaccggcgcaacggtattgggccgtgacctggcaccgcgtgtagctgcccgcctgaacgcaggtctgactgccgatgcgaccaagatcgagatcgaccagaccaaggtagctgatggcgaggcgctgctgctggttacccgtccgactttcggcggaaacctgttcggcaccatcatctgcccgaacactcgtccgcagatggcgaccatccgtccgaacgtgttctccatggatgcaccggatgcatccagaacgggtgaagtcgttgaattcgcaccgaagtggaccgatacggatcctaaggtcatcgtcaaggaagtcatcgccaaggtacaggaaggcgttgacatcacgaaggcggatatcctggtcggtgccggacgcggcgcagaagactgcctggatatggtcaaggccgtagctgaggagctgggcggcgaaatgtgcgcatcccgtgccgttgtcgatgacggttttgcggacaaggccatccaggtcggacagaccggaaagaccgttcgtccttccctgtatatcgcatgcggtatctcaggcgcctgccagcacgttgccggcatggagaagtctgacatgatcatcgccatcaaccgtgatccgcaggcggagatcttctccatcgcgaacatgggcttcgtcggcgacgtcaaggagatcctgccgctgctgaaggaagagatcatcgctgccaagaaggcataatatcggaaatacaggtcatcatataaagagaggagacatcatcatgaaaaaagttggagttatcggcgccggaaccatgggtcagggaatcgcaaatgcatttgcgaccaatggctacgacgtcactgtatgtgacattaagatcgaatgggcacagggcgggatcgataagatcgccaagaagctggacaagctggtcagccgtgaaaagatgacggcagacaaggctgctgagatcaagggcaacctgaaggccggcgtgtatgaagatctcgctgactgcgacctggtcgttgaggcagtcctggagatcatggagacgaagaaggaactgttcggcaagctggatgagatctgcaaggatacctgcatcttcgcgaccaatacttcttctctgtccgtaacagagatcgctaagggcatcaagcatccggtcatcggcatgcacttcttcaacccggctgaccgcatgaagctggtcgaggtcatctccggcatcaacacaccggctgagacgaaggatgcgatcatcgagatcagcaagtctctgggcaagacgccggtcgaagtcgctgaaggtccgggattcgtcgttaaccgtatcctcgttccgatgatcaacgaagcggcgttcatcctgcaggaaggcatcgcttccgtagaggatatcgatacggccatgaagctgggtgcaaaccatccgatgggcccgctggcgctgggcgatctgatcggtctggacatcgtggttgcgatcatggacgtgctctttgcggagacgcatgatccgaagtaccgctgctgcacgctgctgagaaagatggttcgcggcggcaagctgggacagaagagcggtgtcggcttctacgattactcaaaataagcatagaacagcaaacaggtgagtccatgcgacaaggaatcggtggattcaccttttcaggaaaggaagaagacaaatggaaaacgtattaatcgctaaggaaggccatgttgccaccattaccatcaaccgccccaaggcgctcaacgccctgagcacggccgtactgactgacctgaatgccgcactggatgaagtggctgcagatcaggatgtctatgcgctgatcatcaccggcgcaggagagaagtctttcgtcgctggcgcagacatcgccgagatgaaggataagagcgtggaagaagccgctgaatatggaaagttcggaaatgcggtattccgcaagatcgaaacgttcagatgcccggtcatcgctgctgtcaacggctttgcgctgggcggaggatgcgagctggccatgagctgcgacatccgcgtcgcttctgaaaacgccgtattcggtcagccggaagtcggtctgggcatcacgccgggattcggcggtacacagcgtctggcccgcctggtcggcgccggaatcgctaaggaaatgatctacaccgcacgtaacatcaaggctgatcgcgctgcgcagatcggtctggtcaacaaggtcgttgcggcagaagagctgagcgcgaccgtcatgaagatggcccagggcatcgccaagaatgcgccgatcgcggtggcttatgcgaagaaagccatcaacaacggcctgcagacagatatcgattccggtatcgccatcgaagtcgaagagttctccaattgctttgcgaccgaggaccagacttatggcatgacctgcttcctggaaaaggtaaaggaaaaggaattttcaaacaaataaacgaaaagggatgataaaatgagtaaagttatcagtctggaacaggctgtatccatgattcctgacggggcgaccgtaggggtcggcggattcatcggctccggccatccgcaggaattttcagtgggcatcgcggacagcttcctcaagagcggtcatccgcgcgatctgacgatcatgttctctgccggcatcggtgatggaaccgatgatctcggtctgaacatcatcggatacgagggcctgctcaagcgcatcatcggcggtcactggggactgatccctaagctgcagcggctcgtcttcgaaaacaaggtcgaaggctacaacctgccgctgggcacgatctcgctgatgttccgtgagatcgccggacatcgtccgggcgtgatcaccaagatcggactgaagacgttcgtcgatccgcgtctggaaggagcgaagatgaacgagcgcacgaaggaggatctggtcgagctgatcgagatggacggagaagaatggctgcgctataagtcattcccggtcaatgtggcgttgatccgtgcgacctactgtgatgaggacggcaatgcgacgatggacaaggaagcggctacgctggattcgctgtcgatcgcgcaggcggccaagaattccggcggcatcgtgcttctgcaggtagagaaggtcgtgcagaacggcacgttggatccgcgcaaggtgaagatcccgggcatctatgtcgacggcatcgtcgtttcccgtccggagaatcactggcagacgtacgaggcgcagtacaacccggcgctgtgcggcgaggtcaaggtgccggtggattcgatcccgccgatgccgctgaatcagcgcaaggtcatctgccgccgtgcggcgatggagctggatccgcaggcgatcatcaatctgggcatcggcatgccggagggcattgccaatgtggccaacgaagaagggctgccgggcctgaagctgaccgtagaggccggcgggatcggcggcgtgccgatggccggcacggctttcggtacctgcacgaatccggatgcgatcatcgaccagccgtatcagtttgacttctatgacggcggcggactggatcaggctttcct

SEQ ID NO: 3225 - DNA, 32759 bp, Unknown
  16S sequences of unknown bacteria
aaaatttaaaggatttgcgtgaactcgctccgaaattctaggcatattgaatttgcattttaacatcacctctaatttctaaacgtatgacgtaccggctggaaagaaccgaaaaaagaatatcgagcagcgtaacggctactcgatatgtattgcttttactcttcaccaacaccatttgactaagagccaaaaataggagataaaaggcgtggattccgcgcaccggcggaatccacgcccttttaatttgatgaccactcgaggccgtccggctttttcgaggcgcggtttgctccccgctaaccgctaacccttgaggctccgttccggggagcaaaatcttcacacaatttccgcgccgccactcggggccggccggctttttcgaggcgcggtttgctccccgctaaccgctaacccttgcggctccgttccggggagcaaaatcttcacacaattcccgcgcccccgcaaggggcccgcccattaaaaaatcccgaggcgcccttcgcctcgggaatttttatctactttgttttccttatcttcttctacttatccatttccacccgctgggattccggagtctggaaatagtcctttaccaggtggattaccgtgccggaaagcaggaataccgcaatcaagttcgggataatcatcaagccgttgaaggtatccgccagagaccagagcaggcccaggtccatggtggcaccgatgattgccaccagcgcgtagacaataatgaagggttttacgaccttcggtccgaagaggtattcgatgcagcgggagccgtacagtccccaacccaggatggtggagaaggcaaagcagcaaagcgctaccgccagcaggatggaaatccatccgccgaaggtggtggtgaaaccgctgatggtgagctctgcaccggcagcttttccgtaatcgatgttgattccgctgcagagaatggccagggcggtcaacgtgcagattacgatggtgtcggcgaaaacctcaaagattccccacatgccctgctgaatcgggtgggctacatcggagctggcgtgggcgatggatccggtacccagaccggcctcgttggaaaagattccccgggacacacctcttctcatactgataaagagggaacctaccacaccgccggtaacggaacgaggattgaacgctccttcaaagatggatttgaacacttccggcacccgttcgtaattaacggctaccaggatcagtcccattgcaatatagaacacggccataaaaggaaccagtttcgacgtaacgtttccgattctcttaatgccgcccagaagaatcagcagaaccagagctgcaatcagaatgccgattcccaggttcacatttcccacattatcttcattgaacacattgaagttgaacagtgcggaatcgatggatgccacgatggtattgacctgcgtcgcatttcccgtcccgaataccgtcagtatgcccaggatggaatagagcaccgccaggaactgccattttttgcccaggccgttcttgatgtagtacatcggtccgccgacccaatctcccttatcgtttctctctcggaagtgcaccgccagggttacctctgcaaatttcgtgcacattcccagaagtgcggaacaccacatccagaaaacggcacccggaccgcccagggcaatcgcaccggctacgccggcgatgttaccggttcccacggtgcccgccagcgcggtacatacggactggaacggcgtcagcgcaccttcttccgcctctttcttatcgaatatcgtgccaaaagtatgcttcagaacgtatccgaacttccggaattgcaatcccttggttcgaatcgtcaggagaagtcccacaccgatgatgcacaccatcgatggaacaccccagatgaaagcattcaccgaattattcacctcttcaataatatgtagcattgttttcctccaataacttattaaccaaaaccttgtaaaaagtaacaacggaactaattgtaccgaaagttatacactttttcaatagttttttatgaattaataataataatttatcgaattatttatgcttttatacaagattttataatttggaattgcattataaaaacaagcacataattctaaattgctcggcaacccaagcaaagtggcaattctttttttatttaatgtggcaactttgttgtcacttctactttccaacaaccgtatatttttgatataatgtatacaagtattcgctatatccttgaatgacgaaaggagtcctatgcacataccatctctcgtaatcgacctggccatgatgcttttggccgccggaattgtcagcgtgattttccgcaaaatacaccttccggtcatcctgggctatatcgctgtgggttttctgatcagcccgtactttcccatgtttttcaacgtggaagatgtgcccgccatcgacaccctcagcgaaatcggcgtaattatcattctgtttcatatcggtctggaatttgattttcacaagctgctcagcgtgggaagtaccgccatcgtcaccgccctggtaaagatgggcggcgtgctggtggtgggatacctgttcggggacctgattgggctgtcccagatgaactgtattttcctgggaaccatgctggccatcagttccaccgtggttattcagaagtgttttgaggatctaaaggtcaccggggagagatacaccgccctggttatgggagagctgattatggaagacctgatcggcgtgttcatgatggtcatcctggcctccctgtccgtgggccagagcggcggcgagagcgttgtcggcaagctgctcctcatgggctgctacctgctggtatggctgattgtggggatttacttcctcccgaccctgctgaaccgcgtcatgcaccttctcaaccgggagatgctcatcgccctgtctctgggaatctgcttcaccctatctcttctggcgaaagaactgggtttctccgtggagctgggagcattcctggcgggatccttctttgcgggaaccaaccatgcgaaggaagtggagcacgcatccgagagcatcaaggatatgttcgccgtgattttcttcgtttctgtgggcatgaaggtggatccgtccgtgattgcggaacactggacctccatcatcccgattgcgattatcgcggtgattgccaagctgatttttgccacattgggtatgatcctttccggtcagcggatggaaacctccttgaagagtggattcagtctggctccgattggagagttttcctacatcatcgcggcgctgggaatttccctgggggtgatggatgaatacctctacccggttattgtagcggcttccgtgctcacaaccttggccaccccggtgctcatccggaattcctccaaggtagcggcgtttatgcgaaagcatctgccgaaaaaactcctagagaaaatcgaccggtacacctccagcgagcaggacgagacggaccacacccacgactggctggtgatgattcgaaacttcttttccagccttctcctgtacggcatcatcatgctggtgaccgccatcgcgggagtgcgcttgctgtatccgtccctgcttcaagttatgccgaagaaattctccggcatcgccacctgcctgctggtgtacattatcatcgcgatttttgcccggccgatgctgcgccttcgggacaccacctttaccaagctgtggctggaccgcaaagccaaccggccgccgctggtgattctggctctgctgaacgtgctgaccatcgcgtatattgcttttatcccgattcatcacatcttcggggctcggagaatgctgctgctgggcgttgtcctcatcgccatcctcaccatgagcaagacggacgtggtggcgaccttttatctccagctggaaactcgattcctacggaacctgaacgaaaaaactctgacccacgtggcccagagtcaggggccccaggaatggctggacgaagacattcacatcgtgtcctactacgtaccgaaggatgcggagtacatcggtcagacattggaacagctggcatggggtaagtacaacaacattttggtaacgaaaatccgccgtggcaagcacacctacaccttgcctcacagcggcttcaaaatccaggccggcgataagctgtacctggtgggtcaaatgaatgacatcctgcagattaaggaaattcttttcccggatgtggaccgccgaatccgcaccctggagcagttcatggaaagtgattacccggacacccagcatgccctggcctgtctggccatcgaagtgaacggttccgaaccgtactgcggtcaggccatcatcaactccaaaatcctcagcaaagcccactgcatgattctgggcattcagaaggacggttatccggtgctgatgccaagcgcttacctcaaaatccagaagggggatgtgctgtgggtcatgggctccaacaacaacgtgggccgtctggcatcctacagcttgggggccgaggaagagccggaaattatttcataaaaaaagaagtgttttgccgctgcaaaacacttctttttttattcctgcgcgtccgattcttccacgctcacatccacgccgttcaccgtgaccccttcgcacagcggaatcaacaggtactcccgaccgtcgataacctgagttttcaccgaatagatctgctccggatccaccgcgatatccgcctccggagtgtgcacccggaattttcttttttcgatgatattgttgggattcagcgcctcttcctcgccaaaatacttccgacaggtctcgccgaaggtttcaatccgttcctccgaaaccccgctgtccttcagaatttcattcacctcatcgatgagaatcaccggcgcattgggatcccggctttccttgtgctcctcgattcgctgacggagagaattggtcaccgcctgaaccacttccaggctgcactcctcctccaacgcctcgctcagggcaccgtcgaaggcattcttctgcttctccggcgcaatcggcggctgagccgcattgaagagcgcctgaatcagctcttcgtgaatctccgaggaacttctgctgtaatacagggctccgtagatattggtggttcggtcatcgaaacacgggaacataaatcccatctgcggattggacagaatgcttcccgtcgccgcgcctcggaactgcttgtcctccgccatgtaccgaagggccgctttggaatccttcaccgggcaaatggtgcagatgaaataatcgaactgatccgtggaatcctcatcccattcctcatcgtttccggatttgtacggcacatcgtaggtatccgccagaagcagaatcacgtagccggtctcctccggagtcagggaatcgataattctccgataaagcacctgccgcaggttctcatccttcaacccgctcatgcgcaggccctgcagcagccgatgctcgtcgctgctttctacttgcgccgtggtgaaatcgatattcatcagattccgccccagactaccggacagggtcttccggaacagctgagaatacatttccttctcctcctgttccatctgaatcacctgcatatccatatccgacacgatttcccgtgccgcattcacgtagcagccgtacacatggccgaaattatccatctccggacgaatccgcttcttgatttccctgatttctttccgattcattctatagtaaccccttctttttttataaaaacaacttccctattataacagatttccgcccattccacatgataatttggtgtacgcaatttccatagaatctgatataatgaaacagactattttcacaacgaaaggaacatcatggcactcatcgaatttgaaaaagtatccttcggttatccggagaaagatctatacgaaaatatttcctttaccatcgaacccggggaacacgccgtgctcatcggaagcaacggctgcggcaagagctccctggtacatcttctgatggatgaggaaaaatacacctacgaaggcctgattcgccgcagcggtgatttccgaacgggctacgtggggcaatttgtggagcatgaaaccgacgatgccaccgtctttgattttctggcaaaaccatttgtggaactgctgggggaatccgatgcgatggctcagaagatgggggaagcggagaatccggacaagctgtatgaagaatttcaggtcctgatggaccgcatcgatgcggtggacggatacaactacgatgccaacatccggaagcagcttcataccgccggactttccgccatcgcggagaattccgtgggttccgtcagcggcggcgaatacaagctgctgtacatcatccgaaatatgctgctgaagccgcagctcctgatcatggacgagccggatgtgttcctggatttcgagaatctgatcgggctggtacatctgatcaacagctacgacggaaccgttctcaccatcactcacagccgcctgcttctcagtcagtgcttcgacaaggtccttcacatcgagaacatgcagctccaggaatacgccggttcctatccggaatacagccgctggctgctggaaacccgaatcgatgtttttgaagtgaccaaggatttcgacgattacatcgaagcccagcagcaactggtaaaccgccttcggaagggcgcggaattcacctccgacccgaagaagggcaagcagctgcaggctcgaaagaaactggtggagcggatgaaaaacctgcggggcgaggatccgttcctggagattccgaatcattcctttgccttcccggaagtctctccggaagacggaattgcttttaccgtagagaactactccctctcctatgaggacgaactgctgcgggacgtctcctttaccgtgaacaagggggacaaaatcgctgtcgtgggcgccaacggcaccggcaaatccagcatcctgcgggacatttaccgcatgctttcggaaaaagaaaacggcggcaaggtgggctatttccgacagattaccgaatccgacgacacgctgcagctgtccggaggcgaacgaaacatggcgcagctggaggtaatctgccgaggcgattacgataccctgctgctggatgaacccaccagccacctggactgcgacgcccaaattgccctggaacaggcgctgacggaataccggggaacggtgctcatggtctcccacgactttttcaccgtcaccgactgcgcgcagcgaatcttcattctggagaacggcaccctgcgggagatgagcggccgggcgtaccggaaatccatctacaagaagtattttggcagtgacatcttcgaacaggaacggaaccgcatcgacaccgagcgaaaggtgaaccgcctgattctgaagaacaaattcgacgaagcccgggaagtgctgggtgtatagacaaaaagaccgatatccgagccctttcaaactcggataccggtctttttcttatgcggtgaatcaaaccaacgattccttcttcatctcaaaatgcaggagaatcggcaccgccaatccctttataacggtggaaatgcagattgcccaccagaatccggtgacgcatccgaaggctgccgccatcggaattcggagcaggctcccgataatgctgcaggccgccggtatgatcggtttgccgataccgcggtaagttccggtagcgaccacctccaggcagtagaaaatctgcgagtatccgatgatccgaagataatccgtgccggtttcaatcgccagcgaatccgtaaagaacaatttaatcagcggccgtccctcacagatgaacagcaaggtggtgagcacgcccagcaccagcatcagatagatacccacacggtacccgtcgcggatccgcttatcttttccggcaccgaagttctgagccacgaaagaggtcatggccacctgaaacgcgttggcagtcatgtaggcgacggattcaatctgcgtcgccacccgctggatgccgatataggtattgccgtacaccgtgatcatctttcccagcacgctggaaatcatggcaaagataatcgtctggatggcagcgggaaaaccgtagcatagaatgattttgcattcttcccaactcatccggtagcggctgcggaaactgccctctcgaaagagatgccgatcccgatgcacccgcagggcatacaaaaggctgaccaccatctgagagaacagggtcgcataacccgcgccatcggatcccagcgccggagaacccagcagcccgaagatcagaaccgggtccagaatgacattgagaatcattcccaccaaattgtatttaaacggcgtctgactgtcccccgccgcagtgtagatccccagcagcacgtaattgtatcccatgaacagcacgctgatgatggtgatggtgaggtagctgacggtataggaaacgatgacctcattctgaatatggtagaaccccacgatggaatgccgaaatatcagaaccggaagaacgtacaacagcatgataatccagttcagcgtaatcgacgtcccggaagcgacctgtgcttgcgtcagatcgttctttcccagcagcatcccgatacgcacctgggcaccggtctgcacaatcatgcagattccctgtgccagaaaaagaagcagtcccgcggtggacaccgccgtcaccgcttcaatccccagccggctcacccacaaagtatcgattaaattgtatgccatctgaacgaactgagaggcaatcagcggcagcgacatttgaatcaatgccttcgaaatactgccccgggtcaggtttttcaccgtatctttatgttccatctatctgctatccccatcaaaaccgcgattttttattataaagtaaaaatattttctcccaaactccccgcatttccgggaagccttcactattttatcaaatctattgtaatatttcatcaaatattataaaatttacgaagataattccgaaaagaaagggttcaaaaatgggaacagacagtactttaaccaatgaaatctacaacgagctgtaccgggccatcacccaccaggagctgaagccgggacagaacctcaccctcaccatgctgaaaaagcaattcaacgtgagccatactccgattcgagaagccctcacccgcctcagcgccgatggactggttacctaccatcccaataaaggcatgaaggtgacggacttctccgaaagtgaaatccgggaaattttccagttcaccgccgaactggaagtgctagcccttcgcttctgcagcggtgccttcaccctggcaccgttaatggaacggctccaatccattgtggaccgagaagcggaagcgctggaaaagggagattttgaggcttggggcgcgatatcgggaaccttccacgacgtgttctacaagttctcggataaccggtatctggatgagacggcggaacgcatgagcgcccgcatggagctcatgtcccatatgtattccaacgaagggacggaggagcagatctaccggcgccatgttgggatctgcgatgccgtactgcagcgggatttcgatctggcggctgaacggattcgggcacatctccagttcagcatgatgtcggttctggattcctacaaaaagaaccgctagtacacgaccgcgaagaaaggaataacacaaatgaatgccaacagttcaaccgtcagcgaaagaatatataccgccatccgaaacgatattttgaacaaaaccctggtttcgggagagaaacttaccatcaagaaactccatgaaatgtacggtgtcagttcttcgcccatccgagaggccctgttccgcctgcagcaggatggattgattgaataccgttccaatgcgggcatgagggtcattgaattcacccggcaggacctggcagaaatctacatgctcctcaccgaattcgatgtgattgccctccgggcggccaccaccccgacccgccgtctcagcaccctggcggcactggaactgtgcatggaaagaacccgggcttccattgaaaacgattactggaattattacagcgatgccttccacagcattctgtacgaagaagcgcaaaacggccggctcaccgatgcggctcggaagattcgcatccagtccaccatcttctcaaatcagtacgaaattaaagaagaaaaccgccgggaaattctaaagcagcacgaggatattctaagtgccattcgggacaatcgattggaccgggcggaggacctgatgcgaacccacgtgggatcttcctacgcaaaagcgctgtcgattctggaggaggaagaagcagcatcggaagaatccagcaaataagcaagtgcccgctcgtagatttcctccaatttcaggaaatcctccaccaagatgtattcatcctccatgtgttctcgattctcatgccccggaaaattcggcccaaaggccaccatatttggcatggctttggcataagtccctccgccgatggaaatcgggcggctgtcgtctccggtcacttcccggtaagctgacagcagggcgcccagcaccgggctgtccgacggcgtgtacagcggacgaacatgatagacgcattcgcaggatgccccatacgaactgaattgacgaaccaaggatccggatatttcatccggatttttctttgccggataacggatatccaccatcaaagtcgccgtttcatcctgaacttcgaagagccccacattcagcgtgagctttccgctctcgtcttctgccgcgattcccagtttctctccgtaaatggttttcccaatcaaatcagcatacatttgagcgaaccggttctccggttccgcctgatgcaccttctccatcagttccgaaatcccgttgagccccagccagggcgcacatccgtgacatgcctttccggacgcttcataggtaccgaattctgtttttacccgagcgcgtgccggcaccatattgggtgcggtccccccttcgccctgaaggaacccggactgcggcatctgaacctgaaaaaccatggcacccagttcattttgaatggccggaaaatcgccgtcgggggtaaaaccacattccggaatttcttccgcgtccgtataggcttcaatatctcgccactccccgttttcctccgtctgccccagaatcagccggatgcgtgccgaaagggttgttttttcttttagcgccttcatggcgtacaacacggcgatggtagggcctttgtcgtcggtggtgccccggccgtaaattcttccgtccacgatttcacccccgaagggatcctgcgtccagccatcccccgccggcaccacatccaggtgggacaggattccgatgagccgaggacccgccccgatttcgatgtacgcgtacttacccggcacatcttccacacgcatgccgaaggattttgccagctccagcacgtattccttggcgccacagacctctttcccgtacggatattccggtccctcttcctttgcaatgctttgaaacgacaccagcttctgcagtgcctcaatcatctcgttcattttttcctcctgttagcaaaacagagcggcaaattccgccgccctgtttcttgaaaaaatatgatttcttacttttccggaacttccggtgtttcgactttgcgggcatcgatttccgcctgcatttccggcagctgcttctccagcttggacagacgatagaatgcgaacaccagaatgatgaaaattaccagcggaatggtaacgatttcagcaaagaacaggttctgaatcgcctgactctgttcggaagcggatgcctgatagtggaatgcggtgagcagggagcttgccagaattccaccgccggccagtccggctttctgtgcaaaggtgaagatggacatgatggttccgccgttgtccacgccgctcttccattcgccgtaagtcatggagtccagtgcacactgatagatcatctgtgcgaacagtcctacgccgatgccttcacagccccagcagaagaacagaatcggcaggctggcatcgtgggtgatgaaacggagtccaaagctgatgaccagtgcaatactggagatggagcaggacatggcgtttccgaattttttgcccatatatcccattcccacgatggcgataaagctgatgatcgacgacatggtggaatatacacccatcaggttggtgttgtgcaggttgtactgcaggtagtataccatggatgcaccgttcagcgcgttgtagatcatgaacatgatgtttaccacgcatacgaacagggcgtatttgttggtaatcagtgccttgaggatggcgctcacgctctgcttctccgcctcttctttaattctctcatcctcgctgttcttgtccagcttataggaaggttcttcaaagcccttgctggctgcgtatacggtgagaaaagaagtcgcatagattacgccgcagatgatggcgaagatgaagaatcccttggtctggtctcctccgccgatcagcttaacgaacggcagtgcggttgcggtaaccagtacgctggcgatggtatttccgtatcctctccactgacccagcttcactctctcgtccttatccgttgtaattcttgccagcaatgtgttgaacggcacgttggtggcggtctgtgccatgccctggaacaggtaggtgatggcaacgaagatgatcagatagctctgtttcaggtgcggtgcccagtagctgagcgccacgcagattccggccggaacggacagatacttcagccatgcacgacatttaccttcttttgaaacggtcttatccaatatgacacccatcatcgggtcgttaatcgcatcccatacctttgcgatgaccatgattacggtagcagccgctgccggaatctttgccacatcggtgtagaaccacagaaggaagaatgcattcaggatgttcaatgtgctctttccgaagtctccataggccatggcaaacttaattcgaatcggtaatttttgactgttttccatatctttacctctcatgaaaatgtgttttctttaacacatttcattttaataacaaattttgcatatagtttttgttagtctaactgaattgttgtattcattttatataatttgcaatatcttgtcaatattattcgctaattttataatattttattttttgttgcaaaatccttattcatgtgataagattcagacagttgaactgaatcacctgcatttttgaacgtgaaaggggtttcaaaatgaaattattagaagaactgacacaggcctggggcgtatccggcagagagaagaacgtccgggccatcatccggagagaaatccgggattatgtggatgaatgctataccgatgccatgggtaacctgattgcctataagaaaggtacggattcggaaaacaataagaagattatgtacaccgcccacatggacgaaatcggtttccaggttactcatattgaaggcgacggaagaatcaaagtctacagtgtgggttggacttggaccagcgccatctacaacgacaaggtgattttccagaacggcgtcatcggcgtcgtgggttgcgacggtcctgtggaagaagcccagaacaaggcgcaggcactctacatcgatatcggctgcaccagcaaggaagaaaccatgaagtacgtacagccgggagactattgcggatttatcggcaagtactatgagctgcagaatgaccgcatcagcgccaaatccctggatgaccgagtggcttgctacgtgctgattgaagccatcaagaagaatccgggacagtatcccaacgacatctactacgtattcaccgtgcaggaagaagtgggctgccgcggttctgtggttgccgcagagcgaatcaagccggatatcggtgtctccgtggacgttacgccggatcactactacccttgcgatctgaagggctgcaacgaagtgggcaaaggtgtaggcgttaccttcggaaacccatccgcaatgctggatgaataccttgtggacgaaatggtgaaaacatgcgaggacaacgccatcaactatcagcgggatgtcatggaccgaggcggcacggacgcttccagcatgaaccgggcctactacggaacccgcgtggccggaatttccatcgtagaccgttatccgcacagccagagctccgtcatctccaaacacgacgtggaatgcgcgattgagctggtggacaaatactccgcacgggaattcactttcgaagaggaatggtagaaataaaaataattgtatattgaaaggaagttaccgatgagaggaattgaacgattctttcgctacatcggcatcctgacgcccagtgatgaaaattcccaaaatcatccttcaagtgcctgcgagttcaatcttgcccatgaattggtcaaggagctgcaggcacttggcgtatccgatgcttttgtagatgaaaactgttacgtatacggacacattcccccaacgctggggaaggaggaaaggccggcaatcggcttaattgcccatatggatacggtatcggatttctgcgatgccgcgccgaatcctcagattattgaaaactacgacggaagggatgtcccgctgggaacgagcggccgggtgcttcgggtgaccgatttcccccacctgtctcaactcaagggacgcaccttgattaccactgacggtaccaccattctgagttccgacgataaatccggaatcgcggagatcatgactgtggtggagcagcttgccggaatgccccatggaccggtgtccgttgcttttacgccggatgaagaaatcggccgcggtaccgatgattttaggacggatgtgttcggggcgaaatatgcttttactctggacggtgaggcggaaggcgaagtgcaatacgaaagcttcaacgccgccggggcggaagtttccttccgaggaaacaacgtacaccccggctccgcaaagaacgtgatgctaaacgccgctttggtggccatggaattcaacgagatgctgaattccgcccagcgcccggagtacacggagaattatcagggcttcgtccatcttaccgacatgactggttccgtggcggaagctcggctcaagtacatccttcgggaccacgaccggaacatgctcgcggacatgaaggccgggatggagctggcggcccagcggctgaacgaaaaatacggtgcgggaaccgtggaacttgtcattcaggatcaataccaaaacatggcggaaatcctgaaagattatccggaggtcatggaagtggctcggaaggcctgcagaagctgcggcgtttcgccgatttccgttcccattcggggcgcaacggacggtgccattctcagcttccggggactcccttgcccaaacctgggaaccggcggctatgctttccacggaccgtatgagcacctcaccgtggaaggaatggataaaatggtggaaatcgtgctggaaatcctgcggattttcgcggaataggaaaaggcggccgggcaggctgttctgcttttcccggcccggggtttgcgtacgaaaaccgagttcattggctttgcgggcaggcgtacacaaactccgccggcgcccgggccgcctttcctcttttcgcggccccggggtttgcgtacgaaaaccgatttctttgactttgcgggcaggcgtacgcaaactccgccggcgcccgggccggcttttctctttttgcggctccggggtttgcgtacgaaaaccgattttattggctttgcggacaggcgtacgcaaactccgccggcgcccaggccgccttttttctttttcccggcccggggtttgcgtacgaaaaccgatttcattggctttgcgggcaggcgtacgcaaacggcgccggcggccgggccgccttttctctttttgcggccccggggtttgcgtacgaaaaccgatttctttggctttgcgggcaggcgtacgcaaacggcgccggcggccgggccgccttttcaaaaaagtaaaaaccctgcaacggtttcgaaccgctgcagggttttctctgctatatccttatatcctctatgcctgcatctccacatactcgtcgtaggtgcacagcttatccgtgaggtggccttccccgtcgatttccataatccggttggcaaccgtgctgatgaactcgtggtcatgggacgcaaagataatattacccttgaacgccttcaacccatcgttcacggcagtgatggattccagatccaaatggttggttggctgatccagcaccaggaagttggatccgaagagcatcatccgggacagcatgcaccgcaccttctctcctccggagagtacttttacctgcttgtacacatcatccccggagaacagcatcttgcctaagaaacttctcataaaggtttcggtggtctcggaagtgtactgacccagccagtcgatcatgttcagctcgcagtcgttgaagaactccgagttgtccatcgggaagtaggactttgtgatggttacaccccatttaaaagaaccctcgtccggctccatctcgcccatgagaatcttgaacagggtggtgttggcaatttcgttctcgccgacgaaagcgattttatcctcccggcccaccatgaaggatacgttgtccagtacttttacgccgtcgacggtcttgctgattccgtccaccgtcagaatgtctttgcccgcttctcggtccatggtaaaaccaacgaacggataccgtctggaggatgccggcatttcctctacggacagcttgtccagcagcttccggcgggaagtggcctgcttggatttggacttgttggcggagaaccgctgaataaatgtctgcagttctttgattttatcttcgttcttcttgttctgatcccgaatcatcttctgaaccatctggctggattcgtaccagaactcgtagttgcccacatacatcttaattttgccgtagtccacgtccacgatattggtgcagaccgtattcaaaaagtgacggtcgtgggagaccacgatgaccgtaccctcgtaatccagcaggaagtcctccagccagttgatagccttgatgtccaggtggttggtcggctcgtccaagaggatgatgtccggattgccgaacagcgcctgcgccaggagaaccttcaccttctccttaccggtgagcgtgctcatctgagaatagagaatatcgttggagagtcccagcccctgaatcaggcggctcacgttggactccgcttcccagccgtccatctcggcgaactccccttccagctctgccgcacggattccgtcctcgtcggagaaatctggcttcatgtacagggcatccttttccttcataacatcatagagatgcttgtttcccataattacggtgtccagaacggtgtattcgtcataagcgaagtggtcctgcttcagaaccgacattctggcccccttcttaatggccacatctccggtggtcggctccagatttccggagaggactctcaggaaggtggatttgcccgcaccgttggcgccgatgacgccgtagcaatttcccggtgtgaatttcagattaacatccttgaacagcggctgtccgctgaaattcacgcttacatttattacgtctaacatgtgtgttcctttctctcgtgaatgcaaacatattaaaagcgttgcaaatagaacattcacaacgcttcaacttacatagtaccgcttaattttaccataaaagcagtattcatgcaatcgccaaatccggcttgtccggaatcaagaagtctcccctacagcgacgactggctccggaagttcaccggctcataatcctgaagcggcgccagaaaaccgcactcttccagcttattctgaatcatatccagaatctcccggctttccgccgtaacggtatgataatgatacccggaggtcgcccgcatcaacggacgggactgcccttcccgaatttgttttaggtagttttcgatatccagccgagagcgaatattcaattccccccgcatggttccgtacaccttgtgatatacgaactcatcccggattcgtccgccgcaatccacgatgatggagaattccttccgaatctcctcctccgtgtgaatcaccttgaacacccggctggcttcctccgagtgctgaagcacatatccccgattggtggacagcacctcatttccctgagcccgaaggatggaaatatcctgaacgatgacctgccggctgacgcccagttcctgcgccaacgccgctccggacaggggttccgcactgttttttaattttttaatgatggcatctcttcgttccgccgctttcattccgaccttttaccccctgttctccaattcattcttcccacgttttccgggtcctatattcttctcatattcttcagcgacaggtccagaatcggggaagagtgagtcagtgcaccgctggatacgtaatccaccttcaggtcccgaatcatctccaccttcgcctcatccacattgccggaaatctcgatttccgctctgccgtcgatgattccaatggcctctgccatcgtatcgtggtccatgttatccagcatgatgatatccgctccggcatttaccgcctcccgggtcatctccagattctccacttccacttcgattttccgaacgaaaggcgcatactccttggccattgcaatcgccttcgccacgccgccggccgcctcgatatggttatccttcagcatcacgccgtcggaaaggttgtaccgatggttgcatccgccgccgattcgcaccgcgtacttctcaaaaacccggttgttcggagtagtcttccgcgtatccaacagacgaatgccggttccctccagcaggtccgcaatctgacgggtatgggtcgccacgccgctcatgcgctgcagatagttcagcgccgtccgctcgccagacaacagcacccggatatcccctcgaatgtccgccagcttctgacccttctccaccttatcgccatccttcacgtaagtgacaacctccgtctccggatccagcagggtgaatacccgctcaaaaacctgcagaccgcagatcacgccgtcctgcttgcagatcagctccacgttccccgggcacttgtcccgcatgatgcagttggtggacacatcttcactggtaatatcctcccgcagcgcgccgagaatcagcggatccacgttcagctccattgtcgctctatcaaacattttatttcctctcttccggtaaaaacaaatttcgctctccataagtttccgacgcttccgccattatacgtggcggtactcggaattcatcggcgttccgccgtttgccttctcaatggccgctgccaccaggcggatgttctccttctccgtggtctcccgatcctcatacttcttcagatccgtattggccaccacttcatcatttcccttgaactcagaatagtgttccaccagatcctgagccgctctcttggagaacaccaggctctccagcagggaattgctggccagacgattctttccgtgcacgccgttgcaagcggtttcgcccacggcatacagctggttcatagtggttctgctctcgtgatctaccttgattccgcccatgaaatagtgctgtgccggaaccaccgggatgcactccttgaacacgtcatatcccgcttctctgcagtgctccacgatgttcgggaagtggttttccagcacgtcgtggggaatcggtcgcaggtcttcccatacgtgttctgtaccgtccttctccatctgttcgtgaattttctgggacagcagatctctcggcagaagctcgttggcgaaacgctccatgttctttccgtagagctttgcaccctctcctcgaacggattccgagattaggaagcttctggtcttatcatccttggaatagaatgtggtcgggtgaatctgcacgtagttgatattctgcagttcaattccgtggcgaatggcgatggccaatgcatcgccggtgagatgacggaagttggtggaatggcgataaattccgccgattccgccggtggccagtacggtgcagtccgcctgaatggtctccagcatgccgtccttcttccgaaccaccgcgccgtagcaggtgttgtcctttgtaatcagatcttccatggtggtgtattccatcagctttacgttcggaagcttttttacctgcgccagaagcttgctggtaatttccttgccggtgatgtcctcgtgaaagaggattcttttatccgagtgagctccctcccgggtgaaatccaattcgccgttctcgtcccggtggaaacgaacaccgtattccaggagatcctgaaccacgtcctgcgaggaacgaatcatgatgtccacggactcccggtcgttctcgtagtgtccggctttcatggtatcttcaaaatagctgtcgtagtcctcgtcgtccttcaacatgcagattccgccctgtgccaggtaggaatcgttgctttccagatcggctttggtaatcagtgtgatttccttgtcccgaggaagctgcagtgcacagtacagtccggagcagccgctgccgacgattaatacttctgtcttcattattaaaccttcttccttatgttccgttgttttcaaccttccattaacaacaaacctttatcagtgatgaagtataacacatattctttcaggtgacaagacagttgtaaataaaaaatttttactgctgtcttgacatgtaaatatacagtcactataatgaataggacaatctgaaaggaaataaggttatgaatacaagagaattacaggatcgaattattgaactgaagaaggagaaggatgtctgcatcctggcccacgcctaccagagccacgatatctgggaagttgcggactacgtcggcgattcctacggcctcagcgtacaggcagcgaaagcacctcagaagaccgttatcatggccggcgttcgcttcatggcagaaaccgttaaggttctttccccggagaagaaggttctcctggccaacgacctggcgggatgcaccatggcactgcagatggaccgggataaggttctggagatgcagaaagaaaatccgggatatgccaccgtcgcttacatcaacaccacctcggaactgaagaccgccgtggacgtcgtggtcacctcttcctctgccgttaagattctgaagaatatgccggagaaggacatcctgttcatcccggactgcaacctgggcgcatgggtcgcaaaacagctcccggagaagaatttcaagttcttccagggcggctgcttcactcatatgaacatcaccccgaccgacgttcggattgctcgggagaagcatccggaagccaaggttctggttcatccggaatgccgcgcatcggtcaccgaacaggcggattatgccggaagcaccaccggaatcatgaattacgcgaaggaaagcgattgcaaggaattcatcatcggcacggagagcagcatcgtgcagcacctccagttcgaatgtccggataagaagttctaccttctctccgaccgctgcgtatgtcataacatgaagattactaccctatatgatgtatacaacgcactgctgggtgaaggcggtgaagagattcagctttccgacgaattgattcgggatgccaagagaccgattgaccgcatgattgaactgggcaaatagaagttccttctgtacggacccttatgaagacatggataacccctgtggactcgctccacagggattttttttgcgttctataaaaaaattcgttcgcctgtcacggttttccggtagcggtgaccgccgcgctatgctaccatatacgtacagaagaaaggagaaatcccatgggatcctatgttgaattcaaaaatgtaaagaaggtgtaccgcatgggggaggtgctgattgaagccctccacgacgccacatttgaaatagagaaaggcgaagtttgtgtcattgtaggggcatccggcgccggcaaaaccaccctgctgaacatcctgggaggtatggataccctgtccgacggacaggttcttctggacggaaaggatatttcccggtacagccggcgggaactgacggactaccgccgatacgaaatcggtttcgtcttccaattctataatttgattccaaacctcaccgcactggagaatgtatccctggccactcagatttgtcgggatcctttggatgcggaagaaacactgacaaaggtgggactgaaggaccgcctggggaactttccggcccagctctccggcggcgagcagcagcgggtggccatcgcccgggcgctggcgaagaatccgaaactcctgctgtgcgatgaacctaccggtgcgctggattacaacacgggaaagtccatcctgaagctgcttcaggataccagccggcagcagggcatgacggtggtcatcatcacccacaacaccgccctcaccgctatggccgatcgaattatccacatcaaaaatgggcacatctcttcggtagagaagaacgagcacatcaccccggtggaagacatagaatggtaggacagaaaaatgctgaaaaaatcaacattgcgagaaatacgttccagtctgggaagatatctggccatcctggcaatcgtcatgcttggcgtggggtttttctgcggtctgaaatccaccaaaccggccatggtggctactgccaatgaatacttgaaaaaaaacaggatgtacgactatcagcttcagtccacccttgggttaacggaaaaggatgtagatgccgtcgcccggcagaatgaggtggaagcggcggaaggttccgtcacggaagacgtactctttcactacgaagggcaagcatccgataaggtcctccgcttccattccatcaccacaaaagtcaataccatccacctgatgaagggacgcctgccgaaggccaaggatgaatgcgtggtggatcacaatcttggaaataacctgattggaaagaaaatcgtaatctccccccggaacagcaagagtacccgaaatttgttttatcggaaggagttgaaggtggtgggcaccgtcacctcgccggtgtacctgaactttgagcggggcaccacctccttgggcgacggaaaggtttccggcttcgtgtacatgaaccgggatgctttcgatacggatgttttcacccggattgacgtgaagctgaagaagaactatccgatttactccaagaaatacaagaattatatcgatgccaacaacgccggaatggaggatatgcttgaagaacgggcggaaattcgatataaggatattgtggccaaagccacccgaaaatgggagaagaacaaagccaaatacgagaagaatttcaacgattttctaaaagaaaaggcggacacccaacagaagatccgggacagccatcagaagctgacgaacaacaaggcgaagcttcagaagaggagcaaggagctgaacagcaaggaaaaatctctgaaatccaacctgaagaaggtggacagcggaattcggcaggtgaacgccgccatcgaacagagcaaggcggcaggcgcgccggtggatcggcttctggcgcagaagcagcagcttcaggggcagaagcggaagatccaagatggtcttctgctggtgaagaaaggcaaagggaaaatcaaggcgggcaatcaggaactgaaaaaaggcttttcgaaatataacgaagccgttgctacggccaacaaggaattccgcaaggcagaagataaattggcggatgccaaggcgaagctggacgacggtaagaagaaaattgccgaaatcgataaagcggatacctacgtgctggaccggaataccaatacaggatacgcatgtttcgacagcgattcctccatcgtagacggaatctgcaaggtcttcccgattttctttttcctggtcgccgccctggtgtgcatgaccaccatgacccgaatggtggatgcccagcggacggaaatcggtgtactgaaggcactgggatacagcaattcttccatcatcggaaaatacctgttctattcctgcagtgcttcccttttgggcgccgttaccggacttttcgccggcgcttatattttcccgaaggtgatctggaaagcctacggcatgatgtacgacttcaatgccaaccttaaatacgtactcagcccgaagctgtccgctgcggcggtgggggtttccctgctttgcgccgttagtgccactctgcttccttgtctgggggatttccgggaagtcccggcacagctgattcggcctcgggcaccgaagaacggaaaacgaattcttttggaacggatcggatttctgtggaaccggttcagcttccttcagaaagtcaccttccggaatatcttccgctacaaaaaacgttttctcatgatggtcatcggcatcagcggctgcaccgcccttctggtggccggtctgggcattcgggattccatccagaatgtggtgaatttccagttcgacgaaatccagaaatacgattacgatgtgacgttcgataaaaacatgaccgccgaaaagcaaaaagcattccgcaagaataacgacggcgcctacaaggatattctctttgtccataaaaacagtgccgacatcctccacggcgatcaggtaaaatccatcaccctgattgcggcggaatccaagggtttccggcagttcgtggatctccacaaccacgccggcaaagccatttcctatccgggtaaaggtcaggcggtcatctgcaagaagctggcacgcacctacaatctctccgtgggagatgaaatcaccctccgggacgatgattatcaccaaggtaaggtgaaaatcatcggaatctgcgagaactacatttacaactacgtgtacatcacaccggatacctaccgagacctgttcggaaccgcggcatctatcaaatccgccatggttcgcactgccaccggcagcgacaagtccgtgcaccaatccgccaccaaacttctcaagcgggatgaggtggccgcggtatccatcaacatggatatgagggaccgggtcaacaacatgatgaagagcttgaacgctatcgttctggtggtggttctctccgccggcgcactggccttcatcgtgctgtacaacctgaccaatatcaacatcaccgagcgaatccgggaaatcgccaccatcaaggtgctgggcttccgcaaaggcgaaaccgccgcctacgtcttccgggagaacatttttctcacgggaatcagtgccctgctgggcttgggactgggtcggattcttctgggattcatcatcagccggattaacgtagatctgatttccttcgatactcggattaccggattcagctacgctctggcagtgattctcaccttcgtctttgccttcatcgtgagcattgccatgtcccgacggctggagaacatcagcatgacggagtccttgaagagcatcgaatagcctttcccgactttcttgcaccaagtccccgccgcttccggggcattttcctcgatggacttggtgcattgccgacgcaatcaatgcgtttcccgactttcttgcaccaagtcttggtcgcttccgaggaaattctcccgggggtcttggtgcatcgccgacgcaatcaatgcgtttccaggctttcttgcaccaagccttggtcgcttctggggcaaaaggtaagaccctgcatccgtaatgcaatcttgaagatgtgattgcattacggatgcagggtctttcattctttggcatcgacaggccgggaaaatccggattgtgttggcgtgacatgacggagaaaaaagctcttcactttacaacaagtgcaaacgcacaagcgaatgcagcaactattgccgcaagcatgggataactacaatttttaaatttgaaaaaataaattcctgcaacaacaaaaatacaaactaaaagtacttttattaaagatgacaatagtcttccgttttgtatcaccccggtgcatccaaggatacatagaattgggataaggcatccgatcattaccagaactatcaataggtttcgcttagtcacgttatcgtgcaattacctatactttgtaattgctccccctttcctctaccgaatcttccccaaccggaacgcttcgatcatttcctgtgtcagcgccggccgaaccgggttcatttccagttcctctcgggaaatgaagaaggcggtttccagctcctctcgatccaggacgatgcggtcgtccccgtccacctctgcggtgtagccgatttgcaggtttccagcaaaaccccacggctgggatccgtagtatcggatgttcttgaccttgagtcccacttcttccatgacctcccgggccacgcattcctctgcagactccccgatttccacgaagccggcaatcagtgcatacaagttggtctgctttctgccgttgtaacgggataccagcagcttatcctcatgggttaccgccaccgttaccgccgggttaattcgaggaaaaataagatttccgcacttcggacagcgcatcattcgttccttctcgccatattccgtccgggttccgcatcttccgcacatccgattgtttttgtaccacgcattcaggtgccccgccgtcatggctgcaaagcacaggtctttcggttttccctttcggagaacccgaggagaccgatactcgtagcccgccggcagggaaacgctgcattcgctctttggcataaagaaccgggtatcgtcaatggagaacaggtagacgcactcctcttccgtaagacctgcatctcccgcttttggaatctccagcattccgtcctcggactccttcatgccgatttcgccgctcttctcatcgaaaagaaacaactcatcctctgcccgcatccgaatgtccggtctgtagtgattatcaaatattctatcgccgatttcctgtatcatctataatttaactcctgctaaaagtattttcgggattgcaccctgcttacagttccgggaatccgtgcgcccgatggtactgccgccccttttcacaatccgacgcaatccgctcccgcagctcttctacggaaccgaatttcatctccggccgctcccacttcaagaactcaatccggatatttttaccgtacagatctcgattcagcccgtacacatgggtttcgatggatttctcaaactccccgactgttggttttacccccacatcggtaatccccggatatttgacgccgtcgatttccgccaatgtgtaatagaccccgttgggcggcgcgattcggtaggcttcgaacaccacgttggccgtcgggaaaccgattcggcccccaagctgcttgccgggaatcacctttccggtacagtagaagttccggcccaggcaaaccgatgcccgttccatatccccttccgtaatcagtcggcgaaccaaggtggagctgaccaccatatcatcaacgtacaccggctcattcaccagaacctccattcccaggtcccggcccaggctttgcatcaaatccacatccccggccgctttctttccgaaccgaaaattgaatccgcagcacactgctgccgcatgcagggtctctcccagaatgcgccggataaaatcctctgcggaggtatttcgaattctctcgtcaaatggaatatctaccacaacctcaatccccagggactgaagcagtgccattttctccatctcggtacagatgaggctcacctctttgcgggtatgcgtggaaaaggtaaagcataccggtgtccagttgtttcgctttgcttttcgtaccgcactcaggagaatctcccggtggccgatatgaaccccgtcgaaattgcccagtgctaccaccgtctgcccatctatcttaacatcgtctaacgaacgtattactttcatcttatcgtatcaccttctccggatataacgtattctcccgaagggaagaaatccccaggaactttccttccgggtcgtacacccggtatttatcccccaagcgggacccttccttcagtgccgccggaactgcaggcgatgcaagcacgttcacgtatccggtatcaatctcccgaccattgtaatagaacggcacagactccatgctcttcagttcgattctgcccaagtgcaccaacgtttcatccatgggaatcacgcagcgctccagctcctcatcggtcatctccaaaatctccggaagcgtccgcgcgtcttccacccgaaaacaaccggattggattcgctgaagggcggtcatggtgccgccgcagcccaattttttcccgatatcatcgcagatggtgcggatatatgttcccttggagcaggtcacccgaaagagaatccggttctctcccaaattcacttccaccggctgaatgtcctccacgtagattttccgggatttgatttccacctctaccccttcccgggcgtatttgtacagcggcttcccgttcaccttcagtgcggaatacttcggcggaatctgggtgatccatcccctaaaagaatcaattgtctgaattacatcctcttccgacacatccaccggtttcgtctccagcaccgtgccggtgatgtccagcgtatccgtcaccattcccagcttcatttccgcttcgtaggtcttaaaatcatcatcgtaatattcgataatccgagtcgccttcccaaaacacaccggaagcactcccgtcgccatgggatccagcgttccggtatgtcccacacggcgaatgtgaagccgtccccgaagttttgccaccacatcctgggaggtccagccctccggcttattgatattcaggattccgttttcaaacatattattgatctttctccacttgctccactaacttctctgtaataatcgacttcgcctcatccagcggtttccggattcggcagccagccgccagaacgtgtccgccgccgcccaaggcaccggccacttccgccacgttgatatgggaccgggaacggagactgcatcgaatcaccgccggttccgcttccttcagcaggcatcccacctcgacgccgtccacgctcataatgtcctgcacaaaaccttccgcttcgctcaattcgcacccggtctcccggagcatttcctgcgtcactgcggccacggccaccttgtcctcaccgaacagctgaatactgctcatcaccagggaatgcagccgaatggaccgcagggaattgcggttataaatcaggttgctgattttcttgcaattgaaccccggcacccggtgcagctgcgccgccatttcgtgggtacgcaccgtggtattggcatgctgaaaattcccggtatccgtggtgattgcggtaaaaataccctccgccatcggaagatcgatttccacattcatcgcttcaatcaaaagctcaatcatctctcccgttgccgccgagtccggttcgattcggccaaaatcaaaattcggctgttctccggtcaccccatgatggtcaatcactgcttttaccggggccgcctcaaagatttcctctcggcccggaatgcggttcattccgcagcaatccaccatgatggccaattccggccggaagtccggctgggaaacaatcaaatttctcgccaggaagtccagattcgccggtgtcgcctcgccggtgacgattaccgcattcttgcccatggatttcagcgcaacgcaaagagcggatgacgagcccaaggcatcgccatccatgtttacgtgcggaagaatcacgatgtgatccaatcctgccaatttttctgctatctctttgtatgaattcttcatattagttctcgttgtgaatttcatcaatcagcgcatcgatgtgccgtccgtagtccatggaggaatcgattttgaaaatcaattccggcacgtggcgcatcttgatgtcctttccgatgttcttcttgaaggttccctttgcccgattaaaggcttccagaacttccttgttcactgcttctttgtcctcatctgcgagggtcagcggtgtgatgtacactgtggcgaaactgccgtccgcggtgacatccacaccggaaatggtgataattctcgagttcagtctcggatccttgattccgttcaccagcagcttgctgatgctctttttaatctcttccgaaacccgtccaattcgatgatttcttcccataattatctttctacctctaccattgtgaagcattccagcgtatcacccggtttgatatcgttgtagttctcgattccaagaccgcattcgtaaccggttgccacttccttggcatcgtccttgtatctcttcagagaggagatggtaccttcgtggattacgatgccatcccgaaccagacgaatctgtgcattccgctgaatctttccttctgtaacataggcaccgccgacagttcccacgttcggtacgcggaaggtgtcacggatctctgccttacccagaatttcttcccggaattccggatccagcatacccttcatcgcgtcggaaatttcgtcgatgatatcgtagatgacacggtatgttctgatttcaacatccgcatccgccgcctggttggttacggccgtggtcggacgaacgttaaatccgataatgatggcattggatgtctccgccagcattacgtcggactcggtgacggtacctacgccggaatgaaccacgttgattcgaacatccggtgtatccaacttctccaaagaggagatgatagcaccgacggaaccctgtacgtccgccttgatgatcaggttcagttccttggtctcgccttcctgaatctgggagaagagtttgtccagcgtcatgctggcattcttagccaatacatcctctctcatcttctccgcacggctgtttgcgatttctctggcaaccttatcgtccttcacggcattgaaggcatctccggccatcggtacatccgacagacccagaatttccactgccgttgccggaccggccttacggatcttatcacccttgaagttggtcattacacggatctttccggagcatgttccggctaccacactctgaccggtcttcagagtaccgttcattaccagcagtgtggcaatcggacctcttgccttgtccagtctggcctcgattactgtacccagtgccagtctgtccgggttcgccttcagctccagcatttctgcctccagaagaatcatctccagcaggtcggtaatgccttcgcccttctttgcggataccggtacgctgattacgtctccaccccagtcttctaccaggatgccgttgtcggccagatccttctttaccttgtccggatttgcgcccggcttatccatcttgttgatggcaacgataatcggaacgtttgccgcctttgcatggctgatggactcgatggtctgcggcttaacactgtcatctgccgcaacaaccagtacggcgatatccgtaatctgtgcaccgcgggcacgcatggtggtaaacgcttcgtgtcccggagtatccaggaatacgattttcttgccgttgatggtaacttcggatgcaccgatatgctgtgtaattccgccggattctcctgcggtaacgttggtgtttcgaatcgcatccagcagggatgttttaccgtggtcaacgtgacccattacggtgatgattggtgctctcggcttcagttcgctctccgcatcttcgtgaagatccaggccttcttccggctcttcttccacttcttcggtaaccacgacgctgatgcccagatcctctgccagcatctccaccacgtccttatcgatggtctggttcaatgtagccatgatgcccatcttcatcagagacatgatgatggatgtcggcgagatttctgcctgttctgccagacccgcaacggtaatcggaacggttaccgcaatggtgccttccggcagaagctcttcaatatccacttccggctccacgttcttcggtgctttctttttcttatgtctggtctgtttttccagagaattctcgtcgaagtaacgggaattctttccgccgccgtttccttcgtgacgaccgtgcttgttgtgacgatcgcctctgctgcggtcttcattcttatccttattgtggtcaaagaacttcttgctctttccctttccgccctttccggtttctaccgctgccatttccggtgcggatgcgccggtgctgcggcgcgaggaatgatcgttccggccttcattgttgttccggcggtttccgccgtccttacggccctgaccatcttttcctctgcggtcattgcggtcgtttctcttctttctgccatcggaagatttgccggattccttcgcttccggctgcggtgctttggatgcatcgaaaatcttcttgaagcgcattggcttgttcggagcgttggtatactcttccttcttttcct

SEQ ID NO: 3226 - DNA, 2957 bp, Unknown
  16S sequences of unknown bacteria
aacaggcatgggagcaaggcccatccccggggcacagaacaggctaggtacacaaggccaggccggatgcggccccgccgacacggcaaaataaaaacaggcatgggagcaaggcccatccccggggcacagaacaggctaggtacacaaagctaggccggatgcggccccgccgacacggcggtatgtaccgcccgaaaccgggcggtgctcacatttaatatatctggccggagcagccgcatccacagtcccaaccggtgccgttgtcgacatcgtttgcaaaggcagagcgggggataaagccaaagccgttgccctcgtatccggaaaggtccatggtatacgacgcggtgacgggcaggtagccggtcaccgtgccggtgatctggttggaatcgtggccgcatccgcagcaatggcggcagcagcgggaacagcaggaacgttgattaaagaacatagaatgttcctcctctttggtgtagaattgaaagtttcttttcgctataccctatgcccgcaagcccagagatgtgcagattacacggggcgaatatagcgggcattggcaaaccccagctgcccatccggcaggccgacggtataccagccctgggcttcgccgtagatggtgacttcgtcgccattgtaggccagggtgaccacgggcgcggagatggaaggcttttcacggatgtataaaaagctgttgggatttacctgcacgatgcctttgcgggtggggatcggctctacgaagggcaggccgaaatattctgtgagcgccagcaccacgctgcgtgccatgggctcgatgttggccttgatccaatttgcgtcctcttcgttgtcgtgataggcaaactcgatcaacacggcgggcgctttggtgcgccgcacttcgccgatggtggcggtggcgcggatatccaccaggtccgggtttggatagatggcctttaggttgagggcgatgagctccgccagccgctttcccttggcgctggtggggtaataatagatatccggcccttgcaattcaccggagagcgcttcgggcgcggcgttggaatgcagggatacatgcgcatcataatcgccgttgttggacgcggcaatggacgtggccgctgtcatatccggcgtattgcgcgtaaaggaaatgccgcttgcgagcaggtatggctccatcgcgtctgcgacaaggttcatgtaatactcctccgtaccgccgtttatgtagaggttccaatcttgggtagaagggctaaggtaaattctgggcatggcaaacgcctccttttggttttgctgtatcgtatgcatccgccgaggcgacggtgccaagaccggcccatctttgagcgcattgccgaaaacgcggccccggggaaagggagggtgcgcggcggtaccatgcgatgcgccgaggcggcggtgccaaggccggcctcgtttgaacgtttttggggggaaatgggggctgcgcggccaaacccgtggccggccgggccaaagggatggtataatgcctatatagggcaaacaaaaccaggaggggatggatatgagggacaacgggccgctgaaaatagggctggcgcccatcaagcggggcacaacgaggatggagacggcgcttttgcaaaagcagctgatcttgcagcgcatggcggatatcacgccggagaacgtggcgttggtgggcatcgaggatgtgctgcccgaagggcttttgtactgccatgaccaggtggcggcggtggaaaaggcattcaagcgcgcgggggtgcacgcgctgtttttgccgcactgcgattttggctgcgaagaggtggtaggccagctggcaaagcgcatgggggtgccggtactgatctggggcaaccgcgacccgtacccggattaccccggcgggaaggaccgcgacacgcaatgcggcacgctggcgtccaccaaggcgctgcagcggtatggcgtgccgttttcctatattttgaacaccgatgtggaggatgcgccgctaaagcgcgggtttgaggatttctgcgcggtggccaacgtggtgcgccggttccgcggaatgcgtatcctgctggcgggcacgcggccgcaggcgtttttgtctgtgatctataacgaggacgagctgctgcgccgctttggcatcgaggtttacccctggggcagcgcggcatggctggaagccgcggataggatcttggcggagcgggtggacgaggtaacgcgcgaaatgcaggcgtttgcccggcaggtggacgtttcggacttgacttacgaacggcagcggcggcaggcggcgctggtgctggcgctgtgcgaaatggcagagcggcacgatatcgacggcgtggcgatggagtgctggtcgctcttgccagagcggtatggcatttccggctgccagatcgtgggccagctctgccagcgggggctgccctgtgcctgcgagggggatgtgctgggcgcagtgacggcggtgatgatgcaggcggctgcgctggacaaagagccggtgtttttttccgatatcaccagccgccatccggagcaggacaacacggagctgctctggcattgcgggccgtacccgcccagcctggcacaccccgatacgccgcccaagagcacgtttcacgggcggggcgcgtttcagctgaaaaacgggcccatcaccattgcgcggctggatgcggcaaacggggggtactcgctgttttccggcgagggccgcggcgtagacggcccgcccaaaaagggcaactatgtctggctggaggtggactgctgggcagactgggaggaaaagatcgtctttggcccgtatatccaccatgtggcgggggcgtatgggcaatacagccagatcctttccgaggcatgcaagtatttgggcggggtgagcccagacccgatgcgcccggtaaagcgtg

SEQ ID NO: 3227 - DNA, 3297 bp, Unknown
  16S sequences of unknown bacteria
caagagggattcgaacccccgaccttttggttcgtagccaaacactctatccggctgagctattggcgcatttctcacagctcgattatattatcacatctcgccgcaaaaatcaagacccaaattaaaatttttttaaatttattttctcggtaaaacacagacggcttataaaaacctgccgtttctcccttctttttggaaaaacggcagacacatcagattttcttacttattgacgcaatattcgctgtttgcaaggcttgaaccatatccgctgacgggagcgtcgtatgaggaatttccgtaggaaatacagtaatcggcatatccgccccaataatatccgtcgcaaatccaccatttgcccgaaatcgtttttgcaacatcggttccgtcttttttatcatttgacttcaaggtagcttcggcattttgtatgtcaacataactttctctggagtcatagactacatcaatgccgctgaccgtacagttttcaaccgttgcgttgtcagaaccgtttccgcgctgaatattgccggcaagacctcccatgttataaacggcacggataatattgttttgggacacgcaatttttaaaggttattttcacgcccgggtcggcgcccattccgagcagcataccgattttaccatagccgttaagggagctgttgacaacacggacattgtcaaaggtggtggttccgtatgcataagcgagcacgatcgaaccgacatttccgtaataaacatatcccttgcccattgccacatcggctccgtcaaaggtcaaatcacgaatgttgaccgttcccgaagcattgccgataaaaccgaaaccgtatccgcttgaatttgtgcagcttctgacaagcaaattacttattttatgtccgttgccgttgattgtcattccctttatgggatcgatgggacgccaaaagccccttccgaggtcgatgtcatttgttatgttcagcgtatatccgctgtaatcgacctttttatccgtgatttcatatttgaaaagagcaagttcttcggccgatgcgacggtaataatcttgtttagtgtatcgacgggatttttatagctttctgcctttttgtcgtcccaataaaatttatcggaagtgtatgtgaaaggcgaaaaggttttggtgagcatcgtcacaagacccgttgcagaatcgtaataaaattcctggtcggcgtcaagccacttaagtgccgagcacctgctcattcgacggccgttgtgatttatctccaaaagagaaagacccttttcaatgaaaaactcaacttttataagcttgtcattatcttcggcaaggcctttcatgcttatatcgagagtcttaggctcattttgggttgtatctgcagcccggcttccaaaggattttttcggcctctgcaccggcggcctttttgaaatcgagggttttgccctcggcattttcccaggtgccgtcggccttttgcatttcgagagccacatcaaggcttcccgaacgaatggtgttgacgctcgtggatgcggtgtcggtgaaccatgcgaaggtggttccgacaagcattgcaaggcacagtgccattgcaatcacgcttgaaacaagcgccctttttgtgtttttgctgttcatactcttttcctcctaaaaaattataaaccgtaagggctttacaatttatacatatattgtaaccccttccccgaggtattgtcaacagcaaatttacaaaaaatcaatttttacttatattgaacaaaataggcgattgtttcaaactcggattatcgtttaaaacaaaaagactgttcgtaacagaacagtcttttttcacaattttaaaattcagttttcatcggtgacgtgaaatatcccgaccttttcatcgtcctttgcaaaaatggcctccgacggctctttttgattttgcgaggactcttccccgccggcagcatttacgcagacctttttcctttcggaattatcccttaaaaactcataggcaaaccacacgaaggcagcgagataaagggcggagaaccagatttcaaaggttcccataccgaaaaggaatcttccgtaggtcatggtggaaagggtgcaggaaaggagcgcgtatttgagatattttctcgaaacaaaggtgagcaaaacaagcagaatatcgaccatatatgtatatctctcgtgcatttcggggaggaaatacacaagcgcccaaaagctccaggcggcgacgccgaggaatttttcggcggtgtttatcttgattattcccgacatgaccgtgtaaagcgcaagcccgcagattgtgagagtcaaaaccatagcggcggtgtgaagatattcccagtttgtctctccctgtttcgcaacaagacaccaaaagctgtatacgtttttatacatatccttatatgttccgctttgggtcagataaatctgtatcggctcgacaaggctgcggccgaagatatatccgaaaattcccgtggacagaaagaccgtgaaggacaggaaaaagcccaaaatcgtgaaccgttttttatagaaataataaatcacaataaagggagcgaggaatgcggcctggaatttgcagccgagagcaagaccgaaaaagacaaaggccgaaatatatttttccttataaaagcgataaagggtcatgagcaggaaaaagcagtatatggaatcgcactgaccccaaaagccggaattgaggaaaacggtggggagcataagaatgacggtgtaaacgagattatgcttaaaggtgaaccgcttaaaaccgcacatttccccaacaaagtcggcggcgaaaaaggcaagaagatagtcgaaaacaacggaaagcagcttataaagccacacgcagtcaattttaaaatatgttaaaaaggcaatgagagtctgataaaaaatattataatttccgatttgacttttaagagagactattcccccgccgtcccttatctgattgaaccacgggataagaaaggcgctcatatcgccgcttacataatcaaacccggcaaagcgaatgtaaaaagcgagcaggcttattataccgaagaacaggacggctcggtttttttcggcaaagcgtatgacatttccttcaattttattcaaatcatgtcagctcctttgtgaatatttacctctaaactgtaagaaaaaatcccgaagactttcgccttcgggattggcggagaaggagagactcgaactctcgcgccggttacccgacctacgcccttagcagg

SEQ ID NO: 3228 - DNA, 5266 bp, Unknown
  16S sequences of unknown bacteria
ccgcggcccttcagccgggcgatcaggatatcctcatccgcagccacgacccaggtctcgtcaaaggcgtcctgccagccgcattcaaacagcagcggcacctccgccacggcgatctcgctgccgcagtgcgccatctcttcctgcaggcgctgcttgatgagcgggtgcaggatcgcttccacttcccgccggccctccgccgtctcaaacatgtgatcgctgagcgcctgccggtcgatctccccttttgcgtcgatgaaccggctgccatagcgctcaagcagcgccgcatggcccgcttctttcggcctgagcagctgcgcgttgatctcatcgcagtcaaagaccgggatgcccgcttccttcaggacagcgatcacgctggacttgcctgcgcccatcaccccgctcagggcgatcttcttcatcttcttttctgacatttcgcacaataatatgtccctcttccgccggcctgcaccttgatgatctcactgccgcagacaggacatggctctcctttcttcgcatgcaccttcagctgcagctgaaagcggccgtccacccccagcgatgacgtgtagctgcggatggtcgttcctccggcccgtatcgccccattcaggatgcgccgggcctggacgagcagttcctcggcatccttcctgcgcaagcggtaagccttcgtcagcggatgcaggcctgcggcaaagcagatctcatccgcatagatgttgccgatgccggcgatgattcgctgatcgagcagcgcctgtttgagcgtgatgcggcgcgcatgcagatgcgcatacagctcatcagcgctcagcgtctcatccagcgcatcctttccgacacgggcaaagcaagggcattcccgcaagctgccttgcttgggataagcgtacatgcggccgaacttgcgggtatcgtgatagcgcagctcccggccgtcttccagctggaagatgacatgcacatgacgcgcgtcaaccggcgcagaaggctgctgcagataaaattttccttccatgcgcagatgggcgatccaccagacatcgcccagatcgaagcagaggtatttgccgatccgcgcataatcttcgatgcgccgtccgcagaccagcgaagcgaacgtctgcgggtctccgtggatgatgcgcgcccatctcacctggacatcgcggatgcgcgcatgccccatctgcgcatgcagcgtatccagcacggtctgtacttcaggaagctcaggcatacgcgcacctacttcgcctcataccaggtgcggccgatgctcgcattggcgacgaggggcaccttcagcttcacgacgttctgcatgccttccttcacgatgcgcatcatctgctcgacctcatcctcaggcacatcaaagatcagctcatcgtggatctgcaggatcatgcgggagcgcacttgctcctcctgcatcttcttgtcgatggcgatcatcgccatcttgatgagatcggcagcgctgccctggatcggcgcattcatggccgcgcgcttgccgaattccctcatcatatagtttttgtcgctgatctctggaatataccgccgccgctggaacatcgtcgtcacatagccatgctcctcgcagaaggcgatcgtgtcattcatgaaggcgtggatcttcggataagaagcgaagtatttctcgatgaagctgtgcgcctctttgcgggtgatgcccagctgctcgctcagcccataatccgactgtccgtagacgatgccgaaattgacggtcttggcgctgcggcgcatggacgcgtccacctcatcctcgctgacatcgaagatctgcgcagccgtccgggtatggatgtcactgccatggctgaacgcgtcgatcatctgggtctcatcggccatgtgcgccagcatgcgcagctcgatctgtgagtagtccgccgaaaggaacacatgcccttcctccgccacgaaggcctttctgatctcccgtccctcttcgtcgcgcacgctgatgttctgcaggttcggttcggtcgaggagatcgctgctcgacagcctgccggtctgcgccagcgcctgattgaacacggtgtggatgcgctgatcttgcgagatgtgcttcttcagtccgaccacatatgtggtgtacagcttggcatacttgcggtaatcgagcagacaagggatgatcgggtgcacatcgcgcagcttttccagcacctccaccgcggtggagcgcttcttgccagacttcagcccgagctcatcgaaaagcacgatgcccagctgcttaggggaattgatgttgaactcatgaccggcgtatgtatatacctttgcggcattttcctccatgcgcgcatgggtgacttctccgatctcatcgagcacgtcttcgctgatgtggatgccctcctgctccatcttgaacaagatgcgggaaaggggcatctccagcgtggtgagcagcggccacatcccttcctcgcgcagcttctccttcatctgtgggacgatcggggccatgccggcgagcagcgcttccatataggcgcactggcggtcaaactccggcagtatcgcctttcccttcttgccataggcatcgtcgatcgacagcggcatggggatctgataatgatccaggaagcgctcgaagctggtgatcgagctgtccagcaaaaagctgcccagcatcagatcgaaggcgaaatcactgcatgcgatgccgctgcgcgcggccgcatgataaaactctttggcattgtaggtgatcttgtgctcatcctgcgccagataccgcagcaggcgttcatcgcgtctggcgtcatccagcgtgatgtaatagcactctccctggcagtacagcgcaaagccatagagcgccttgcgggtgtaatgctcattgtcgcagtccgccaggatgatggtgttttccacagacaggtcggcatcgatatggtccacacagcggatgtgctgcttgacgagcggttcggcatgttcctgctgcaggaatgatttcatctcatatttgcggtagaactcattgacgtttggcgcaaagccggaaaacgcgaggtcatcgagcgcaaaggggatgtctgcatcgcggcggatcgtggccagaaagcgcgagagcatggcgctctccctgccctcctccagcttctcccgcagctttcccttgacctcgtcgatatgcgcatagacgccatccacgctgtcatagcagctgagcagcttgagcgcggtcttttccccgacgcccttcacgccggggatattgtcggccgtatcgcccatcagcgccttgaggtcgacgatctgctcgggacgaaggccatacgcgtcctgcagcgcctgcagatccatcagctgcatctcgctgatgccttttttcatgagcagcacatcggtggtcttgtcgatgagctgcaataagtcgcggtcgctcgagaggatggtgatggacacctccgggtgcgcggacgcaaatgaaccgatgatgtcgtccgcctcgatcccttcgcattcatagcgctttacgccgcaggcatcgagaaactcgcgggcgatgggaaactgcacgatcagctcttgatccagcgctttgcgcgtgcccttgtattcctggtatgcctcatgcctgaaggtcggcttgccggcatcccaggcgaccagcacgccgtcgggctcgatctgttccagcgccttttggaacatggtcacgaagccgaacacggcattggtgggaatgccgttggccgtgcgcatcatgcggccgtacacggtcgcataataggcgcggaacagcatcgaattgccatccagaagcagaagttttctcatatatctcatcaccctgtcagtcgatgacaggtctcctttctatcggtacttattttaacacatttgttccgccttgaaacagcggacgcaaaaaagacggatcatcgtccgtccgttcattccaggccgagcagcacattgaggttctcctgcatcagcgtcaggtaattctttcccgcccgctgctgcgcatcgctcagcgaagagatattgttgagggggaccggggtcagtcccagttcattgatgatctgcaagcgcagatcgatcatatcctgcggcaggttttcctcgatggccatatactgcacgccgtcttcccgcaaggtctcgatgatcacggaaagctgctcatcgtccggcaatgcgccatagcgggagaggcagacgggatagacctggatgccatagttctgccaatggccgaaattcggggtcatgaccgcgacgcggatctgcttttcccgcagctgctgatagcgagcatccagcctggaaagcgcgatctccaacgcatcataattatccgcaaacgcctgggcataggccggataacgctcactgaggtaatcgcggatgcaggcagccatgccgcacatcgtcaccgcatccatccacagcgtgggatcggaataatacatatcgacatcgtcaaaggcatctcccgcataccatggctgcgtctcgttgttttcgccatagcgaagaaacgggaagtttcccagctgatcgaccagattgacctgctcgatcctactgtccgtgatctcatccgcatacgcttcataatatgattccagcccgcccagataaaggagcgcatcgctctgggcgagcagttcctgatagtcgtcgcggatctgcgcgcgctggatcaaggtattctcgctgagcagcacgcagctgactcgatcctgcgcgatctgttcgaccagatactgcagcggataacaggtgaccagcacctgatcgtgcgtcgccctgcagccgcacagcgtcatcagggaaagacacagacacagggtcatcttcaccagtttcatacgcatcaccaccagatgcattatatcatattttgaccgctgcggcagtgaaacaatcgtttcagccatgtccgctcatcgatgagctgcgtgccctcctgcagataattggtgcggttgcgataaaggtcgtgctgcgcgtggaccttgcggcggcccagaaagggatgggagagccggtaacggtaaaagctcatgcgctcttccatcaggcgggcgtgctgcatcagctcctggatgaacaggacaaacagcgtgatcatccccgccgcatcgcgcatgcagccagagaggaagatcaccggcagcgccgcgaacgagttaatgctgctccattcatatcaagagatgttacataatctcc

SEQ ID NO: 3229 - DNA, 6397 bp, Unknown
  16S sequences of unknown bacteria
cactagatcgctcgtcggcagcgtcagatgtgtataagagacagcgccacaggcagatacgattttctcttgcgcccgcaggcgggctatattataataaggggaaacattgccgtcattggcacacacccggtgcggggaatcgaccaccgcaccgaagagaggggagggcttttatgctgcgcattgacgagatccgcctgcatccaggcgaggacgagagcatactgccggagcgggccgcggcacggctgcatcttccggttggggctttgaaccatttccgcattgtgcgccggtccgtagacgcccgcaaagaagtatccctggtctactcggtgcagctgcaggtgcgcggcgaggaaaaagtcctccggcactgccgggacaagcacatttccaaagccgtccgtacccgttacaccccaagtacggcatcctactccggcgcacaccgtcccgtgattgtcggcgccggcccggcgggcctgttctgtgccctggctctcagccgtgcaggggcgcagcccattctgctggagcgaggtgcgccggtggaacagcggcgcgaggacgtggtctttttctggaaaaccggcctgctctcccccgcctccaacgtgcagttcggcgagggcggcgcgggtacgttttccgacggcaaactgaacaccggcacccacgatgcgcgcaaccgctacattctggagcagctggtgcgtttcggcgcaccggaggagatcctcatcgacgccaaaccccatgtgggcacggacaaactctatttcgtactgcagaacattcggcaggagctgctctccctgggctgcgacattcgcttcggccagcgtctcagcgatctggagctgaaagacggccgcgtgcggggtgtgcacaccgtctcctgcagcgacggatttatcgacaccgacaccctggtgctggccatcggccacagcgctcgggatacgtttgaactgttggcgcgccgcggcgtgcctatggagcaaaaaccttttgccgtaggtgtgcgtatcgagcaccgccagcgggagattgacatggcccaatacggccggtatgccggccacccggctctgcctcccacctcctataagctctcctgccacaccagcggcgggcggggcgtgttctctttctgcgtctgccccggcggcaccgtggtggccgccgcttcggaacaggggcgcgtggtgaccaacggcatgagcgaatacgcccgcgacggcgaaaacatcaacggcggttttctggtgggcgtcgggccgcaggattttgacagcggcgatcccctgtcgggggtagcctttcagcggcggctggaagcggcggcttaccgcctgggcggcggcaattttattgcaccagcccagcgggtggaggatttcctggcccatcggccctccgttggaccaggggcagtgctgcccacctaccgtcccggcgtacgctggacggatctgcatcagtgcctgccgcctttcctgaccgaagcgctggaagaagcgctgcctatgctgggaaagcgcgtgaccggctacgacgcgccagacgcagtactgacggcggtggagagccgttcgtcttccccggtgcgcatcctgcgcgatgcagacagctaccagtctcccatcgcgggtctgtacccctgcggcgagggagccggctatgccggcggcatcctgtccgcagcggcggacgggctgcgctgcgcagaaaaaattctcacctgcggacaggaaggaagtgatgtctgatatgggtaccgtcctcgccgtctgcgtgagccgcgaaaaaggcacgcagaaagaaaatataggaaccgccgtgttcttggaagactggggcatccagggcgacgcccatgcaggcaagtggcaccggcaggtgtcgctgctttcccacgaaaaaattgaggctttccgcgcccggggcgcagaagtagccgacggagccttcggcgaaaacctggtggttgcgggcatcgacttccgctccctgcccctgggcacccgctttcagtgcaacgacgtagtgctgaagctgacacagatcggcaaagagtgccacaacggctgcgcgatttatcaggccatgggcgagtgcatcatgccccgggagggcgtattcgctcaagtactgcatggcggtacgatttccgtgggcgacacgctgcgcatactgccggatgaggcgcaggcataaattcccccggcgcgttgccgggaacacagacagaaacaacttggaggtaagagcatgaccggaacagtcggcatcaaggcggattttctcaccagcaaacacaaacgggacattgaacgtattgccctgtccaacaatttgaagctgcattatttcaccgacacggcagacatggacgccgtgatcggccagtgtgaaatcctgtacggttacatccccccggaaaagctgcggcaggcagcgtccctgcgctggctggcctgcgcttcctccggcgtggagcaatatctgggcgaatacctttatgccgcccccggcgtgatcctgaccaactccgccggcgcatacggcatcaccatcagcgaacatatcatcaccactctgctgatgctcctgcgccgcatcccggaatattacgacgtggtgcaccagcaccagtggaaagatctgggccgcattcgctccatttacggcagcgtaatcaccgtggtgggcaccggcgacatcggcaccgcctttgcccagcgagccaaagccctgggtgcggcccatatccgcggcgtgcaccgcaccaacaaagtgctgccccgctgtttcgacgagagctacgctgtggaggatctggacttcgctctggccggagcggacattgtggtgctctgcgttcccggcaccaaggagactgagcatctcattacccgggagcggctgggcctgctgaaaaagacttctgtactgatcaacgtaggccgcggttccgtgctggatcaggatgcgctgatggaggttctcaacagcggcaagattgccggcgcagcgctggatgtgaccaatccggaaccgctgccgccggaacatcctttgtggaataccaaaaatttgattatcacgccccatgtgtccggcaatatgtctctggatatcacctgcgatatcgacgtgaatatgttctgcgacaatctgacccgctactgccgccagcagcccctgaagcatgtggtggagcgcagcgtgggttattaaaggaggccgccatgtttttatttaaccggaaaagtcccgaagaaaaggaagcagcgcgtctggaaaagctgcgccgcaccgagggcgaccgcgcctttggcggcgccatcatgacgccggtgagctcgctttccctggccgacatctgcatggtccgcctggtgccagaggcgcaggcgctgcagattaactgcggccgcaaaagcgtttccatcccctatgccgccctgcgcagtatgaccacctccagcgaagcccagatcgcacggaacgaaagcccgattactgcttctgaaatggcggcgttgctctccggcgacgccgggcaatttgtgggcgacctggataaaaacgccgaggcccgcgcccgctggttcatcgccattgactatgcggacgaagccggcgccccgcaacggctggttttcattgcctacagcatgcgcgggccgtacatcgcccgcagcaaactctatgccgccacgcagtttgaagaaacgcttaacgatatcatgcagcgtttcagcgcagcagggcagtcatcctgacaaataccggttcagaaagggcgcgaattgtttcgcgcccttttgtttggaaaattttacattcttttacaaaaaaatccgttgcaattccaaccctttcgcggtattctaaaggacagatgcggtcttttttccgccgcgttttctgtacaaatcgctgtgtttcattttgataaggagatgcttttttctgtgaacaaaaaatgccactggctgctggccgctcatctgatgggagacgggtcttggcgtctgcacggcctggcactgaagctgggcagcattatgccggacgtgcttttgtacacctatgtttccggacataaatacgacaccaccgcagaaaaggtggccgggaacctggcggaactgaagcgcgccggctcctggacggtgcgtgattgcttccgtctgggttataatcttcattttctggaggattatttcacctatccccacaacagccattttgagggcggctttattgcacactgcctgtacgagcaccggctcagccgggcactgcagcgctatctgcacgaaaatccccgcccagcggcaacggttctcccccctccggatgccgtttgcgccgtgctggaggagcaccacagcgcctatatgcgcaccgctccttccccggaaaacgatgcggcttacatcgtttcctgcaccgaactggtgggctgggaagtgtttgccgccttcagccgccaggccgcttcggcccgggcactggctttcatgcagcgcgtcggcattgcataaactgctctggcgctcctgtcccaagcggacaggagcgctttttttctccctgtgaaaaaattcgcccttctgattcgtattcagggtgaaagcgcacaccggccggatgcgctggacaaaggagtgaactgccatgaacaaactttcccagcgcgaagaagcagagcggctggtcgagacctattccgatctgatcctgcgtctgtgctggacctatctgaaaaacacccaggacgccgaggacatctgccagaacacctttgtgaaacttctgtgcggaaatgtgcattttacctcacccgaacatgaaaaagcctggattatccgcacagcctccaacgagtgcaaagatctgctgaaaagcgcccaccgctcacgcacctgcgcactggacgcctgcggtgattatgccgtgccggaggcggaaaacgaaggcagcgtcctcgccgccgtggcgcagctgcctgaatcgtaccgcgaggttctttatctgcattactttgagggatacagcctcaaagagatcggcgccctgctgaacatcccggcggctaccgccggcacccggctggcccggggccgtgaaaaactcaaagcgattttggagggagaatactatgaacactgcatttgattataaaaccgaattgaaccagctgcgcttcacccccgaagagaaagccgccatgaccgatcgccttctctccgccgcgcagaaaaacggcagcgcccaaacatcacgccgccgctggaagcgcagtgccgtggcggcagtggccgctgtggcctgcctgtgcgtcggcgcgggcgccgttggcgtcacaaaactggccagtgacactttctccccggtattcggcagcgcggaaacggaaatcatagacaaaatcggccatcccattggtgcttctgccaccgctgccggcgtaaccatcaccgccgacgccatcatcggcgacaagcaccactatgccatcgcttacaccatcgaaaaaaccgacggctcggccttcgatttggacgtgaacgctaccgtgggcaacggcgttcttcctctgacatttgaacagcaggatacgaatatcggtctgatgggcggttcccacggcagttcctatttttatgatgccgatccctcggacaatgccatccagttcgtggaagaatgtgaagtagacggcaacctgcccgtcggcggcgcggcgaaagcggtgttccggaacctgtactcttatccgaacggcgactatgagaaccgccagcttctggccgaaggcaaatgggttctgaaattcgacctggattttgaggatacctccatcgccctgcgcgccgggcaaagcaccacgctcaacgacatgcccatcaccatcaatgccgttaccctctctcccctggcgctgcgagtagactataccgtagagagcgccgtagtgtgggaggacgcacccagcggacgggaaaccgcgtataatcgcacccagagcgaccgctatctttccgatctcacagtgcttctcacgatgaaagacggcacagtgatggatctcacaagcgccggcggctcgctctctcccaactacagcgaggacgtgacgcaagcccagaaaggccaggtatttgatacgatcatcgatcctgccgatgtggaaagcgttactgtaggtaatatcgtaattccggtcgatgcatcctgaagatttcctgacattaaaaaaggttcctgtgcgcatatgcgcgcaggaacctttccttttatgtaccgcttttgatttccagcgtgtaatgatccatgccagggaacatattcaaaaactcctgcaccaccgttt

SEQ ID NO: 3230 - DNA, 32759 bp, Unknown
  16S sequences of unknown bacteria
aaccgtattttgcgtcgcacccggatattcacttctcgataagccacagcggagacatctggggagtggttttctccgataacgaggtcggtctggacatgcaatacccgaatccgtcggttgcgcaggagaaaattgcaaaaaggtactttcatcccgacgaatacagggcttttctcgacggcgagaacttttattacatctggacgcggaaggaagccgtctgcaagctgttcggttacggtatagacgcgcgttttcctaaaataaacacctacgctcaggaatttgagtcgttcacgttcgccgtgaaaacagttatgccgatttccgacaattttccttattacagtattgcaagcggggcggattttgtgtataatagcattaaattttaaacatcggaggttttggtatgattactgtaccgtactttttctctgacaacgcaatatttcagtcgtcgtccgttttgacgctgaacggaaaatgcgagcctgacgcgaatgtgcttctggaaatcgtcgacaaagataacactgcgctgttttcttcggttgacgtctcgaatgcttacggcgcgttttctctaacagtcaaaactcccgcaccgtcttttgatgaatactctgtcgtactcgaatgcggagcggaaaagaagagcatttcaaacgtactcttcggcgaggtgtggctggcttccggtcagtcgaacatggagcttcaaaactcgcagattctcggtcatgaggacttattcaaagaagtcaaggataaaaagatacgcgtttaccacgttgagtatcctgtggaaggcggagcgtttgcttttcccgaggaacccgacagcagtacccgcggattctgggtcggctcatacgacagtgacgcgctgatgaacgtctcggctataggtctgaaattcgcgaacgagctttacgacgagctgaacgcaaaagaagacgttcccgtagcctttctgaacgcgtcgtggggcggaacgggaattacaacgtggctctcgcgcgaatacatagacaaggacgcgatagtcagcgaaaaattcaagaagtacggcatatatcccgtgcatgaaaagtggaacactgcgggtgacctcaactttcagcagacctgttcgcagtacaactacaaaatcgctcccctgctcggcatgaagttccgcggagttatatggtgccagggcgagaacgaatgctggggcgagtacgacagaagattctacgccgattgtctcagactgtaccaccgcatgtattcggagctgttcgcggcgggagatgactttatgatgatatcctcgctgatatatccgtgggtctacggagacggcgactgcaatctcggttatctcaacgacgcgtttgttacgacggctgtagaagcaccgacaaaattcgcttgtatgcctataggagaccttgaacctatctgggcattccaccacggcaatcacccgattcacccgaccaacaaatacgctgtcggaagccgccttgcaatgctcgcgctgagaaatgtctacggcagacagggacagacctcccccgcacatctcgcagaataccgtacggaaaacggcaggatgattctccgctttgatggggtgggagatggactttacataggggacaagaatccgaagagacgcgcgcactgcctgtatgccgcaggagaggacgacatttatcttcccgcggaatgcagaatagtttcgcctgacacgcttgaagtatggtgcgacggactggacgaggtcaaaaacgtatgctacgctttccagtcgtttgacgtgaagtgcaacatattcgcgggagacttccctgttatgccgttcgctacggagaagaacaagaggatatcgttcgacttgcacctctggtacgactcttcctgtgagctttgctgggcgccgaagcttcatgacgatgtgcttgacgtgttctaccacccgatttggaatcccacagaaggctcggaggtatgccacgacaccgcattcacaagggacaccaccgcaagcgtgagagtatgctcagatgacgccaaatacggctgttatgtcaagtcgtacccctacaacaagctcgatttgtttagatacaaggctatcgaagcggatttctacaacgcggacaaagctaaggctgaactgatattaacgggagaggacggagacactgtgataccgtttgagagaataagtgatgtagtagaaggtgcggcgagatattcggcttcacttgacggactcagcgagcagaactacaaaaaaatgacgttctcgttcagcgatgaaaaggacagatatcactttgtaaacatcgagagaatcaggctgatcagaaaataaaaaaatatcggcaggctcggaaagttaaaaccgtgtctgccgattcttttttatttcattgggacgggaggtcttctgctgtcgttcggaggttttcttttgctgtcagaaggtctcttgtcgtcaaaaggcggtctttctcctctctccggcatagggggaaagtcgtgagattcgttgccgattataaaatcttccgccgacataccgtcgatgggggtaatatatctcttcgcctgtgtggtgaacagctcgtagtacagcccgtgcttcttcataagctcagcgtggtcgcctatctcaacgacagcaccgttttcaagaacgatgattttgttcgccacagtcgccgaggaaagcctgtgagagacgaatattgttgtcttatccttgcgcagccggtcgaactggttgtatatctcctgctctgctatcgcgtcaaggcttgcggtaggttcatcaaggattatcacgtcggagtcactgtagaatgcgcgcgcgatggagagcttctgccactgaccgatagacagctcgattccgttttcctcgaagaatctcataagcggagtatcgtatttttcgggcaggttttcgatgaatccgtctgctgacgactgttttgccgcgctttctatgtcttcatccttcatttcacggtcaatttcgccgaaccatacgttttccttgacgctgaccgcatacttgccgaagtcttggaatattattccgaacatggagtagaggtcctttgtgtcgtattcgcggatgtcgtgtccgtcaagaagtattcttccctcggtcgggtcgtacagtctcgtcagcagcttaatgagcgtagtttttccggctccgttaagtccgacaagcacgcaggtgtcccccggctcaagagtgaagctgacgtggtttattaccttgcgctccgttccgggatatgtgaaggaaacgtcgtcgaacacgatggtatgtcctgtgtgatgctccaccttgcggggttcttcgagaagcggaactatcctgctcttttcgttcatgaatgagataaggttgtcgatgaacagcgttccttcgtaaattgacgcggtagtcgagataatagtaccgattccgcctgcaatagaccttagtgctcctgtatacagcgagtagtcgccgacttcatatctgccgtatgcgacgccttttgctatatagatgaacaatccgcagttcactaaagtcgtcacgagcgtcaggcaaatgttccatataccctcaccgataaacagctttttaagtccgccgaagtattttaagaatgtctcctgatatcttccgatgaacaaatccgaaaggttgaacaggcgcacttccttgaccatgtccttattcgtcatgatttcggaataatacgacatctgtctgcggtctttcgagtgtcttctgacgtaccagaagttcttttttcggtaggtgaagttgattacagccgccggaatgctcactcccgcaataacgagaggtgcgaacggactgattgctccgagaatgatgatgaacgaaagcatactgatgacggtgctgattatggtaaagttgttgttcagtatctgtatcggtcggcttccggcttcacgcttggcgttctcaaacctttcgtaaaactccggcaaatcaaagctggcgaggtcgacttcccttgccttgtacattatcttaagatttatatggttcaccacaagctcgttcgcgatattgtttaaaatattcgagagacggctgaccattcccgtgatgaagttgaatccgaatctaataacgagaaggattattacggtatcgaatttgttttcaagtccctgcgtaacagaggtatatgccgaagcaagcgagtttagcagctcctttccgattatggacgatatcaccggagttacgccgttccataccgccatgaacatcatgaaaaagagtatccacggttttgtttcccacacgagcatgaatatgtagaaaagtctgtgcaggaatttcgtgacgacccgcttgagataccccggaatttcggagaatttttcaggcttcggctctttgagcttttctatcattttttcgcggctgtttctgaatccgccaggtccaggtcccattatttgtcctccttctgcgtcagctttttcaagatagctatcagcgcgtctttttcttcctcggtgagcggtgaaaacagcttttccgcatgttctcggttcgcctgtcggagcacaacgagctgttcctcgcctttttcagtgagggcaaccacaataacacgcttgtcgtccttgtcctgcctgcgcgagataaacccatcgctttccattttcacaagcagctcggaaagtgactgcggtcttatgtcgagcttttccgcgatttccttctggctcagctccccgttttccttgagcatattcataagccttaccctgccgtgttctctcggtggcggagggggcataatttctcctcccggtggtggagacggcgggggtacatcatgcggcggtctgcttctgcgcgacattgcgttgagcttacgcagcatacccattatttcttcgtcctttgtcatacgtcgtcctttctcaggtaccttactttttttaggattataccacattatctctcccgtgtcaactgttaaggtaccttatctttaagaaaaattttacctatgcctatattgacaaatacagcaggacgtgatataatattgtaaggatttcattttgatatcacttcgaacaaggagatagtcatatggaagtaaagaacagtgctcaggagaaaatcattaaggcaaaaagcggatgggcagtgctgatactgtcaatattgctgtacgctgcggacatttttgcgctaggcatatgcggcatgaaaatggagaatggctacggagaggtttccggactttacgtcgctctgtttgtcctgacaatgatttacgtttgtttgggatggatatggtggctcggacttaaggttataggtcccaacgaagcactcgtactcacgttattcggcaaatacataggaacgctcaaagacgaaggatttttctatgtcaatccgttctgcgcagctgtcaaccctgccgctaaaaccaagctgaaccaaagcggagacgtcagcgcggattctgctcaagctgctgctcaggcgcaaactatcagcaagaaaatctccctcaaggtaatgacgctcaacaacaaccgtcagaagataaacgactgtctcggcaatcctattgagatcggcatagcggtcatgtggagagtcagcgataccgcgaaggctgtgttcaacgtcgacaacttcaaggaatatctttccctccagtgtgacgccgcacttcgtgagatcgtgagaatttacccctacgacgttgcgcccaatgttgacactaccggcgacggcatagcggatgaaggaagcctgcgcggttcaagcgagattgttgcaagccgaatccgcgagaagattgaagaaaaggttggattcgcgggtcttgaaataatcgaagcgcgcataacctaccttgcatatgctcccgaaatcgctgcgataatgctccagagacagcaggcttccgcgataatcgacgcgagaaagatgatagtcgacggtgcggtcggaatggtgcagatggctctcgacaagataaattccgacaatatctgtgagcttgacgacgagagaaaagcacaaatggtatcaaatctgcttgtagtgctctgcggcaaccagaacgctcagcctgtgataaactcgggaagcatatattaaaatggctgacaaggaaaaaaagcagctaccgctcaggctgtcaaaaactctgtacgacgagctgtcaaggtgggctgaagacgattttcgctcactgaacgggcagatagaataccttctcacggaatgtgtcaggcaaaagcggaagaaagtgaagtccgacgaggacgaaaacaaaaccgaataaaagaaaaagcatccgaatcctgcgatattctcgcggtaacggatgcttttgctatgttatggtttaatagtttcttcttttataactggaattccttgaataattctcgtttttactccttgattaggattgtcaacattatcgtatttatatgcccatgcttctgtgagttcaattattcctgtttctcggtcgtaaatggatattttataaacattcttctcattatagcgacccgcatcttcgatggaaaaatttacagtctctttgtacttgtattcatattccgttttggctctttcgactctttcatgtctaatatcttcaattgtttttactgccgctgttccagcaagaataattaccgacacaagcgcaatgttaaccaacatatacgtgaatttcttcatctcaaaccaccttattatattaggtacctttcatcttaaaacgcaatgtaaagcaatacaaataatagtaagcaaggaatgagtgttattgccgatgctatacctataatatgattcttgcaaattacttcaaatattctgaactttgccgatatgagttgaattaaagccatatacaaataaaatgaaactagaaagcaaaagcgctttaaacaatgttccaattgtttatgtcaaaatcttacttagtaatcgtaattttattgataactcctgctttgtcggggtcgatgccgcggactattgtcatgcagcaggcgagaagctggaagaaaataaccgccatatgcgtgaatgtgaactcgcttccggtggaaggaagaaccactgctgtcgtagcggcaggagcctgtgcagcgtcgtccgtgataactactatatcagcgcctacgttctggagcttgcctatgatgtcattcgagtcgtcttcggtctttcccttcggagaaataacgaacacgagatcccctggctttacctgagcgataggtccgtgatggaagtcggaggtgggatatcccttcatcttcagcttgtttgtttcgagcattttgagagcaccctcaagcgcgattgagtaggaaatgccgcgtccgagaatgacagctccgggaatgttctgatacttcttcgcgagtatttcaatttcaccgaactttgtgtcgataagctcgccggcttttgcacctacacctctcatctcttcaaggagagcatcgttttcaccccatacggcagccattacgccgagaatcatcatctgagcggtgaacgtttttgtagcggcgatacttgcctcaaatccgcatccgcagaagaggtggtattcggcgcattttgccatgggagattcctcgttatttgtgagagcaaccgttatagcaccgtctttctttgcggattcaagtacagcgagaacgtcctccgccttgcccgactgagaaacgccgacaacaagataatcgctgaggtcaatatgcgcgccgtattttgtaaatacagacggagttccgagagtgcaaggtacgcctgcgaaaattccgaagaggtactgtgcgtatacgcaggcatggtcggaggttccgcgagcggcaaagtaaatatgctttactcccttatcctttgcctttttgacaatttctcggatagtttcaaggttaagatcaattgcgttaggtatggttctgggctgttctctgatttctgtctcaagattgatcatagtagtatctccattctgaattttaaattagcattagggatttcagtgtaaaaattccgataaaaatcgtgaaaacgcagacaaatgtcgacaaaagaagtatctgcgcggcaagctcatggtcgttgtccattttctttgccatgatatagcttgaaacggcggtcggcgctccgaagcatatgagcacaactccgagcgacggtccgcgaagtccgacaagaacggcggctgtcacagcgataatcggcagcacagtggttttcccgagagaaccgacaattgcgtaacccactctgccgtgaagactttcgattttgaagttagctccgaggctgagcagtgcaagcggcgtcgtgagtcccgaaagataggacagtgttttcgttgcaaactgcggcagctttattcccgatagcataacgacaataccgagcagaactccgattatcaaggggtttgtcacaacgtttttcagtattccgagcagctttttcccgctcattttttcatcttcgctctccgagaacaaagacaaaatcacgacggaatacgagttgaacatgacaatgacaaacggcatagcgattgcaatagcctgtccgccgacatcaccgaacatattcaccgcaagcggtactccgaggatagcgaagtttgatcggcaaatgccttgaatgagtgcgccgcgttttgatttatccttgactgcaagcgttacaataacggcaactgccgaaaatgacagcgttaccgaaattatcaagaaaagcacgagcttccagtcaatgttctcgcccggtcggcttcccgcaacctccgaaaacagcatgaccggcagagctattttgaacacgagccagtctgccgcttccgtaaactgaggagttagttttttacatttgcctaaaatcgctccgagtattacaatgaggaatatcgggaatatcgcgttaatgctgtaaagcagattatcaagcataattcctgcctttatgtaagtgccgtataatacgtgtacagtccgtcagctatagcctgcgaaagctccgtctgccattcgtcgttcaccatatttgcggcatctgtcggattagtacaaaagcctatttcgataagcgacgccgccactgtggtttcacgaacgacctgatatgacgctgttgtctggtcaaatatctggggagcgggtttcgggtccatttcggtttcgattgaatcggctatggactgagctattgcttcatcgttggtgtttaccttgcgccagttgtttccgttctcatagtagattctgataccagatgtatccggatttttgtcgtatgagttgacgtgtatcgaaacatagtagtcgatgtcaagcgaatttgcgtatgccactctttcggatgggttgaaaatctggtttccgtcgtccgcggaggttttgccgaaagtcgtaccgtcatgcgtcattacaacggaaaatccgagcgcggtgaggtcgtccttcagcttatttgcgaccgcgagatttacatccttttcaagcgttccgtcttcccagataccgtcaccgcatcctccgtcaacaaatccatgcccggggtcaatgcatatcgtatatccgtccttgaccttaggtcggttgtcgacaacttcttttaccgtcacatctcttccgattccgtctgccgggactgctgtttccgtcgatactggagttgtttccgctccgtccgtgggctgttcattattctttttcgagcaccctgagagaagcatgagaacgcacaatgttcccgcaactgcccgcacgacaaaacagttctttttgaagttcatctatctttagttccttaatttatctgaggtaatcggggagaaaatcttcgctgacaacgctcttcacggagtttttcagcttgtccatggtgatatcggaaaccgcatggctgcctgcaagctcgtcgttgtacgcgtcaaaagtgaacacctggtagccggaaacttcttcggattcgcttgctacgtagtgtgtgaccgtcggtatcagcgatacatttgaaagctcgattgagccgtcgccgtactccaccgaaaggttcagtattcccccgtaaagagactgtgcatcgtcggcggtagaaagaatatttccgagagaatacgcggcaagggtgagagttccgtcgcctgtgtctatccattcaatcttaccgatattgtccccgtttccgacgatgatatccgctccggcttccgcgattttcctcatcacggcggctttgtccttttcagcggtgttctcttcccagtcaacgaaaacaattacgatatccgacataaagtcagcgtattcgatatcggatttatacttgtctcccgtgcagtctttttcggaaagagacagacttgctatagccaaatctccctcgtttatgagtatactgtcgctgttttcgtttatatcgtaaagattgtattcttcaaaatgcgacgaaatatcctttgcgctgcctgtattaaccgcgtctattccgaggtcatacagtgctcctacggattctatgggagagtcaacatcttccgcttccttatacgagcagagagagaggtcggcggagctgagtgtgctgtagattcccgtgtacattctgaggaagctgtagctttgaccgtctccggcacgatttgcggcgtcagatatgatactgttgtcaacaataatatctccgcataccgagattgcgagggtttctttcggtactacaggggttgtttcctcttcgatttcgacaggaatgctttctacagcgtttttgcgtgttgcctgcatgagcatctgaggtgctgtttcgcttgtttccgcttctttttcgattgagttgatatcggaattgcgcatttcaattttcacgcacgacgcggaagagccaagcagcacggcagagagcacaacagacaggatttttttacatttattcaggtacatagtttatcttttggacagtacgtccgcttcatattttttcatttcagagatccatgtgtctccgacaggtacattctgcatatcgcagtaagcgtcccaaacaagtccgaatgggagtgtcttgtattcttcgagatatgcgagtcttgaggtgtaatctccttcggcttcaaacttctggagcatttttacgggttcaagagctgcccaaaggagagccttctgcatatttcttgcgcctattgcccagcaagccgttctgttgatggagccgtcgaagaagtcaagaccgatatgtactctgttttcgtaaccgccgcgctttatctcggacgcgatagccttaagctcatcgtcgaatataactacgtggtcggagtcccagcgaaccggacgggaaacgtgaagaagaattccgtcaaggtactggagcacgccggaaatcttgtcggaaacaacctctgtcgggtggaagtgacctgtatcgagtgtaaggagcgtgtggttcttgagcgcgcagcccatatagaactcatgtgagccgatggtgcagctttcaagacctatgccgaacaccttgctttcaacggagtcgagagtgtatttctcgtcgagcttttcagcgaaaatttcagcgtatgacttagcgagggtttctctcttcttcgctcggtttacgggaatatccttgaatccgtcgggaatccagaggttatttacggatgtctgaccaagctcgcgtccgaaatactcggagattttacgggaggcgataccgtgctctacccagaactttcttacgtcttcgttatcgtttgagagagtgaagccgtcagccgagagcggatgtgagaagaatgtggggttgaagtcaagaccgaagctgttcttcttagcccagtcgacccatgaagcaaaatgctcgggtgctatttcgtttctcggaatctttttaccgtcagcgtcaagatagattgcgtggagagagaatttcttctttccggggatgagtgaggaagcaaactcgaagtcacgtctcagctcgtcaatattgcgtgcctttccggggtagtttcccgtagactggataccgccggttaagtctccgtcctgagcttcaaagccgccgacatcgtctccctgccagcactggatagatacgggtgtgttctttacgctttcaattgcggcgtcaacgtcaactccgtagcgtgaatatatttctcttgcggtttcaagggctttttctgcattcatagtcatagcctttctatcattaaatgatgatatttattcgccgatgagagtgaggaatcttccgtatgcctcatcccatgccgacttattttccgtgcgaggtgcgaaggtctttatttcaaatgaatttgcgataacgcgtcttgcttcccacatatcggatatttctccgagtgtgataagctgcattgcaacgttgccgagagttgtagcttcaacgggacccgcgtaaacggtcttacctgaagcatcggcggcaaactgcgagagcatatcttcctttgttccgccgcctacaatgttgataacttcgtatttcttgcccgtcagttcttcaagcttttcggcagtccaacgatatctgagcgcgagggattcaaaaatgcatctcacgatctgtccgggagtttcgggaacaggctgatttgtctttctgcaatattctcttattctctcgggaaggtttcctgcgggagagaacgcggcgtcgtcgggatttataattgagcggagaggttctgactccttggcaagctctgtcagctcgtcgaaggtgtagctttttccttccctcttccactgacggcgggattcctgctcaagccacagacccatgatatttttgagaagtctgatagttccgaaaacgccgccttcgtttgtgaagtcatatttctcggaaagctcggtgaggacgggtgtatcggtttccgttcccatgagcgaccatgttccgcttgatatgtaaaggaagtcttttttcatggcgggaacggacaaaactgcgcttgcggtatcatgagaagcaaccttcattacggtaagtcccgtgtttcccgtttcttcttcgatggaaggcaggagagtgccgcattttgttcccggctgaactatgggtttaaaaattcttgtcggaatgccgcacttttctatgaggtcgagacaataatctctcttgttcgcgtcaaggagtgtccctgtcgatgctatggtgtactcgcttgtcttttctcccgtgagcatatagtcgaaaaggtcgggcatatggagaaggcactcggcgttttccactatccacggtctgtcacgcatatcggcagtgagctgatacagcgtattgaagttaagcgactgtatgcctgttttcgcgtaaatttccttttttgtggcaaaattcgagaaaacatacggctgaatatcatcggtgcgcttgtctctgtagtggtaaggattggagaggagaacaccagatttgtcgagataaccgtagtccactccccatgtgtcaatacccatcgaaaccgctccgccctcatgagaagccgctaaaatggcagctttaatctcatgcagaagtctcggcgcgtcccagaaaaatcctccgggcatcattacggggtcatttgagaaacggtggatttccctgaggcttattttcgctccgtcgtatgagcaaagcatacctctgccgctcgatgctccgaagtctaccgcgagaatttgtttgtttttcatatcagactcctatttatgaaggtagttagcctatttcggcagtcctcgggatgcagtaacggagattttcaaccgctgccttgaacgctgccgctgctgtaggatatgcgtttgctacggtgcttgtatgtccggcttcttcgaggttttcaagtccggagaacacgcggagatgaggttctattgtaagaatgaagtcgcccttgtgaactctgtttatgactgcgagaagctcgggaatagaaccgacgcccatacctgcgggaactacagtgccgtttttgagcgcgtccttgatatggagataggttatatgggtctttaagagattataagaatactcaaaaggttcgcagccgcactggatgaagtttgcgggatcgaacacacagccgagtctgccgtcgaactcgttcagtatttcaaggcatctttcgggagtgtcgccgtaaatacccttttcgttttcgtgacagagctttacgccgtattcgtcagcgatatcaagcatcttgcccattctgtctattacttcgtttttgtattcgtcgtactttccgtcgggaatgaagaacgagaacacacgaatgcgggatgcgaagagagtatctgccgtttcacaggtgttcttgagcttatcaaggtgaggttcaaagggatccgtaatctttatcttaccgataggagagccgatagcggacacggaaatacccgaggattcgagcttcttatgaacatcggacgcctgaaggggtgtgagatccgatacattgataccgtccacgcctctgagctcagtcattctgattttgcttgtgataagaccctcaatctgttcgtcaagcgagggtgagtattcgtctgaaaaagcgcttaatctgaattttaccataaatccaaactccaattattatatctcattaacattacggcgcaaaaaaactaatgcacccaatttgataaggtaattataccatcaatttacgttttttgcaatcgtttaaaaaataaatttgtgaatcgggaacgatatactgtcgattattgcaagtttttgcatatctccgtatattttttaactttcagtttacaattcgaggactgtaacaccgtagtcgccctctccgaaagcacccgcacggaaggattttattctcttgtcttccttaaagcgcgtccaaagtgcgtttctgagcgctcctgtgcctttgccgtgaattatggttgcggaatgaactccggcaagaatggcgttgtcaatatatctgtccacaacgaaccacgcctcttctcccgtcattccgcggacgtcgcattccagcttgaatgactttgtgacctgtgcgcgggcgatggactgttttttcttctctttcttagcaacactctcggcgtcttcaaggagctttaggtcttttacgttgactctcatcttgaccgcgcccattctgacgtttaccgcgccgttcttgtcgggatcgtcgagaagtattccctgtgtgccgaggttgcggtgaataacggcatcgccttttttgagcgctctcggaaggacgtattcctcgtcatcgacgtaatccgtgatgggattcatcttgtcgtcaaactcgcgcaccttcgagcggatggctttcttcgcttcggctaacttgtcggcttcctgctgcttcttcgcttcctcaagctgtctcatgacgtaatcgcttgtggctctcgcgccgtcaagaagctcctgtgcctttttgcgcattgtctgagcttctttttccgctcccgcaagacgtttttcaagctcagcctcggtctttctgcgctcttcttcaaattcacggcgagctttttccgcgtccgctttttccttttcaagctctatgcgggtcttttcaagcttttctataaccgattcaaagttgcgtgagcctgtgtcgacaaactgttccgcacgatgtactattgtgggagacagtccgagcttttcggatattgcaaatgcgtttgacttaccgggcgtgcctattataagtctgtatgtcgggcagagtgtgtttacgtcgaattcacatgacgcgttgactacatactcggtctcgatggcatacgctttcagctcggcatagtgagttgtagcggcgcagagagttttgctcatgcgggtttcttcaagtatagccatagcgagagccgcaccttcgacagggtctgtgccggaacaaagctcatcgaacagcacgagagacttgtccgtcattttgtctattatatttactatgcccttcatgtgggacgagaatgttgaaagcgactgctcgatgctctgctcgtctccgatatcggaaaatacctcgtcaaagacacctatctttgaagtgtcgtcagccggaatgtgaagccctgcctgagccatgagcgtgaagagtcctatggttttcagcgtgaccgttttaccgcccgtgttcggaccggtgataacgagcattctgtaatctctgccgagggatacggttatcgggaccaccttatccttatcaaggagaggatggcgcgctctgtacagttctacgagaggtctgtctactatctgaggtgcggcggcgttcatcttataggaaagctctgcgcaggtgaaaataaacgcaagctcggttatattgaggtagtcgagtgtgagagaattgcctgacaccgctactcccgccgaaagatcacggatgatgcgctcgatttcgtgctcttccttgctttcaagctcgcggagttcattgttagcctcgactaccgccataggctcgatgaaaagcgtagcaccggaggatgacgtgtcgtggataagacccttgacctcgtttctgtattccgctttaacggggattacaaatcttccgccgcgggttgttacgatattctcttgcaggtacttcgactgaccggagacgtatttctgtaaaagctcttttatcttgttgtcggtcgcgcgcttttttcttcttatttcgccgagctcgtggcttgcttcatctgctacaaagtcgtctgcaagaatggagcgcgtgattttttcttcaaggctgcggttcgggataagtctttcaaatatttcgccgagtgaggtctgcggagttttctctccctgaacgtagtcaagaagctgtctcgcggtcttaaatacggcggcgcagtcgagaagctcacggagagacagcatggcgtccttttcggctctctcaacgctcggacgtatgtcttttactctgccgaaggagggtgttcccttcagtccgatgagagtctttgcgtccgttgtatgctgctgtctcagacgcaccttttcgatatccgacgacggagtgagattgtgcgccatttcagccgagccttctgttggggcaagctccgcaagcagctcggttattttatcaaattcaagtgtatacagtgctttagagttcattttttcctctgttattcttcaaatcttcattgtcaggtcgttgtcctaattttcttgtaatattccagtgatgtaaagccgtgctcgagatggtttaaaagatacctctcgcaaactacggaaaaaagtgatgtttcggttttgtcaagcgtgaacgaaagaaactttttcatgggagcggactcgatatatctgagcgcggacaggactgcgggagagagccgtatcattatcttagccgatgtgtcgtcacgtatgaattcgggagtattttcaagctccgcgcggcattttttgcacagaatccgcccgttcattacgtcaagcacagagtccccgcttatctcatccccgcacattccgcaaaacgacaaatccggcataaatccctcggaaacagccgcacggaactcgaacgctcctttgattatatcaagcgggatattcatgttggcggtcgcgtacagagtgttcagcacaagggagagaagctcgtcgtctcctatacccacaagcgcaaggtcatgagccacatcgcatacataattcgcgagagacagcttttctatgtcatagcggatgttcatgaacgattctatcagaaaggtgtcgactatataatagtattcaccgcgctttttgagctgaaacgtgctgtaggtaaacagctgagcggaggcggcatacttattctttatgcttgtcaagcccttgccggatatggtgataagcccttcttccgctgtgagcagagttatgagcttatccttttctccgactttgacctctcgtatgacaagaccgtcaagctccgtgaagttttcgctcatatgttacatattctgttccggcttgaatccgaagctgttcagtgaaagctggtcgtcgcgccacttttccttgacctttacccacagattgaggtatacctttgtgccgaagaacgcttccatgtcctcacgtgcgtatgtgcctattttcttgagcgtttctccgtttttgccgacgattattcccttgtgagactgtttttcgcagtatatctccgcgcggatgcgtatcattttgtcgtcctcgtcgaactgctcgataactacagcagtaccgtggggaatttcgtccgagagggtgcgcaggagcttttcacggattatttccgcggcaatctgtctctccggctggtctgtcagactgtcctcgtcaaacatccactcgccctcgtaaaggaacttttccgcctcgtcaagcacgtcgctcacattcttaccagtctcggcacaggttggaacaacggcgtcaaaatcgtgaagcgcggcgtagtttgctatggtttcggcgagcttttcacggttcacgaggtctatcttgttcagcacaaggattgacggaagctcggatttctttatctggtttatgagattcttctcaatttccccggcgggatatccggcttctgcgatgagaatgaccgcgtctgccgagcctacggaagagcgaacggttttcatcatgaattcgccgagcttgtttttcgcgtggtgtactccgggtgtgtcgaggaatacgtactggtcctcgccttttgtgagtatgcctgcgatacggtttcttgtggtctgcggcttaggggacactatcgctactttttcgccgagaagatgattcataagggtgcttttgcctacgttcggtcttccgactattgctataaatgctgttctcatatttttctccgtttatctgttctgttttacttcaagtccgagttttttcattacaactctctggtgttcgcgcatttccgtttcttcctcttcggagttgacgtggtcgtatccgagaaggtgcagaaccgaatgtaccgtcagaaacgcgcactccctctcgtagctgtgaccgaattcctccgcctgctctctcgccctctcaagcgaaagaacaatgtcgcccagctcgaatatctccccttcaaatggcatatctccgttctttatgtcgtacatcgggaaggatagcacgtcggtagacgaatcaatgccgcggaattcacgatttttctcacgtatctgctcgttgtcggtaaacgtgacagaaaccgtgcagtcgtagccgaaattctcgcattcaagcgcggcttttaccgccttttttatgagacgacgcagaccgaatccggctttttctttattctgttcgtttgtgaaaattatttttactttcattttctcgtgtcgcggtgctgtgcgtgatactgtaccttctcgcgcttctcctccgttttgacctttctgtctctgtcgtatttgtcgtatgccatgattattttctgcacaagtctgtgtcttacaacgtccttttcggtgaattcatgtaccgcgatgtcgtcaatattcttcagaatctgaaccgctatcgaaagtccgctctttgttcccctcggcaggtctgtctgtgtaaggtcgcccgttaccactatttttgagccgttgccgagtcgcgtgaggaacattttcatctgctcgggcgttgtgttctgcgcttcatcgaggattatgaacgagtcgttaagcgtgcgccctctcatataagcgagcggtgctatttctatcgtcattttctcgatgagcttagcgcatgattccgctcccatcatctcgtagagcgcgtcgtaaagaggtctgaggtaggggtctatcttgctctgtaagtctccgggaaggaatccgagacgctctcccgcttcgacagccggacgagtgaggattattctcgacacctcgtgcgctctgagagactttaccgccgcagccaccgcgagatacgtcttaccagttccggcaggtcccgctcctatgacgatggtgttcttctttatcgcgtcaaggtattttttctgaccgacagtctttgccttaaccggctttcccttagccgttacgaaaaagcagtcctcgtcaaaatccgaaagttcgttctgtctgccgtccttcaccatggatattgtataatctacgctttggtcggtcagctcatcccctatcgtcactatctttttaagatacgacaaggtctcgtgtgcaagggtaactccgggttcttctccttcgacaacaatagtatcgccgtcgtcgttctgattttgtatgttatatatgcggacggaaaactcctcttctattcttcctatgtttttatcaaagtttccgaatattctcgaggtcatttccgatgtctgtgtattcagtttttttgtcgccatattatctccgatgaattagatgaattatatgttattgattttgtaccgtaaattccgacgttaccgcagtgttccgcctgagataaagcatacattcaatcgtataaacaccgtcttcaaattttgaatgtatttccttgtattcaagctccgcgccggtcgtgagtcttttaatttttctgttgagtgaaagcatagcctcttcgcttgctctctccgcgcttatctgttcattttcgctcacatactccctgctgacggttttctctatccacaccggaatctcgcacagtccgagagggcataatttatccatcgtacttattgtatcacaaacaccgtactcaattccaccctttatgaaaagatttatcatttttttaaaaattttcactcggaatcttgttttctcgcgtcccgtgtacgcttttttttcgcgattcacattgactttttcgcatattgaagtcgcagtcctgcatattacctcaccctccgcgtattcgtatcggaactccccgtcctttccctcaaccactcccgatatcagcacctgctcctttcgcacaagctgaccgggaaacaccgccgcctgaccttcgattacgttgacttcttccaccacaccgtcgcaatcggctactatgttcgcgtatgtaccgttttcatgctttttgcgctcgtttctgtacagttcccgaacttgtacctctgccacactgccgttcatgaacacgctgagccatgctatatcgtgctgcattgccgcgtagtctgcgtgaagcttgttgaagtttatttttgtgtacctgtcacctattccgcatccgaggtcggcgagcatttccgttatctcatccgtgtctgttttcgtgttgccctctaccctcacgtcccatataagctgggaagaatagctcatccacaagtaaaacataagcattcccacagctaccatagggcgtgtaagtacgaatcccgcgacatacggcagtccgtgaacctccgataccgcgcaacattcaaggcattcgcacacctctttgtattcccgctcactgatgttaaactcaatgccgtcggataaccttttttcgccgtcaaaggatatgccttttctgtacagactgtcgaacaccttggcggagctttcgtttgacacacatacacgccgccatcccgtgaaaaatcttcttatgggcttaaacattctatagttactcctctccgcagccgaacgacgccgattttatgtttcccttaacatacagcaccttatcgcggaagtccgacagcataaggcagtttcccgtcaccgtaaacttatcttttcctgccgatagaactattttttcatccgtatattcgagtataccgtcgcagcccgttatctccatctcgttgtcgccgcacatatgaaatatcggaacagagcttagcgactcctgaggcatttcaaggagctgcgacagtccctcgtacagatgctttctcctcttgaacggtctttttttcagcaatattactccctcccgaacatatattgttacggtaatgattatgctgaagctgaaatattatgatttcgggagtgtatattatgaaatcgaaaatactctcttccctggctgccatactgctcgggcttatgcttgtgttcctgctcgttttctccgacaaagcaacggacgcggcaagaaacgcactgcatatctcctctgtgagcgttattccgtcgctgtttacatatatcgtgctgtgcggcgtgataacaaagcttgacctgctttccccgctcggcagacttatcccggctgagaagctgttcggactgccggaatgcacctcgccggttatacttatgggacttgtctgcggctttcccgtcggagcgtcatgcactgccgatttatattccgtcggagcgatatcgaaaagtgatgcacagcgtcttaccgcaatttcttcgtgcgcttctcccgcgtttctcgtctcttccgtcgggttctggtggggagacaagagattcggcaccgcactgtatatctgctcggttctgactgtgctcttatacggcgttttcacaaggaagcacggcattagcaaaaataatactacttcaaccgtgcaaaaggaaaaaataccgatagcggaagccgtatgctcatccgtgtcctccgccgcgctgtcttcgctgaatattacggcctacatcacgtttttcagcgtaatacgtgcgcttctcgtaaaacttctgccatcgcaaaggctaataatatccgcgcttctcgagttctcgggcggtgcttacacgggagctttgagcggcggatatgcgggagcggctgtcactggttttgcggtaggctttgcgtctctctccgtttttatgcagactttattctttacctcgcgcgtcggtatcgggatgaagcatttcttcgtctcaaagctcatctgcggctttacttctgctctcaccgcgctcctatattttcgctttttcccgatggagggctgtgcgaaggatgtgttttattccgtgtcaagcctcaatgacgtgatatcggctatttttgtcccgacaattctatacatatcttgtatatttgtgagtaaaatcaataagttttgcgtgaagtcttgattttcaggggaatattttatataatagtatgggaataaatgcattttgaatagtgagcagatgatgatttagaatgaaaaacaagcatgacatcgaaaaatactgcaaatactgcgaaaaagccagcgctctgcatgactccgacactatgctgtgcgagaaaaaaggtattgtaaacgcctcgcagaagtgccgctcatttcgctatgacccgctgaagagagagccgaaaataaaaaaatccccggacgctctcgaatacgtggaagtctgacgcaagctaagttttaaaagaaaagaaaatattgttttggaggaataaacccttgataatcgcacttgaagaagctaaatacaaacttgagaatttccgtaaggatgttgcggagctcggctctgccctcagaatcgacgacctcagaaataaggctgcggagcttgacaaaatcacatccgaccccgaattctggaacaaccaggaaaactccggcaaggttttaaaggaagtcaagagaataaaagaaaaaattacaaaatacgaagcgcttgagaacaagcttgaggacacaatcacccttgccgagcttgcaatagaggaaaacgacgagtctcttgtaggtgaagtcgaagcggacgtgaaggctatcgaagaggaagaagaaaaacagcgcattgagatacttctctccggtgaatacgaccagaacaacgctatcgtgtcattccatcccggagccggcggaacagaagctcaggactgggcgcagatgctctaccgtatgtacactcgctggggtgaaagacacggatacaacgttaagctcatcgactggctcgacggcgaagaagcgggacttaaatccgccaccatactcatcgaaggcgaaaacgcttacggatatctcaaaggagaaaacggagttcaccgccttgtcagagtatctccttttgacgcgtccggcagacgtcacacctctttcgcttccgttgaagtaatgcccgaatttgacgatgacaacagcattgagataaaggatgaggatcttgaaattacggctcaccgttcatcaggtgcaggcggacagcacatcaacaagaccgactccgctatcagaattacgcatattccgacgggtattgtcgtaggatgccagacagagcgaagccagctccagaacaaggaaaccgcaatgaagatgctgaaatccaagctcatggagataaagcagagagaaaagctcgaaaagatagaggacatcaagggcgtcaagacaaacatcgagtggggcgcgcagattcgttcatacgtattcatgccgtacacacttgctaaggacacaagaacaggctacgaggacggcaatattcaggctgtaatggacggtgaaatcgacggattcatcaacgcatacctcaagatgaacgccgcccgcgactgattattaaatgaaaaaagaagaatcacgcttcagcgactcgtgtattttcgagggaatgacctcaatccgcgccgtgatatccgccggtgagaacggaatcagcgacagaaggatagaaaagctcctcatcgacaaaggcaagcagaaaagcaaggcgaaggagattggctggctcaagttcaaatccggcgaaatgagcttcggcatagaatttgttgaagcggaagagcttgacaagctgacgacgggaagcacgcacggcggtataatcgcgctatgctcaggcagaactattccgtccctcggagacagtgagattaaagcggacggcttttacgcacttctcgagggaattgaagacccgtacaatttcggatacgcaatacgctctctctatgcctgcggtgtggacggaattgtgctttcccccagaaactggctcagtgcggcgggagtggtttgtcgttcttcggcaggaacatcggaaatgctcccttgttttatcagtgacggagtgggggcagcaagatatttcaaaagccgcggttacaaggtagtctgcgccggaatacgcgactcggtttcctcgttcgactgcgacatgacgcgacccgtgttccttattgtcggcggtgagaaaagaggtatttcctccgctcttcttgacgaggctgactgcattgtgagaatcgactacgacaggcagttcggaggttcactctcggcggcatccgctgcgtcaatgcttgcttacgagataatgaagcagaacaaaagaggcagataatggaagttttaaagacaggcgatgttatcggtatcgtgtctccgtcgcatgttgcggtgaagaatgactacgatatcttcaaaaaaggacttgaaaacctcggacttcgggtaaagtatgcggacaacctctttcatcgggatgagcttggattcacggcaagtctcgaagacagagtaagcgacttcaactcaatgatacgcgacccggaggtcagaatggttctgttcggcggcggactcggagcggttgacattgttccctacattgactacgacggaataaaggcagatccgaagtattttctcagctacagcgacggcacatccatactgaacgcaatatacgcgaacaccggaataccggctttctacggtcagtctccgggagagttcggcaatgtcagcgagtacgacaaaatgcagttcgtgtcgaatttcttagatggaaacgtacacgaatttaagaagaacagcgaatggactatgataaacgcgggaaaatgcacgggcaggctcatcggcggatattcggtgaatttcgctcttaccctcggaagcagattttacccgtattccatggacgacgactacattcttttaatcgaggaatgcgatatgttccagtcggtcagaagcttctcaacctatcttaacgcaatatcgcagaataaaataatggacaaggttcgcggagtgctgttcgggtactattcctcaaacataccgagcgagctgttccctatgcttgaaagattcgcaaaacgaaacaacatagccgccgcttactgtgaggactacggtcacggaagaaatcacgctgtgctccctctcggaaagactgcggagcttgacacggctgcgaaaactctcatgtttatctgaatactaaaaaaatgggcaggactgcgtttagtcttacccattttttgtttagttgagagcggctgttttaccgtagcttattgttctgtagtatgcttttgacgtgatgaggtacactgcgatatagaacaccgcaaagaccgcgtagcatatgagcgtggtatagaagaatgccgagcctgccgccgctaccataactctcagtatgagctttatcatgttgtaggcgaacgctatgtggactcccgctgctatgagaggtgcgaagaatacggtaagtatctgtgaattgatgctcttctttatctcgcgctccgtcattccgacttttttcattatctcgtatctctccgcgtcctcgtagccttccgttacctgcttgtagtacattatgaggactgtgccggagatgaacacaagacctaggattatcgcaaggaagaatagtccgccgtatgtcgctacctgataattgaagtcgtttacgtatgtgtcagtgtatactgtcgacaaagtccagtccgtgttttcggcggtatttccgtcaagccatatttgtcttatatcagagcagagctgatccagtgtttcgtcgtcgcagtctgaaacgtcccatccgatatacctgttcacgtagcacttttcgccatcactgacatttttgacctgtctgtataagtcggcggcgctgtcgtttgtgaagactaatatttgcggtattgagtttgaaaacagtgtcgcgaggaaggtgaagtttccgtttgtgggtttaacctccttcacactgagctttacgtcgtttatttcgaatgtgtcaaagctatattcgcagtcgtatgtgagtatcagcgcttctccgtcgccgagtgaaattttctcgcctgtgaggtttgtgtcgttatacgcgtctattgagaagaagttcagctgaacgggatttacctcgctgcttgcttctcccgtgcggaaaactcccgtgtttttgtcttcaacgtatgcgttccatgtgttatattcaacctcacgctcgattttaacgcctaagttatcggctttcttatgcatttcggcttcaaacacagcgcattcctcttcggtgctattgctcagtcctatcattgttgtgacgtccatggggtatctcagctgtgaagtcttctcaactcccgcgaacatacaaaccgttgtggaaagcattacgagaaccattgtggagaggatgcatattgacgcaagtcccgctccgttgcgcttcattctgtacgtcatgccggagacggaaacaaaatgagagggtttgtagtagtacgctttgttcttcttcagtaccttagcaagtgcgacgcttccggcaatgaacagggcgtatgttccgactataacgaatatcaccgccacaaagaacagagatattgcagaatacgcctgctgtacgagctgagagagagcatatcccaccccgaggaacaccacgccgataacagccatgatgtagtttgctttcggctctttctcgcccttgtttgaggaatggagcaggtcgatggtattggtgaaggttatctgtctgatggaatcgaagaatatgaccgcgaatatcacgatgaacacaagcacagtcatgagcatatccttgaggtttacggaaaagtcaaggggagccgcagatacgccaagtatatggaacagaactccctgtgcgagtttggagagaagcagaccgaggacaagaccaacggcaatgcttgtaaagtcaacgattatgttttcccacagcatgacgagagaaatattcttcttgcccatgcctagcacgctcatcagtccgaactcacgcttgcgccttttcgttatgaagctgttggtgtagaacaggaacagtgcggagaaaatcatgatgatgtacacgccgagctttaacagtccctgcaatgtcgcgccgcccgcaaattttttcgctatcatggggtcatttgcaaggaagctgacgacgtacattatcataaccatgcagatggaagtcagaatatatggaaaatagatcttgcggttgtttttgatgttggttttcgctatcttgaaatagaagctcgcgttcatttatctgccctccccgctgtttatgccgtcggaaggtgttccggtttggagcattgtcagggtatccgatatcttgcggtacatttcctcgttgttcatgccgcctctgtagagctgatggaacacctcgccgtctttgataaagagaactcgtccagcgtggcttgcggcttttacggagtgcgttaccatgatgatagtctgtccgtctcggtttatatcggagaaaatgcggagcaggtcgtcggttgagcgtgagtccagtgcgcctgtcggttcgtccgcgaggataagcatgggctttgtgataagagctcttgcgactgcggctctctgcttctgtcctcccgaaacctcgtaggggaacttatcaagcagcgttgctataccgagctttttcgcgataggttcaagtctttcctccatttccttgtatttgtgtcctgaaagaacgagggggagaaagatattatctctcagcgagaatgtgtcgagaagattgaagtcctggaacacaaatccgaggttgtcgcggcggaactctgccattttttcttccttgaccgaggaaagcagtcgtccgtcaagtcttatctcacccgttgtaggcttgtcgagcgccgccattatgttaagcagtgttgtcttacccgagccggattcacccattatcgctacgtattcgcctttttcaactccgaacgatacgcttttcagagcttctacacggttgccgccgaatcttgtgacataaaccttgcttatgttatttacttcaagaattgtcatgttaattaccgtccttttttgtttacggcattattataccaaaggcggaaacgctcagccataatttcagcttacattttccgccccgtatcttacaaaaacgtaaggtttagttttctttttaatcttctctttatttttctcattcgggtagactcaatcgttcgggtcgatttcactgcgcgagaagtcaacggtaaacgtactgccctctccctgttccgactccaccgacaaggaatatcccatctcggagcacactcttctgataagataaagtccgatgcccgacgacgcgccgcttgttctgccgtttattccggtaaagcctttttcaaatatgcgtgggatgtcctcttttgctatgccgattccagtgtcagatacagaaaccactccgttctgcacgtttatctttatcccgccgcggtttgtatatttcaaggcgttcgacaaaagctgctcaaggatgaaagatatccacttttcgtccccaagcaccttctctgaactgtcctcaaacgatatcgtcagcttttttctgataaacatacccgaatacttgcgaattacgctttttattacgctgtcaagtgacacttctcggaaaacgtagtcggtcgagctgctgtccagtctaacatacgccattatcatgtcagtgtactgctcgattcgcgtaagctccgctccgacatcacggcgtgttctgtcctcggcttccgcaagtatcaaatgtatcgcggatatcggaaccttcacctgatgcgcccatgcggtatagtagttctcggctgttttcagcttttcttcggcttcacgctcacgctttttcatctcagtgaacatggagcacactatctcatgccattcacgctcggcgccggatttttccctcggcagtctttcgcaggcggtatcatagtcgccgattatgccttcaagctgttttacacggcttttgaaagaataatatcctatgaaaaacggcactgttgcaatcgcggcgcacagcacaagagaatatgccacggctctgatatcgtagctccacagtacgcatatcacggaaaagacagccgccgtcacaagacacatgactatgtttacggctatgctttttatgtatctgaaaaaaatattattacgccagctcatatccgagtccctttttggtcacgatgaatccgacaagtccggctgaatcgagctttttccgcagtctcgccacgttgacgctgagcgtgttttcgtcaatgaagctgtccgtctcccagagcttttccattagtgtgtcgcggctcacgattccatccgcctgcatcagagtttgaagtatacgcagctcgtttttcgtcagttctattctctcatcattatataaaagcgcagccgattccgtatcaagctccgccccgccgtgagtcagcttaacgttcgccgcggtatagttgtaggtcctgcgcagaactgcctgtaccttcgcgcacagcacctcaaggttaaacggcttcgcgataaagtcgtccgctcccatattcattgcaagaaccatattcatgctgtcggaagcggaggatatcacgataatcggcacatttgaggtttttctaatctcctgacaccagtgatatccgttataaaaaggaagcatcaggtcaatcagcacaagatgcggagaaaactcgtcgaattcctttttcacgttaaagaagtcttcaaccgtgtatacgtcaaatccccatttttcgatatgcttagccgtcgcactgcttatgacctcgtcgtcctcgactatcattattctgtatatcatatttctatccaatcgcattatttaacataacaaagtttatcacatcttaaacttcaagtcaataaacgtgctgattttttaatgaacacaaaaaaactgcagcttttgttactgcggaagattatttacaggctgcaaagggacgagagcttatccggtgtgtcaaattccgtttcatgagcaagagcggcggcgcacaggtagtaatttgaggtttcaaccatcttgaatatatccgaggcgacgtccgacagttcatcaaacgagccgtcgttcatcatggctgcggcacatactttcagaaccgcgtacagtgtcacaagcgatacggcagaagaataaacgtcaagtccgcttccgtagcccgagataaacggaaatcccatataaaacacgtgattcacaaacagctgctcgagcattacgtcaaaatcagggtgagattcgcggaacttcttttctttctcttcgtattcggcgaatgtaatattatccacgctttcggtatatttatcaagcgggaaacgttcgccgagacgggagaagatatgctttaccgcgtttagtgcgtctttgtcgggggatgaatatatattcggctcaaatgggtgggtgcaagattctattgccgcttcaagctcggtttcagactgctttttcacgggttcggatatggcttgcgcggcttttatgagcttttgcaggcgggaggtgaatgggatagttctgtcttgcatcacatcgaaaagcacgtctcttatcctgccgtacactcttgtgacaaagctgtcgaccgcctcgggaagctcgtacttgaattcaagctctaccggcttaaaggtcattttctcgcggcgtttcatcagctgttcgcaaacttcttcgcatgatgcggacatcgagcattcggatgcgtgcagagtcttcggacttctgggataatacctgcaaactgacggcagaacatcctctccgcattcgcattgtatggtgcaaagaccgtcgtcaccgtgcattttgcagtcccctatgtagtttttcgcaaactcggcgtatctttcgcttttcggcatatcgagcatatacaccccgccgtcaagccttctgcgcagctcgggagaacagtcaagtcctataagcgcgtagtactccttcatagtaagggtaatgtgccatccgtgacagcaggtttttcggcatgctccggctttacactgaaattcagtataaatatccggaacggtgaatattcttttgctcatataatataccgcagctttcggtaaaaattttcggtggaattatacacccattttttacctatgtcaagcgcatatttatcgttttttccgccaaaatttaaacttactttttttaccttttactacattttatgttatttcgcgtatttcaaaaaataaaaaagcaatcccgaaaccgtttttgtctccgagactgcttttgctgcttatttttcgcttataccgtaagcttttcttccgttttttcggatctatcactcacgtttttatatacaactcttccctcttccgccgtgcattcgatttcgtctccggcttttatttttcctttgagcatttcttcgctgaacgagtcttcgatttttctgacaatcgcgcgtctgagaggtcttgctccgtatatggggtcaaagccttcttttgcgaggaatgatatcaccttgtcgtcgaaggttatctcaatgccgagggattcgatcctcttctttacctcgccgagcattattcccgtta

SEQ ID NO: 3231 - DNA, 20695 bp, Unknown
  16S sequences of unknown bacteria
ataaatttttcataatcttctccttcaaaagcgctgtcggcccgttcgtccttgttataataatcaaaaagatatgcggcggtttgttcggcgtctctcatttcggtgtatagataatacatacgccgtttaagcgaggttctctcctgctcggtttgggcctttttcagcattattttcagctcgcaaagccttgcctttaatctgtccgcttcctttatgtattcatacgacaactgttcaagagtcatttttcaaacctcctaatcacacataatgtgttttgttttcctttaaaagcttgttgcaacggcttctatgttttaagtatatacaacatttcgtgtgatttcaaggggactttaatcgaattttgtcgctaatcgtgtgatattataattaaatactataaattggatttagcttgagtttgcggcggaattttcttgaaagcggcgtttttgtgtgatataatgtcaacggaaaacagcgaacatgagaaaaactttaaaaaaagaggcttttgccgccgacaaaagccaaaagggaaaaaggtgtagaacgtgtttggagataaacttaaaaagctgaggaaaagcaagcggctgacccagggcgagcttgcctcttttctcggaataagcgccagcgcggtgggaatgtatgaacaaaaccgtcgaagtccttcgatttccgacgttaccgccattgccgattttttctcggtcaccaccgattatcttcttgaggaggacaaaaaggagcgtgacgtaagcgagcttattgccgagcttaaaaaccgcttgctctgtgccgacgggcttatgtttaagggagaggccctgaccgacaaagagctgaaacagctgtccgacgcgattgaggtcagcgccgcggtcgtactttcccaaaaagagaggcaaagcgatgaaaaaaattaaagccctcgccgaagggctttacgaaaaatacggcagctgcgacccattcagactttgcggcgagctttcggtgaatattttcaaatctccccttccgagctctgtcagcgggttttactacaatgtcgacgggcgaagtgttattatcgtcaacgaggcattaaaaccgcctaaagactcctttgtggccgcacacgagctggggcacgcgcttcttcacccaaatacaaactcgtttttcatgaaaacaaaaaccgcccttgaaaccggacggtttgaacggcaggccgactattttgccgcctgtctgctgctttgcaaatggaaagagtcggctgaattttccgatttgtccatcgactcgctgtcctcggtaaccggaatcgaccccgccgcgcttgaggcctataagcgcgagctttaaaaagcccgataaatacaaactaaaaaaagcctgcccgatttttcggacaggcttttaactttaagccatattcttacatcaggtggaagttaaccacaagtcccgcaaagacgatggaaaccaccgaaagaagcttgatgagaatgttgattgcagggccggaggtatccttaaagggatcgcccacggtgtcgcccacaacggcggccttgtggcaatcgctgccctttccgccgaagttgcccgcctcgatatatttcttggcattatcccatgcgccgccggaattgctcatgaatattgcaatgaggaatccggtaaccgttgcgccggcgagaagtccgatgactccgttgggtccgagaatgagtcccacaagaacgggaaccacaatggcgataaccgaaggaagaaccatttcgtgaagtgaggaacgggtgcaaagatcgacgcaggtcttatagtcgggctcggcctttccgtccataatgccgacgatttccttgaactgacggcggacttccttaacaatgctctgtgcagccttgcccaccgactccatggtgagagcggcgaaaacaaagggcaggcaggcgccgatcataagaccgacaagcacggagggttccataacgctgaggtttattccttcaaagcccttaacaccgagctggtcgatgtaggacgcaataagcgcgagggcggtaagtgccgcagagcctattgcaaagcccttaccggtggcggcggtggtatttccgagggaatcgagggcgtcggtacgctctctgacctcgggatcgagtcccgccatttcggcgataccgcctgcgttatcggcaacagggccgtaggcgtcggtggcaagggttatgccgagggtggaaagcattcccacggcggcaagcgccacgccgtagaggccgagatttccggcaccctccgcaaagccgccggcgaaataatatgcggcgagaatggcggcgccgacaatgatgatgggcacggcggtggaaagcattccgagaccgattccgccgatgataatggtggcagagccggtttccgactgggctgcaagctttttggtgggcttatagctgtcggaggtgaaatattcggttgcgagaccgataagcactccggcaagaagtcccgaaagaatggagaaataaattttaaaatgctcctgtccgagcacgaaccaaacaatggggaatgcggcgattgccacaagcaccgaagccatgttggttccgcggcgaagagccgaaagcagggtcttttgattggtgtcctctttggtgcggacaaggaaggttccgagcatggagcagatgattcccacggcggcgatgagcagcggaacgataaccgctcttgtcatcatctcggttccgacgcttctgaaggcggcggttgcgagagcgcagcaggaaactatagagccgaaataggactcgtagaggtcggcgcccatgccggccacgtcgcccacgttgtcgcccacgttgtcggcgataacggcggggttgcgggggtcgtcctcgggaattccggcctcaaccttacccacaaggtcggcacccacgtcggcggccttggtgaaaattccgccgcccacacgggcaaagagagccataaaggaagctcccattccgaacattaccatggcgttggtgatgtcgtcaattccgagcttaaatacaaatttgagaagaacgaaccaaaccgaaatgtcaaaaaggccgagagccacaacggtgaagcccatgaccgaaccggccgaaaaggccaccttgagtcccttgttaagagagctctgacatgcgtttgctgttcttgcgtttgaggaagtggctatcttcattccgacaaatccggcaagagccgaataaattccgccggtcaggaaagcgaagggcacaaagggagaaagattccccgtgattgccatcactccgaggatgagcgccacgaccacaaagatgatcgctacaacggtgtattgcctctttaaaaacgcgtttgctcccgagcggatggacgccgaaagctttgccatgcggtcgttgccctcggaaaaaccgaagacctttttggccgtgagagccacaaagacaagcgcaacaagcgcaaccgcaagagtcaaaagaggaaaatactgttctaacattgccatatttttgcctccacatcttttggcgaaattaacattatcacacgaattcatgttaatttcacatggtttaacaaacacattatatccaattaacacatatttttcaatccccaaaggtcaaaaaaatccaaaaaaaatgaaaaaagggaatatcaataaagatactcccttaaacggtctttgacctgttattttgatacaaagcaagtcttatcgatatattgcttatcgataacagtaatctcgcgtttgtttatcaatacattccgccgcccgctgcagctgctgcggctgcagctgcgtttgcggccgctgcgtcttccttcttttcggcgatgagcgactcggtggtcagcaccattgcggcaacggaagaagcgttctgaatggccgaacgcgtaaccttggtaggatcgacgatacccgatttcatcaggtcgacatactcctccttcttggcgtcaaagccatagttgattcccttgtgggaacgaacctcgttgacaatgacagagccttcgagaccggcatttgcggcaatctgacgcatgggctcctcaagcactctgacaacgattttggcgccggttttttcgtcgccctcgagggtgtcgctgaaagcctcaactgcgggaatggcgtccacaagagccacgccgccgccggcaacaatgccctcttcaacggctgccttggttgccgcgagagcatcctcgattctgagcttcttatccttcatttcaacctcggtggccgcgccgaccttgataacggctacgccgcccgaaagcttggcaagacgctcctgaagcttttcacggtcgaaatcggaggtagtgccttcgatttgattgcggatctgaccgatacggtctttaatggcggtcttctttcccgcaccgtccacaatgatggtgttttccttggaaatcgtgacctgacgggcggtaccgagctgtgcaacggtggcgtccttaaggtcgagaccaagctcctcggtgatgacttcgccgccggtgagtatggcgatgtcgcggagcatttcctttcttctgtcgccgaaaccgggagccttaacgcaaacgcaggtgaaggttccgcggagcttgttgacgagaatggtggaaagagcctcgccctcaacgtcctcggcgatgatgagcagtttcttgccggcctttacgatttgctcgagcaggggcaggatgtcctgaatgttgctgatctttttatcggtgatgagaatgtagggctcgtcaagctctgcaaccattttgtcggaatcggtgaccatgtagggggaaatatatccgcggtcgaattccatgccttccacgacctcgctgtaggtctcggcagtcttggactcctcaatggtgataacgccgtcggaggtaaccttttccatagcctcggcgatgagggttccgatatattcgtcggcggccgaaacgctggctacacgggcgatgtccttggtgcccgaaaccttcttggagttcttggtgacctccttaacggtctcgtcaacggccttctgaataccctttttaacgtccatggggttggcgcctgcggcaacgttcttcatgccctctctgataagagcctgagcaaggagagttgcggtggtggtgccgtcgccggccacgtcgttggtcttggtggcgacctctttaacaagctgtgcgcccatgttttcaaagggatcgtcaagctcgacttcctttgcgatggtcacgccgtcgttggtgataaggggagcgccgtatttcttgtcgataacaacgtttctgcctttgggtccgagggtaactttaacggtgttggaaagctgatcaacacccgactggagagcctttctggcttcttctccgaaaagaatatcttttgccattataaatcaacctttctcttacttattcaacaattgccaaaatatcgttctgacgaacaatgatataatcctctccgtcaaccttaacttcggttccggaatatttgcttgtcagcacgtgatcgccttttttaacatacattttaacttccttgccgtcgacggtgccgccggggccgaccgcgataacttcggcaacctggggcttttcctttgccgagcccgaaagaatgattccgctcttggtggtttcttctgcttcgaccattttgataacaacacggtcggaaaggggtttgatcttcataatatattcctcctaaatgtaataagtaaacacttttagcactcttttcctccgagtgctaattcattgtagcaccttttgtcgcaaagtcaagaggttttaaaaaattgtttacaaatatgggaacaaaaaaagccttcggttgcataaacccatgcaactaaaggcgaaaaatttaaatttcatattcaagaattttgtattcggccagtcccgtgtcctcatagaacatatctttttcggcgacaaaccgaaatccgcagccggtgtaaagcctctcggcggcaaattcacccgaacgaaactttttatattctcaccgtgtcagctcccgtaattgaccgaaattccgttgcgttcgaacaccgaaacaagattttgcatatcgccctcggacagctcaagatatttgcaggtcatggtattgagcgaataaagctgaatataatttgagccgtcattggcgggataggcctttatctgttcgtcatatttggtggtataggttatgagcgccataccgaaaatgtggctttcggggatggaatcaagctttttgcccttgacaagggttataaaatcgttgaactgctgtccgctttcggaatcgagcgtgacctcggtgtcgtcgccgccgatctcggttcccggacccgaaagcttgaccgacacaacgtttttaagcagaaaattcgacgatttgctgctttcagagtatgtgtcggtggagcaggccgtaagcgacagcacgaccgcaagaaccgcaattatacagataaattttttcatgaatttttctccctttccactatttcaaaagcaagcctttcaagctgagaaatttcggttataccgaaaaccttttttctgatttcggcagcgccctttataccctttatataccacgcagcctgctttctcatctgcaggcaggcaattttgggttccttatattcgcacatgagccttgcctgcctgagcataaatctcatcctttcggcaacggggggctcgggcagcagccttccttcgctcaagtatgcgttgacggccgaaaaaatccaaggcgaacccatggctcccctgccgatcattatcatgtcgcagccggtatgctcatacatccgcgcggcgtccttcggagtgaaaacatcgccgtttccgacgacgggaatcgacaccgcctttttcacggcggcaatggcgtcgagatcaacgggcggagcatattgctgctcccttgtgcgtccgtgaacggttatcatggaaattcccgcctgttcaagtctttttgcaagctcgacggccaccatgctttcaccgttccagcctattctgattttggccgaaacgggaacatcggacgcctcgatcaccgcccttgcaacccgctcggcaaggggaagatccttcaaaagaccgctccctccgccgtgattagcgaccttcggggcgggacagcccatatttatatctataaaatccggccgatattccatggcctttcgcgccgcagcagccataacaacggggtcgtttccgaaaagctgacttgccgtggggcgttccctttcgcccacaaaaagcagctcggccgactttttatcgttcatggaaatgcccttggccgaggcgagctcaccgacgcagaaggcggcgccgcaatccgtgcagatttctctcatggcgcggtcggcaactcccgccatgggcgcaagtgccgcatagccctttatttccaagtttcctatcttcaaaaaatcattcccgaaatttattaaatatatattaccacaaaccgatttaaaaagaaatatttttttgttaaaggaatgtaaacaaggaaaatttcatatatattcctcgtggaaaagcaaagtaaaaaaggaatcggtgaaaagctatgaataaattttatcccgagggcgttctgttttcccgcccggaaaaccaaaaagcaataaaagaccccgttattttttcggaagcggtaaaaagcggaagaattctcgaggcaagagcctctctttgcgattttaaacatgacctttacgtggatatgcccgcaatgaagggggttatcccccgagaggagggagcgctcggaataagcgacggctcggtacgcgacattgcccttatctcgcgggtcaatcaccccgtctgctttaccgtggaggacataataacaaaagacggcgctccacttgcggttttatcaagaaaaaaggcccaggccgcctgcatgagagaatttatagatttcttcacgcccggagacgtcatcgacgcggcggtaacccaccttgaacccttcggcgccttttgcgacataggctgcggaattgtcgccctgctgcctgtcgactgtatttcggtttcaagaatttttcacccgaaagaccgctttttcgtggggcagtccataaaagctgtcataaaatccaaggaggcggacggtaaaatcaatcttacccacaaggagcttctcggaacgtgggaacaaaacgccgctcttttcagtcagggcgaaacggtgtcgggacttatacgcacggtggaaagctacggcagctttgtggagctcaccccgaatcttgcggggcttgccgaacccaaaggctgcgccgtccccggcaatcgggcgtcggttttcataaaaaacatactgcccgacaaaatgaaggtgaagcttataataatcgattgtttcgaggccgattacccggccgaacccgcaaaatatttcatagaatcgggacacatttcccgctggaactactctcccgccttcggaaaaaaacaaatttttaccgattttgacggcatcggtgcaatcgacggttgatttttccctcttatgtggtaaaatggagaaaaaaacaaaggacgttaaaacatggcaaaagcaacccttattataatggccggcggactgggaagtcggttcggcgggcttaagcagcttgcaaaaatcggcaagcacggcgaaaaaatcatagattacagcatttttgacgcaaaaagagcgggctttgaccgagtggttttcgttataaaggaggaaaatctcgagattttcaagtcggaaatcggcgacagcgtggcaaagcacatacaggtcgactatgtttttcagtcgaccgacaggctccccgaaggatatgcgggtattgaagggcgagaaaagccgcttggaaccggccacgcggtgtggtgctgtaaggacgttgtgaacgagcctttcgcagttataaatgccgacgactattacggtccgaacgccttcaagcttgtttacgattttctcggcgaaaaacgtggcggagttaattactgcatggccggctttgtgctcggcaacacacttaccgacaacggaacggtgtcgagaggtgtttgcgaaattgacaaagacaaccgtctcatgtcggtttgcgaacacaaaaaactgtcaagaaacggcaatgcggcacagaataaaaatgacgacggaagcataaagacccttcccctcgactcggtggtatccatgaatttttggggctttacccccgattttttcacccgtctcgacgaaggactcaaggcctttttgacggcaaagcacgaaaatcccttaaaggccgaatttttccttcccgaggtcgccgataactgcattcgggacggatatgccgaaatatcggtgctcaccacaaacgataaatggtacggcgtgacctataaggaggacagcgaacaggtttccgcggcaatcgccgctctcaccgactcggggctttatcccgaaaagctgtgggactgaacacacataacaaaacccgcctcattcttaaatgaatgaggcgggtttttaatgcttaatgtatatactctttaaatcccaaatatttcagagaaattcggccgtagtaggaaagataactttgggtcaaatcaaaaagcgttgcaatctcatcgcgggcagcttcaatcgaatcgggattgttgagctcttcgccgctgaactcactcgggttcaaattgccggcccaagtaaatgtcgccgcatcgtcaaccgtgccgccgatgtaccacgtctcatcggcatcgcaaacccgatactccatctttctgtttctgtcgacagtaaaagcgacaatgacattatcgcttacatagtaaacggaaaaaccgaaagcgtcatccttcaccgaatagatgctcatataaaccacatcattattttcggaaattatttcgccgaccgcatagcaatcggtgtccgacatatattcgccgtattccttcacataatcggcccaataatcaaagccgtcctcgcaggggaaaagcgctattttgttcaccgcgtactgtatgataagtaatgcgtcgttgaccgaaatttctccgtccgcattcacgtcggccgaaagggtctgagcttcgtcaaatgagattttgaatactgccgcttggagagtcaaaagcgcgtcggttaccgataccgttccgtctccgtcggcgtcaccgagcggtctttccccctcggcagagaccgacatggcaaaaaccgacatcaaaagcgacagcgccaaaataaccgataaaaattttttcatgatttctcctcctttttcttcatcataacaaaccccgcaaatattgtcaacgccatttcggcagtattcgacataaaaacagaaaaggccgtgctaagaagcacagccttgactttgaagaattatttatacttgcgtttgcgagccgcctcggatttcttcttgcgctttaccgaaggcttttcataatgctctctcttgcgcacttcttggataacgccgtcgcgcgcagtctgtctcttaaatcgacggagagcattctccagagattcattctctttgatttttacctgactcatctatgtccctccctccgcctaacggcaggggtatttgctactatgtgcaactgatattatacaacaaagaaataccgtttgtcaatagcaattcattatttttttatgacaatattaacaagcttgcccttgatgtatatttccttaacgacatttccgctctcaagctcggcggcaaccttttgggatttctttgcggcggcaagcaccgtgtcctggtcggcgtcgacggcaacggttatgcggtccttaagctttccgtcgacctgaacggcgatttcaacctcgctgtcaacacaaaggctttcgtcatactccggccaatcggcaagggagcaaaatccttcaaatccgcgctcctcccaaagctcctcggtgacgtggggagcgaaaggattgagcagatttatgatggtcttataatcctcgtttgaaaggcttccgaccttgtcaacctcgttaagcaggctcatcatggcggcgatggccgtgttgaacttcatgtcctcgatgtcctcggtcaccttttttatagtgcggttaagcgccttttcaagcgcctttgagcggccttcttccccgttcaccttgtcgcggagattccaaaccctttccacaaagcggcggcagccctttatggaagaggtcgaccagggagcggccttttcaaaatcgcctataaacatttcgtaaagacgaagtgtgtcggcaccgtagtccctcaccacgtcgtcgggattgaccacgtttccgcgggatttggacattttttcgccattttcgccgagaatcatgccgtggctggtgcgcttggcatagggctccttggtgggcacaacgccgatgtcataaaggaatttatgccaaaaacggctgtaaagcagatgaagggtggtgtgctccataccgccgttataccaatcgacgggagtccaatattcaagagcctcttttgaagcaagctccttatcgttgtgaggatcgcagtaacgaaggaaataccacgacgaacccgcccattgaggcatggtgtcggtttctctcttggcggggcctccgcaatgggggcaggtggtgtttacaaagctgtcgattttcgcaaggggcgactcgccgttgtcggtgggctcgtaggactccacctcggggagacgcagcggcagctcgctttcgggcagggcaacatatccgcatttgtcgcaatgaacaatgggaatgggctcgccccaatagcgctgacgggagaaaacccagtcgcgcagcttaaagttgaccttgggttcgcccacgccttccttttcaagccattcgataatggcttttttggcctcgtcgacggtcagtccgtttaaaaagccggaattgatcattgtgccggtagcgcagtcggtaaaggcttccttttccacatctccgcctgccacgacctcaacaatgggaaggccgaaaacctttgcaaagtcatagtcgcgggtgtcgtgagccggaacggccattatggcgccggttccgtaggtcatgagaacatagtcggaaacgaaaatgggaattttattgccgttgacgggatttatggcctcaacgccgcaaagtctgacgccggttttatccttggcgacctcggtgcgctcaaagtcggatttttttgccgcctcggcgcggtaggctctgatttcgtcgatattttcaaggctttccgcccatttttccacaaaggggtgctcggggctgataaccatataggtggcgccgaaaagggtgtcgggacgggtggtgtatatttcaagcacgtcccctgcggtggtgttgaatttgacctgagcgccggtggagcggcctatccagtttttctgctgcagttttacccgctcgatataatcaagaccgtcaaggtcgtcaatgaggcgctgtgcatactcggtgattttgagcatccattggctctttaccttatgaacgacctcgcttccgcaccgctcgcaaacaccgtttaccacttcttcgttggcaagcacgcatttacaggaggtgcaccagttgaccgacatttcctttttataggcaagtcccttttcaaaaagctttaagaaaatccactgagtccatttatagtagtcgggatcggtggtgtttatctctctgctccaatcaaaggaaaatccgagagaaacaagctgctccttaaaatgggcaatgttgtttttggtgacgatctcggggtggatatgattttttatggcaaaattctcggtgggaaggccgaaagcgtcccaacccatgggataaagcacgttatatccgtttttgcggcgctttctcgccacaatgtcaagtgccgtgtatgaacggggatgaccgacatgaagaccctgacccgaaggatagggaaactcaacaagagcataaaacttgggcttatccgagccgttttcggcatggaaaattcccgcctcttcccattttttctgccactttttttcaattgctttgtaatcgtaaggtatcaacaaactcgcctctttataaaaatatcggttaacggtttttcagtcctcggtcagaagatgggaaatatccaccttttcgccgtccgcccacatacgctcgagggcatagaaatttcttgcgtcgctgtggaaaacatgaaccataacgtcgccgtaatcgagcaaataccattgagtggtccggccctcgatgtggtggggctcaatcccctcctgcgaaagcttatattcgacctcttcggcaagggagcgcacctgcgtgttggaggttcccgaagcaatgacaaggtaatctccgagcatggtaagtccctcaacgtttatgacctcgatgtcgcgggcttttttgctgtcaagagcctttacggcaattttaataagttcttcggatttcaaaaaatcacctcataatcaatctgaatttgaggaggcggtgcttgaggcgtcctcctcgcccacatactgtcctattcccgtcttgtcgtttgtgagatagctgggctcatattcggtgtggagctccttgattttaatgtcgtccaccgtgaggggctcgtcggaatagggcatgaaatattcatttataagctccacatattcctttttgtgtatcgaatagtaggaacgggaaacgccctgggggctgtaatatccgggctgaccgggaacggcatagaagcttatggtttccatgctcatacccttggcggcgcttgcatagctcagcagctgtccgacgctcatgtcggtggcgatgtcgttatagcatttgtcggccacgcttgccatttcgccgagactcatgcccagcatttcctttataaaggccgcataaaaatttcgctgggcctgaacacgcccgagatcgcccattacatagctgtctctgtggcggacaaaggcctcggccataccgccgtttaggtgattccagcccttttcataatgataccaaacctcttcggtatcgttggcgtccatttcaatgggaacctccacgtcgattccgccgagcacgtcgacgatttttctgaaggccgaaatggaaaccacggcatagtggtcgatgggaaggccgagataatcgtttatgcgcttcatcatcacgtttatgcgggactgaccgtccttggccgattcgtagaccgcgtttacctttccgctgtcaatgtcgctgccgatgtaagtatctctcgggatttggagaatgtttgcggttttgtccttgatgttaaagcagacaaccatgataatgtcggtgagatcgcccgaaaggtcggttccggttatgaggaaataggaaacatcctcggttggactttttatgacgtcctccatctgctgttgaacatcttcaccgttatcggatctcataccgctcagaagaatggtgggaagattgggatattttatacagacggcggtaagccctatgcaaagcacaagcaccaccgacagcacggcgttgaccgcaaccctcttgcccttggagcttttgggacggcggccgctgtcggcaccgtcattttgaacctttttctgcgttctgaccctcccggaagaagtctttacatgacttctcgggcgggaactgctgtatatatctctcgaatttctgttgtccgacattttttcaccctatctttttttcaaaaacaattcgttaaatgcgtccaccgtatcgggatgaaccggtttgttacggttcacaaggtcggttatggaaaatttaagggaaaattccattccgcattcctcgcttttttcaaccgccgctctcatttgctcgacgccgggataatctctgtcctcgccgatatagtcggcaagatagaccgccttttcaagagggctcatgcccgctcttgcggtagtgtgatagcttattgcgttgataatatcctcgtcgtcgataccaagtatgtacttgcaaaaggccgctccggattttgcgtgccaaagcttttcggcattttgcgacaccatatcgagtattataccattatcggataaaatttgcaactgaaaattaccgtcggcttccttcataacatcgtgaagaattccggccgtgtaagccttttccctgtcgccgccgtatttatcgcacaggcgaaccgcctccttggcgacattgagcgaatgaataaaacgccgctcgctcattctcgggcgtatgacctctatatatttttctccctccatggtgtcctccttatctgtaaagacggttgtcgattatatatttttccacccttttgtcaagcaaaccgctgcaggaaagcccccttttcagccgctctcttatgtcggtggaggaaatgtcgatttctttcatgttcacaatgctgtaccttgcgccgatacggcaaagctctttttccacggccgccctgtcggcgccgtttcgcacggcggcaaatatttcgggggtttcgattattttttcgctttcccgccatttgcaaagccccataaccgaatccccgcctatgagaagtcctagaccgtcgccgggataaagcgacgaaagccgagacagggtattgacggtaaagctcggatagggcaaagagaattctatgtccgacacttcggttttttcaaatccttcaaacgcaaggcggcacatttcaaggcgcttttctccatcgcaaagaccctcttccgacttaaagggagagcatcttgcaggaatcaccgtcacgacatccaccgtcgaatcaagcaaagcagcctttaccatggcggcgtggccgaggtgaaccgggttaaagcttcccccgaacataattcttttcataggcaccctctcgtctgaataaaccaaatttttcccgacaacaataaaaacagagtccaacactttcacttaaatcacaggaggagccttatgataagaggagtcaaccgccagacaatcgaaataagggaaacgggaaatccgtttttcgaaagagccatactctttgtgaccgaaagcggaaccaagctttcgcagcagcagctgacagctcaatggaacagctttttaaaaacgtcggaacgcccgcctgccgcaagagcgccgcggccgtcaaacgccgcaaggcgaaagaaccgccgtataaaatcccttataaccgcagttttttggaccgccgtcggaataactatttctcttttgtttcggtggattttttaaactttcttctgcgggttttgccgtcgctttcggtttcggtgacggtgacctcactatcggttttttcgttcttttgggcctttttcgccgcaagagcctccatgcccgctccgataagagaggaaacgattcccgaggacgccccctcgttttgctcgggctcgggcatacccacaaggcgtattttaccctcttccctgacgataaaagccatgggggtgaccgttatttttgcgcctgcacccgcgcctccgtcggccgaacgcttgtcaaaattcaaaatatcggccgctccgccggcaaagcccgcagataccttggaaacgggaatgacggcgctgtcctcaaaataaattttgtctcccgcaaccgaaccggaagatgccagttcctttaccttgtcggtaacggtgccgatcagctttgaaaggttttcggccgtttgagttcttcccgaaaagctttttgttgaatgttcacccgacatattcaaacactcctttttcttttaatgtatgcgccgacaacacgcaccgcggcgatcaacgcccaaaagggtcgaagccgcaaacatatatcaaaatcgaattcggatttgctcttttcaaaatcgcagcgaagatttatgctctcgcctgatttttttatgctcatttttgaatttaaaaatcccaaaaagggataaatcgcggcgcacactcctccgtaggtcatggccgccgccgcgggatcctcgcccccggcaacataattcaccttaagacggattacgcggcaccgaccgaacaggcggaaaagctccttcacggcataaaacgacagggctattatgtctctcggcgaaaccttagcttgctgttttttttcggcttttcgcggcggtttcttttcctttttcttttttggggcggcgtttttttcgtccttggggccgcttcgttttttcagcgcttcggtcagattttttttaacaaacagaaatcgggccgatatttcaaaattttcgccgtcttttttcagcataaccgagaaaggcaacacaagcaacagggcaataattcccaaaacgcagagcaaaacaataccgataattttaagtaccatcgtcttgcccctccttcgaaaaaaacaccatgcccatttaaaactattataacaaaaaaacagcgacaaatcaataaataatagaaaaaagacggaaatcgaaaaattcgatttccgtctttggacagcaaactgcaggctgtcggccggcgaaatattttccgaccgtcattttccttgatttaatcatatattttgttcaaaaattccttgagccgcctgttttgcggattaccgaaaatttcgtcggcgctgccctgctcggcaataaatccgtcgtccataaatatgaccttatcggaaatttcggcggcaaagctcatctcatgggtaacgatgaccatggtgcgattttgctcggcaaggctctttattaccttcagaatctcgcccgtaagctcagggtcaagggcggaggtcggttcgtcaaaaaagagaatttcaggctcgagggcaagagctctcgcaattgctactcgctgctgctgaccgcccgacagctcgcttgggaaattgtcaagcttttccgacagtcccaccttggaaagaatatcccttgcctttttttcgatttcctccttaaccgcggcctttcctcttgttttcatttcctgctttttaagaagctcgggagcaagagtcacattttttagcacgctgtattgaggaaaaagattaaattgctgaaaaacaaggccgaaattgagccgcattgctctgatctcattttcggaatattttttctgccccgaaaaatcggcaaagagctttccgtcaagaaaaacacggcctccgtcggccttttcaagaaaattgagacagcgaagcagggtggtctttccgcttcccgacgagccgataatcgacagcacctgacccttttcaaggtcaaagctgacatcctttaaaacctcggtctttccgaaggattttctcatgttttttacttcaagtatcgccatgtctgtcctcctcagttgccgaaataggcgagttttttctcaaccttattgaaaatcacggtgagcactccgctgaacaacagataataaacgccggtgaagaaaagcggccaaatctgacccgaaatgccgttcgaacccttcataaaggcctgacccgcccaaataacctcctggagggcaataattctcgcaagagaggtgtccttaacaagagtgattatttcgtttgccatgggcggaacgatacgtttaatcatttgaagcagcgttaccttgaaaaagatctggctttttgtcatgccgagcaccattccggcctcctgctgaccgacaggcacaccctgtatacctccgcggtatatttcggaaaaataacaggcgtagtttatgataaaggcaaccgacgccgcaacaaaacggccgtcctcgcctccgccccaaatgttgtttccaatcattccgggcatataataaattataagcagctgaatcataagcggcgttccgcgaatgatccacacaataattttaacaagcgcgctgagcggcttgaattttgacattgagccgaaagaaattataagtccgagaggtatcgccccgaggagcgtaacggcaaaaagcttgagcgtttgtaaaaatccggagttaagcgcgccgaaaacggtgggaaactgctgaattatggtctgcataaaaacatccttttaaaacaagatgagcagaggacgaaatttcgccctctgcggaagataattatattatttaaagcaattacttctgctcgataacggcagcctgaactccgtatttctcggcgatcttctcggtttcgccgctctcaaaagaggtcttaaagaactcattgagcttttcggtcaaatccgaaccctttctgaaaccaactccgtactcctcgcttgtcagcttggcggtgtaggtcagctcggcataaccggttccctcgccgaccatggcggcagccataagggagtcgatgattgcggcgtcgcaggttccggccttaacttccataagagcggtggcctggtccttgacctcggtgaactgatagccgtttgcctctgcagccttctgtcctgccgagccgctttcaacggcgaatttaagatccttgcagtctgcggcggactgatacttggaaacgtcggcagctttaacgataaccacctgcgcattgttgcaatatgcattggagcagctcattgccgatttaacctcatcgttaagcgtcatgccgttccatacgcagtcgatggattttccgtcaagctccatggccttgttgtcccaatcgatttcggtgaattcaacatcaacaccgatgctcttggcgaaagccgtggccatatccgcgtcaaaaccgatccaattgcccgagccgtcctgataatccatgggttcaaaatctgtaattcccacaacaagcttgccctttccctgtacataagaaaggtcgctgtcggtcttggcgtcgtcattcgatttgctgtcacttccgcagccggcaaaacaaacggccatcatggcaacggcaagcaaaattgcaataaattttttcattttaatttcctcacttcgatttaatttgttatcgctttactgtgataaattgataatagcataaagcgtttgatttgtcaagtgatttataaaaattttcccacatcaaattcaaaagacaatttagggtgatgttactcggctaaaaagactgtaataagattaaaatcaaattgatctttcgccgccgtaaaaccattacaaaaagaattataacctacaatgccagcaaaagggtgacattaacatacggaaaggaatttaatcatgtaaaaaataagttctggttcggacaataaaaagaatttggtataacgatgaaaatcataagactacttttccattttaaatatccaattgtttgaattacgctgtattttgcagtggacaaacgcaaatgaaatatgaaaaaaataatccgaagaatgttatctctataaagtttttgattgcataacagtcgcaatttttttcgtaaatctgcttaaatcttatcgattatttatcagcaaaaagcaggacaaacaaaacacgccgtagcattagatgcagtatgttttaaaagagaatatgtcttattccgttcaacatcgaataacactataatccgtttattttccccttaacggcgagcacgaaacaccgtcgaagacaaaaagaaaaagcaaccgaaaatcagttgcttttctttgtg

SEQ ID NO: 3232 - DNA, 1841 bp, Unknown
  16S sequences of unknown bacteria
gttgaagagatggtagaggatcatcccgacgctgtaaagatcgacggtgtcattcagattggccatgatatccgccagctccggggcgctgtagcagctgctgtagtgctccggcagggcggcgacggtcaggtcctccaagggggccaggcccaggtcgccgatggaaaaacggccgttttcatccacaaaaatattttccggcttcagatcctgatgaatatacccggcctgccggatcccggccagggcgttgcagaggtcgatgcccagattcagcgcctgcaggtgcgtcatcgcgttcgactgcagataggcgtgcagcgacgtgcggtacggcgccagaaggtaaaagtcgtacccgatggccccctcctcccgctcgaccagctggaagccggtgaacaaagagagattctccagcccgctgagcttctgccagttgcggacctcgatggcctgggcctgggcgacgtcgcggtaatatgctttggcctcctcccggtcgtgcagcgcgccggagaggatcatcgcctcgacgcccgcgtccgactctgggatggagatgtgcttgagcacaaatttttccttcgtctcggtgcgctcgagcaggtagcaggtaaagccaccggcgctgttgaggcattcgaggacggtcatcccatccagtaatggggagacaagcttcaattctgccgtatccatcacctcctataacaattttccgatattatcatacgctatttttgaaaaaaaagcaatccttgtgttgttttctgtcgaaaaaaatggtatgatagacaaaatatttacccgcgcgcagtccggatgggctgggtccgcggggcatttcccgccgcaaacggcggcaagaatcgtggagcgtaagtatggcgaaaaaacgagtttgcgagatctgcgggacagtattcgacgaaaatcgcgatgtctgccccctgtgcgataccccctaccaggcagacctggacgagacccaggtcttttttgcggcagagcttgaggcgaccgccgcggctgggaaaaagaagaagcagaaaaaggaaaagccccccaaggcggagccggacccggagccgggctggaaggtcgccattgcggtgctgctttctgttttgctgctggtcttcggcgcgtttatcgcatatgaatttttgatcggctccccggtgcaggacggcagcgtcgcctgtgcggggctgtatctctccagcgacaccgtctccctccatgaggtgggcgacacctactacctgaccgtcagcaccaccccggcagacacgacggacgccctcgcctacgccagcagcgatgagaccgtcgcgacggtcgacacgtccggcaagatcaccgccatcgcccccggcgaggcaatgatcaccgtcacctgcggccaatacagcgccacctgcaccgtgacctgcgccggcggcagcgccgcgtccggcgatgctggcagcaccggcggcactggcacagcgtccggcgaccgcagcgcaacgtccagcgacgcgggcaacaccggagatgcgggcaatgccgatgacaccggcagcgatacgaaaacgccgtaaccagcaatgtcttttgcatgatttgtgaaccgccccaggcgatgcctagggcggttcagactgtaataaagcctcgcagagtttgcgccgcgcacggcgcaaatagagtcaaaatcattttttccggcggcaagtgggtgagactccaagagcgcgcagcgcgattggtcaataagcgagagtcaaaatctctgattttgctcctcgagcttatacagcgtagtcgaacccatgcagcgcatacgtcgg

SEQ ID NO: 3233 - DNA, 8251 bp, Unknown
  16S sequences of unknown bacteria
tgtataagagacagcgtttatattgagcgttagaaactttgatgcaaagattttgcctaaatttgtttttgatttttatgtttttttattagatttaggtaaattaaaaaaatacagttgactttttttcagaaagttgttaagataattgcaacttcataaagtcaacgcgtggatagggattagtaagattcgctggaatatacagagagccgcggtttgctggaaagcggttattgcagagtttttgaactcacccttgagcggtcagctgaatgatgaacagtaggctcgaacggttttttccgccgatatcggaaagcgcgttaattgacgcgtaaaagtgggcatgtttatgtcaacagaagtggtaccgcggaggtttcgccttcgtcttctttttaagaagacgaaggcttttttattgggccaaatggaaaaatgatgagaggagaatgagcgatggacgatatgatgaatattacggtgagtaagctcttggagcaggtagcaaggcaatatcctgaggatgaagcggttaaatttactgaccgggattatcgtcgcacttggaaagagttcaacgaagaggcggaaaccattgccaaaggctttttggaaatgggaatccaaaaaggcgaccatgtggcgatttgggcaacgaatgtgccagagtggatgctgaccttctttgcctgtaccaaaattggcgctgtactggttaccgtcaatacggcgtataaagtttttgaactggaatatctgctccgccagtctgattcgaaaatgctggttatgattgaccggtttaaaaagaacgattatgttcagattatcaacgagctttgccctaccctgaaagactgcaaaccgggtgagtatgataacccgatgctgccgtatttgaaaacggttgtttatgccggcaatcaggaaacagctcctgccggtatgcttcattggaaagagctgtatcaaaaggcagagaaaatcgatgaggaaacgtttcgtgaagtctatgacagcgtaaacccgcaggacatctgtaatatgcagtacacctcaggtacaacgggctttccaaaaggcgttatgctgactcattacaatattgtaaacaatggtaaagctatcggtgactgcatgaagtttacacacgatgataagctgtgtattgtggttccatttttccattgttttggaatggtgcttgctatgatggcatgcttgactcattctactgcgatggtaccggtggatgtttacagtccggtcaaagtaatggacgcgctgcaaaatgaaagatgcacagcatttcatggcgtgccaacgatgtttatcggcatgctggaacatccagattttgcgaaatacgatttttctcatatgcgcactggcattatggctggttcgccctgcccgatcaaagtgatggaacaagtagtggaaaagatgaatatgcgggaaattaccattacttacggccagaccgaggcctctcccgccacgacaatgactacaactgacgatagtctggagcttcgggttagtacggttgggcgctccatgccgcatgtggagaccaaaatcattgatccggaaactggtgaaacgctggggccggggcagactggtgaattttgttctcgcggttacaatacaatgaagggttattacaaaatggaggaagcaacccgccaggtgattgataaagatggctggctgcactctggagaccttgcaactgtggacgaaaaagggtattataagattacaggccgaatcaaggatatgattattcgcggcggcgaaaatatctatccgaaggagattgaagagtttttgtatacccacccgtctatcagcgacgttcaagtaattggagtacccagcaagcggtacggagaagaaatcatggcgtgcattattttaaaagaaggctgcacgttgacagaagaggaagtaaaagactttgtccattccagcatggcacggcataagattcccagctttgtagcttttgtagagtcgttccccatgaacgcggctgggaagatacagaagtttaagttgagagaatgggcggttgaatatttaaatctccaggaagcggcctcgattgaaacagcataaatttctttcgggagcgtgtaacggaatgaccccaaacaatgtaaaactttgcatgggctgtatgaatcctttgccggatggaacagacaaatgtcctcattgcggctatcaggagggaaccccctatagtttgacctacctgcagccgggtactgtgctgaaggaacggtatttaatcggcaaggtgatagaaaaaaacaccgaaggtgccacttatatttcttatgatcagaccgaagataaaaaagttctgattcgggaatttatgccggagcaaattgcagaacgcaatgaatccaatcagtacattcggcctaagacgggatatgagcgccagtttaaaacggcactgtcggattttgtagaactttcccgccaactgctggcactggataagatcaccagcatggtaccggtgatggatcgctttgtggataacgatacggtttacgtggcgtatcgctacatccggtcattgactctttctgcttttttgcagcgcaacggtggagaactgacttggagccagactaaaaagatgtttcttccgttgttgaataccctgtctcagctgcataagaagggaatcattcaccggggaatcagcacggaaacgattttggtagatcaggataataagctatggttgaccgggttctgtattgcggatatccgggcagaagggggagacgcaggtgcgtctcttttcgaaggctatgcggcgccggaacagtattcgttgaatagctggcagggaaattggacagatgtatatgggatttctgcggtgttgtaccgggtactcacaggtacccgaccatcggatggcaacagccgccgcatcagcgatgacctttgtccgccggacgaactcaatagaaaaattccggctaatatttctgatgctattttttcggggatggtagtatctagcgaaaaacgtgtccagagtattgacgagtttaccggccttttgctggaggaaggagatactcatactgccgttttcgaatcttccaaagtgaatctggagattaaaaagaaaaagccgaaaaaccggaaagtccgggtcgctgtttgggcgatggttgttaccacgctcattttgctgggattgatgttctgggtgctacatacactgggtatttttaggcaggaggagacctccaagccttcccaaaccatctcctatttggatggccaatcctctggggcagattctgtggtttcggcggatggtgtacccgattttgtgggaaaagatattgatgcaatcaaaaataatccagactatacaaatcgttttgagtttattgtaaaagaagattataacgaggaatatcccaacaaaaatatcgtatatgatcagaacccggcaaaaggtacgcctatgccaaacaaaggttatgtgacgctgtatgtgagcaagggttccgaaatggtttccatgccgggattaaagggaagtactttggagtttgcaacgaagacgctgaccgaaaatgagctgaaatatgaagtggtatatattgtggatgcttcagctgaatcgggcttagtgattcgtaccgttccagcagaaggtgagatggtcagcaaaaagaccagcaccatttatctgtatatcaaagacgatggggcagcctcttcttccggtcacttcggcggcggtgcagttggcttacaagaggacgaagaagaggacgatgagtagggattatttctcataatcatgaaaggatgatgcaatatgaagctttccttgtcaacgctggggtgccccggctggtcttggaatgagatttttgctacggccaaagatcttggcatgaacgggattgaagtacgcggtgtggccaatgaaatgtttgcgccagcgatatcggtgttcaatcagggaaaacgcatggagactctggaacggattgaaaagtctggcatgcagctttctatgctgacctccggcgcctgcttaggcggggcggatgcggataaatatatgcaggaggcaaaagcttatattgattttgcagaaattgtaaaatccccttatgtaagagtaatggtttcttcggttccgcagccgacgggaaaggaagaccttgctcaaacaagggagctatacgcgcaactttgtgcttatgcggagggaaaagaggtaaaggttcttatcgagaccaatggcgcgctggcgaattcccaggcgctggcgcagatgatgcgcaccattcattctcctagttctggtgttttgtgggatatccatcatccataccgtttttaccatgaaacgccgaaagaaacttatgaaaatctgaaagattggatctgttatctgcacgtcaaggattcagtaatgaaagacggacaggtggaataccggatgatgggatatggcgacgtaccggtatttgatacactgaaaatactgcatgaaggcggatacgacggatatatttcactggaatgggtcaagcgctggtgtcctgatctgcaggagccgggaatcgtttttgcccattatgcgacctatatgcgatatcttttaaatcagttggattaaaaagctgtccggagctccatctcattagaaaagcgcaatgggtaaagaaacaaatgaaacagccgcttttagcggctgcctgtaatagtgatgcgatggcaaactctcagtacccctttcaggggtcaacaagtactgactcctgaaaggggtttgagcaaaccactagtttactagtggttttgatttttttccgcattttcttggaagaaaagtttggatgatacgaataaaacgcctctgctgaaaaattcagcagaggcgttcatacagaagcgattaattgctggtgtaagggagaagagccagatgtctggcacgtttgatcgcaacagtcagctgacgctgatgttttgcgcaggtgccggtgactctgcgaggaatgattttcgctctctcagacaggcatcttctgatttttgggatatctctgtaatagctgatatgatcaattttatcagcacagaaagcacaaacctttttacggccttttctgccgccacggttacctctctcaggtctttccatgagtaaaacctccttaaaaatgatgagaactaaaagggcagatcatccaaaccgccgatttcttcaaaatcttctgtatttccgctggaataagctacgcccgtattgacaccgcctgatgcaggagcagagaagggattgccggaatcgccggaattgttgtttttactgccgtcaacaaaatgtacgttgtccgctacaacttcgtaacgtctgcgtttttcgccgtttttgtccgtatagttggttacctgcaagcgaccttctactaaaatcggtttgcctttttgaaaataccgacaaacaaattcagcagtgcccctccatgcaacacagtcaataaaatccgtctgccgctcagcacctttggaataggcgcggtcacaggcaacggtaaaagaagtgacggaaatattacttggcgtttgccgcagttcagggtcggcagtcaagcgccccataataatggccttattatacatcgtaaaacccgtcctttctttttgactattcttccactgctacggtcaaggaacggagaacaccgtcggtaatgttgtagatacgatccaactcagcggggaattcaggctttgctgtaaaggtaatcattacatagtagccttcctgctcgtcttcaatctcgtaagcgagtctgcgtttaccccaatcgtctacattgtcgattgtaccgttctcactgatgaggtttttgaatttctcgaccagcgcgttgataccgtcctcaccttttttggtgttcagaatcatcgtggtctcatactgttggatagtttttgccatttgttacacctccttttggacattaggccctacttctcagagcagagcaaggatgttagaggctgtttagccgcataacaaaattattttatcagctttgtccggtaaagtcaatgaaaaaataaccgaattaaagcgttttagccaattttttcagatattcccgcagctcagcaccgatttccggatgtttcaacccaacctcaaccgatgcttgcagaatgccaagtttatttcccatgtcgtagcgggtaccgatgtaatcaacgccgaccataccctcggtgcgggccagctggagcattgcgtcggtcagctggatttcaccgccggcaccaggtttggtgttttccagaatatcaaaaattttagaaggaagtacacaccgtcctaaaatagagtacaaagataatacctgatccggtttgggtttttcaatcatatcggtgacccggaacagattatcccgaatgggttcggttttgagtgaagaatattttaaaatctgttcggcagttacctctttgattcctactgtggcaaggccaaattcctcataagcccggcatagctgcccacaggcaggaagatcgctgataatgacgtcatctccgtacattactgcaaaagggtcgtctccaacaaaagattttgcacaccaaactgcatgccccagacccttggtttctttttggcggacgtattgaatgttggccattttggtaatggatacaatttcatcatacaactctgttttaccggaagccaaaaggcgatcttccaactcgggtgcacggtcaaaatgatcctccatagggcttttaccgcgattggtgataatcaaaatatctgtaatgcccgattgaactgcttcttctacaatgtattggatagcgggcttgtccacaatcggcagcatctcttttgggatagacttggaagcgggcaggacacgtgtccccaaacctgccgcagggatgatcgctttggtgactttcattacgatttcctcctcaaatataggtgataccagtaaaaagccattccgaatcaatggctttttatataaaccgaaaaatcccggcttttgttacaaggccgggatcatactcaaacaatcaaatgcggcatcataatcatacaaaatatgacatacaccatcattaaaaagccaatggcaaacaaattggtacgcccttttttggccaaagcagcggaatattcctggggggatacaaagactttgttttggacttcttggatttttcggatgcaatgacgataatagagccagttgcaaaatagacacagagccatggaaagcacagtagagacgatactgcagatttgtgcagccagcagcatggactcaaacccggtagagtaaccggccatcaggccggaagaaactgccagatcttcatacaagcaaatagccgaggggatgctcagaagggtattggcaataaaaatgagcaaggaaagcccatacatttttcgatacagaaaatatttccatccaaaaaacaacgcagagaaattgaaggaaataggccgtccagatcgcttaatccgggaaaaatttgacagaaaataagcggaattgctgccaataaattgagacaaatcccgcactttgatgccatccatctcttcgtcggggttaacaccgccataagaatctccgtaaggtatcccatacgcaggcataccactaccaaagggaggccgttgctgaaagggaggaatattccccgcacttgtttgcgtcggtcccgtcaggcgtgcgccgcagctgctgcaaaaaataccatcttctggattttctgcattacagcggggacatttgacaaacgaattaccagattccgttttgggttcagcaggtggatcccagttttttcctaatttgtgattttcaattagcgcgcaatgccctagacgctgataacactcccgatgatgaggagcaccgcagtcggggcaaacgacaatatcttcgttttcggaaaaaggttttccgcaaacaggacaggttgcattggaatatttattcaagcaaaagccactcctttgtggattttcagaaaataaaaaagataagtccgttttgaagtttgttggcttttacaccgaaaaacataaaaacagattttaaggataaaaaagattataaatcattttacaacaaaatccaactgaaaaaaagcagagaaagggtac

SEQ ID NO: 3234 - DNA, 3161 bp, Unknown
  16S sequences of unknown bacteria
cggcacgtttctttttctctcgcaagagaaaaagaaatgtggggcgcaaacgttcccccctcttccaagagaggacccccccgccccgctgcggggcgcaaccgcccccctcttccaagaggagaaaaacccccaccccgccggggggcaaaaaaaaggaaggggcaaagccccttcccttcctcacaccccgctcagggcgcgcagcagctcctccggcgtgtgggaaatcgaaaccgccccgtgagcctccagcacttcccgtgtccgggtgccccagtccacggaaaagcagggcaggtgcgcgttgcgcgccgtggcgatatccacttcgctgtcgcccacataggcggcggtctgcgcgggcatccccagttcctgcagggcggtcagggcgctgtccggcgcgggtttgcgggacacgccgggccgctcgccgatggctacggcgatgcgttcgccgaagaactgccggcacagggctttcaccgccccgtcgcgcttattggacaccaccgccaggcggcagcctctgttgcccagtgcctccagcagctccagaatgccgggatagggcgccgagccggtgaacatatcgctttgatacgcttcctgaaaggcgtcgaagcaggcggcaaagcggggatcctccgccccgccgggcagtgagcgggcaatgagatcggccatgccgttgcccatggcggcagtgatctgtgccaggctgcgcggcgggcagccgcagcgggccagggctgtgttggtgctcgtcatcaggcccggggcggagtcgagcagcgtgccgtccaggtcgaataaaatggtttgcagtgtcataaccgcacctcctatataggatgtcgtggagctttatcatacccctttccccgttccctgtcaatttttggtggcgggaaaccgccggggcgcataggctgaactgagggtccgcgcacagcgggccgcagattcaaaatacgaaaacgtgggagaaaggatcgctatgcaatcagtatgtttcggcctgctggtgccgtttttgggaacgagcctcggtgcggcctgtgtgttttttctcagaactttgaatgaaacggtggaaaagattctgctggggtttgctgccggggtgatggtggctgcgtcggtgtggtcgctgctgctgccggccatcgacggcgcagcggcgctgggccgtctggcatttttgccggcggcgggcggctttgccgtgggctttgcgcttttgctgctgctggaccgttatttgcccgaaccggcgatcaccgggggcggcggcgcgaaaacaggcatgatggccctggctatcacactacataatatccctgagggaatggccgtgggcgcggcctttgcgggagtgctctcagggaacgtgggcggcgcggcggccgcggcgctggcggcgggcatcgccattcagaatattccggagggcgccatcatttccctgcccctggcgggctgcgggatgaaaaagcgccgggcctttgccgtgggcgttggctccggcgcggtggagccggtgggcgcggcggtgatgctggccctgaccgggctgctgcagccgctgctgccctggtgcctggcctttgccgcgggggcgatgctttttgtggtggccgaccagctgctgcccgaaatcggcgggcgcaagagcgctctgggcgtggcggcctttgccgcaggctttctcgtgatgatggtgctggatgtggcgttgggataaggccgggcggattccggcaggactttcccccccagcgcaatgattacaaaaagaggagcacggaaaagcatgcttttccgtgctcctcacacatatcatccaaagggaacaacagggagacgtttctgcgcgccgcgcagcaggcgtcagccctcttcaatcgcggcctgcgccgcggccagccgtgcgatgggcacacggaagggcgagcaggacacataggtcaggcccaccttgtggcagaagcgcacggaagagggatcgccgccgtgttcgccgcagatgcccagcttgatgtccggacgggtctgacggcccaggtcggcagccatcttcaccagcttgcccacgccggtctgatccaggcgggcgaagggatcgctctcgtagatcttcttggcgtagtagtcgctcaggaacttgcctgcgtcgtcgcggctgaagccgaaggtcatctgcgtcagatcgttggtgccgaaggagaagaactcggcctcggtggccacctggtcggcggtcagggcggcgcgggggatctcgatcatggtgcccactttatagtgcatctggctgccggcggcctggatcagggcgtcggcggttttgcacaccacgtccttgacgtatttcagctccttaacttcgcccaccagagggatcatgatttccggggcgacggtccagtcggggtgtctggcctgcacgttcaatgcggcctgaataacggccttggtctgcatcacggcgatctccgggaaggtgacggccagacggcagccgcggtgacccatcatggggttgaactcatgcagggaagcgatgatggccttgatgtccgccacggtcttgcccatgtcggcggccagcttggcgatgtcttcctcatcggtgggcacgaactcatgcagcggaggatccaggaaacggatggtgaccgggtcgccctccatagcctcgtacagggcttcgaagtcgttctgctgatagggcaggatcttggccagggcggcttcgcgctgttccacggtatccgagcagatcatttcccggaaagcggcgatgcgctcaggatcaaagaacatgtgctccgtgcggcacaggccgatgccctgcgcgcccagctcgcgggcctttttggcgtcgcggggggtgtcggcgttggtgcgcacctgcagcttgcggtatttgtcggccagagccatgatgcggccgaattcacccgcgatggcggcgtccacggtggggatgatcccatcgtaaatattgccggtggaaccgtcgatggagatatagtcgccctcatggaaggtcttgccgcccagggtgaactgcttgttttcctcatccatgtggatctcgccgcagccggacacgcagcaggtgcccatgccgcgggccaccacggcggcgt

SEQ ID NO: 3235 - DNA, 6194 bp, Unknown
  16S sequences of unknown bacteria
cggtctgaccgctctgatcgcctttatcagttttatgaatatggcgaatacgatgattaccggtatcgtcacgagaaaacaggaattcggcgttcttcaggcgataggtatgacgaaccgtcagctcaataaaatgttgagagaagaaggtcttttcttttcgctgggtacggtggtgatctctctgcttctgggccttccgctgggctacggtctgtttctgtacggcaagaaccacagctggatggggctcgatgaatatactgtgcctctaacggaaattcttgtcatgatcgtcgctttagcggcactccagctgattctctcttggatcctgagccgaaacgtcaaaaaggagtctctggtggaaaggattcgctatcagggataaattgtaaaaaatgagcaaaaacgggggcgccctgcgcttgaaaaacgtatggccggagaacagaaggctgttctccggccatacggcggggtgttccccgttttttgctgcggtgattttcatcggtgtaaagaacggtcaggcagatttgatgagaatctgccgatgacttccgcttgaataatgcgccggcccagccctttgatgtgacgggctgggccggcgctgttgattgccgttactttaagaacatccggatcagacgattttttcggtctgtggcgggatgatagcgcagcgggatatcgatgcgggccgattttttcagaatggatttctgatggctgaatgtttcgaaactttttttcccgtgataagaaccgatgccggaatttccgacgcctccaaatcccatatgcggcgtggcgagatgaacgatcgtatcgttgatacagccgccgccgaaagagatctctgtcagaattttttcctgcgcgctgcggtctgtagaaaaaaggtagagagccagcggtttttcaaaatttttgactgtgcggcatgcctgatccagcgttcggaatgtcagcaccggaagcaccggtgcgaacagttcctctgacatgacggggctgttcagagaaacatccgtcaaaatggtgggttcgatttttaaagtgatatcgtcgcctttccctccgaaaaagatagagtccggttcgcagctttcacggatcagacgaagaatccggttatagtggtctctggtgatgatacggggataatccggattgatcaggatatcttgtccgtacatcgaggtaatttcttttttcagcagagtaagaaattcttccttgactgattcctgaatcagcagatagtccggagctacgcaggtctgtcctgcattgaggcattttccgaaggccagacggcgggccgcgacaggaaggcaggcggtttcatccacgatacagggactcttccctcccagttccagtgtaaccggtgtcatgtgttctgcggcggctttcatgacgatctgtcccacccgggggcttccggtgaagaaaatataatcgaaaggaagtctcagaagttcctgattgcattcgacacctccgtctgcaacggcgatatagttttcaggaaagacgtccgaaataattttacggatgagctgcgcggtgaccggagcgtattcggaggggctgataacagcgcagttgcctgcggtgaccgcccctgccagcacatccagcgccagcatgaacggatagttccacggtgccaggatgagagccgatccataaggttcggggacggtaaagctggaggcaggaaattgagccatcggcgtgggaacgcgttttttcttcatccatcctttgaggtgtctcttcgcgtaagatatctcggacaggaccatgccggtttcgctcatataactctcaaaaggagatttgttcagatccgctttcagagcctgactgatttcatcttcgcgggcgaggatcgatttttccaggcggctgagagcattcatacggaaatgatagtcttttgtcgcgccgctctcaaagaactcgcgctgtgcggcgagacattctgccggtgacattttcatgagaaattcctttccgcgaaatcgctttttatcaatatgctttatgtaatatagacaggataacctctcgatccacatatttgggattgacgagattcgctccgtcccggagagccgtctccgcgactttttcaaaatcttctttaagagctcccgtctgggagagtctcagaggcaggccgcacagtgtgtgaagttcctccgaaaggctgcggatagaccggatgcaggcttccgcccgttccttttccggtgtggaggcatagacttccgctccggccagatagagcagaaggtctgcatatctttccccgcagacatccatattatacatcatacagtgaggcaggagaatgttcatcgcggttccgtgaggaattctgcagactgcgccgagagcgtgtccgataccgtgaacgatccccaccatggaatttgagaaactgatgcctgccatcagcgccgcattggccatctcaatgcgggcatccgtatcagaaccgtcggcgacagcctttttcagactgccggcgatcgtccggagcgctgtcacggcataagcgtcgctgagagggtttttttgcagacaggtatagccttccaccgcatggcacagtgcgtccattcccgtggcggcggtgactttaggcggcatactctgtgtcatctgaggatctaagacggcgatatccggctggatatgagcggagataaattccatcttaaggtctctgttttcatcccggatgacagctaccccggtgacttcggaaccggttcccgatgtggtgggaataatgcacagcggtacggggctgcctgcggggaggccttcatatccggacagtttcaggatgtcgtcagagttctgtgacagaatcatacgcactccctttgctgtgtcgataacagaacctccacccagtcctatgatcatatcgatatcgttttttcggcagataccggcgattttgttggctgtggacagagaggagtctgtaggaatctctgtatagacgatcggtaccgcgatttcttcttccagaaggacggcggcgatacggtctgtcatccccagatgtttcagcgtctcgtctgaaatcaggattgcacggctgccgccaagcaggcgaatttcggctgccaaatgcagaagagcgccgcggccggataaaatttttgtacggctctgaaattcaaaaaattcagtcatagtaaaatacctcttaaaacgggaacttcggattgctgccggtgcggaacggcggagggtgttcggatttccggttcctgctgaatgagaattctcgaagcgggagggatgccttttcagactatcgcagaagcatcgaacggaaaatcgacatgtagagacgaatggaactgatttttttcggaagcagtgtttttaaaatcctgcgtgtgataaatgacggaaacagatatcgttccgcctgttccatgcagcgaaccagcgacataatcttgctgaaatcgccgttgacatacatcatatgcttggaaaaggattctgcgatgcccgtctgacccgtaaaaacggcaaaagcgaaagagagatccttaaaccgaatctcaatatccggaaatagattcctgtcgctgcagactgtgagggccttttcctcggaaatgacttttaaagacggtccccgggaagaacaggaaagctggatcaccgttccggtgtcgatcctgtcgaggtcccttctgacccggtcgtcgtaccggtacagaattctcagcccgtgatacagaaattttaatatgacggcgcagatgagatgctgcgtggtctgcttcggcgtgcggggaggtctgccgcagtctgccgctgtatttttttctgacatttttaacctcttaagatttcttctgcaaaaataaaatatagtttgattgcctaaataacatatacatattttagcaatgaccacttctttgtcaagggataccgtcgcaattttaatgtcagaaaagcgaaatttccggagagaaatgcatgaaaagacaagcctttggagatgatagcagaaaaaagctgtgattccgcggactcttccgtcggagcacgagaaaacggaggaaaacatgaattatcttcagattgttctttcatcgatctttgcggtgatcgtactttttctgttgtcaaaactcatcggtgcaaggcagatttctcaaatgagtatgtttgactatatcaatgggattaccatcggatcgatcgcggcggaggcggcgatttccaaaggtcaggatgttttggagccgatggccgcaatgatcattttcggtctggctacacttcttctctctgtagctgcggataaatctatcgttctccgccggttcatcacgggaagacctgtctttctcatgaagagaggaaaacttttcaaagagtctatgaaaaaagcgaaagtcgatatgagcgaacttcagacgatgtgcagaaatcagggttatttcgatctgtctcagattgaatctatcatttttgaacccaacggtacggtgagcattttgccggtgagcagtcagaaaccggctcctgcggcagatgcggaggtacaggtaccgcaggaaaaaattccagcgaacatcattatcgatggcaaaattctgaacgaaaatctgaagaatatcggcagggacgaaaattggctgtcagagcagttgaaaaaacaaaatctgaagtcttctgagatctttctggcggtctgcagtgatgatggtcagctgaaaattttcgaatacgaaagagataatggaaaagatatcttttcgtaaagcttaaaaaatgatagaataatcacagttttgacagcgtttgcggttgttttgaagagaccgatatttatgaagagatctgaggagaagtcagatctgtttttaactctgactgctgcggatcgcgctgcccgtatccgtatttgcaggtaaaacatcgtaaaacgtgataattaagtggaaagccccgccgccggacggcgaggcatttttcatgcggaattatcgtacagaaaagaaatgatagaaataaagaaaggagattacgaatggttttcagctcagcgatctttctcttcgttttcttccccgcggtatttattttgtaccatatcgtgccgggcctcaaggcgaaaaatatcatactgatcgtcgccagtcttgtcttttattcatttgggcagcctgagtacctgtttttgctgttggtctcggtatttatcaattacgcggccggatgggcgttgaccggtgcaaaatacagaaaggggatattggccgtcgcggttcttctgaatgtaggactgctgtctgtgttcaaatatctcgattttgcgatggacaatatcaattctcttttcggcatgtctgttcctctgccgggaatcgtactgcccatcgggatctccttttatacttttcaggggatgtcttatatcatcgatgtctatcgggaccgattcatgggaacccgcaattttgcaaagctgatattgtatatctctttctttcctcagctcatcgcgggaccgattatcaagtaccatgatgtagcggcgatgatcgatagcagggagtgtactgctgaaaaaacggcttccggtctgagacgttttatcatcggtctctcgaaaaagcttctgctggcaaatacggcgggcgccgtagcggatcaggtgtttgcgctggatgcgggaagtctggatattcgcatcgcttggctgggagctgtctgctatactctgcagatttatttcgatttcagcggttacagtgatatggctatcggaatgggcaggatcttcggatttcattttcttgaaaatttcaattatccgtatatctctactacgatccaggaattctggagaagatggcatatttctctgtcttcttggtttcgggactatctgtacatacctctgggcggcagttattgcggcaaggcgcggacggttttcaataaatttgtcgtattttttactaccggtctgtggcacggagccaactggacttttgtgctctgggggctgtggcacggaatattctccatgctggaagacatagggattatcccgagaaaaaagattcaggggcggatcgtcggacatatctatacgctgctgatcgtgatactcggtttta

SEQ ID NO: 3236 - DNA, 2203 bp, Unknown
  16S sequences of unknown bacteria
tctcaatcgctattcttttttgatactgtaacatatctattgtaatcgtacaaaatcggttttaagaaaatgccaaaagggtattgcattttttttatttacatgatataataaagcgaatatgaaattgaccgtaaatgaggtgatatagaatgaagcagggaatccatcccgagtacaaggaagtgaccgtgcgctgcgcttgcggtgagaccttcacgacccgtaccacgaaaccggacgcaaacggtgagctgcgtattgatatttgctcaaagtgccatccgttcttcacgggcaagcagaagctcgttgattccggcggacgtgttgacaagttcaataagcgtcgcggcatggcgaaataattatctttacggaaaatcggctggctcagccgattttttgtttacataaaattcaatacttcaaaggtgtcgaaaaaagtaaaaaagagaaaatctgcgtatattataatgtagtaaatataggaggtgcagatttgacagtcagtgaacgtttttgcgagcgtgaaaaggaaacactttctccgagggcatttctgacttcaaatacacgcggacgcgatacatattgcaagccatgcccgaacaggacggagtttcagcgtgaccgtgatcggatacttcattcgaagtccttccgccgtctgatgcataaaactcaggtgtttctttttcctgtggacgagcattacagaacgcggatgacgcatactctcgaggtcactcagatcgcaagaataattgcacgtgcacttatgctgaacgaggatctctgcgaggcggctgcgctcggtcacgacctcggacataccccgttcggacatgccggggaggacgttatgcagaagtgcttttcaccggattttacgcattacaagcagagcctgcgcgttgtggaaaagcttgaaaacgacggcgccggtcttaaccttacatgggaagtgcgcgacggcatcgtaaaccatacgggcgagcatatggcatcgacgcttgaaggcgtgatcgttaaattcgccgaccgcatcgcgtacataaaccacgatatagacgatgcctgccgtgcgcgcattatgtcgatcgacgatataccgcgcgatatactcgacgttctcggaacgggacattccgagagaataaacacgatggtaacatcggtcatagacgcaagcacggattccgacacgatcgcaatgaccgaagaggtggcgcaggcgacaaacgccctccgtgattttcttttcaaaaacgtctatcacaatccgatcgcaaaatccgaggacgataaagcgcaggagcttctttcacgcctgtttgaatattatgttgagcacccggaaaaaatgccggatttattctacaaaaacaccgagatcgaaccggtcaagcggtgcgtgtgtgactatgttgccggcatgaccgacagatatgcgatcgacctttacaaagagctcttcatacctgcggtatggagcgttccgtctaaaaattactgataagaggaggggagggacttgataccgcacagcataattgaagatttgaaataccgctgcccggtcgaggatgtaatagcgtcctatgtccctctgaaaaaggcgggcagcaatctcaaaggactttgcccgttccacagcgaaaaaactccttcattcaccgtgttcacacaaagtcagtcgttttactgcttcggctgcggagccggcggagatgtcgtctcatttataatgcgcgcggagaatctcgattacgtttcggcgctcgaatttctcgcaaaccgctgcggaataacgcttccggacgaacgaaacgattttcgtcagacggggacgacgcgaacacggattcttgcaatgaatctcgaagcagcgaaattcttcagaaatgagctttttgaatcggcggagggcgaggcggcacgggaatatgttcgtcaaaggcagttgtccggcacgaccgtaaaacatttcgggctcggatattctccgaattcctttaacgcactgcggaatcatctttcctgtgcggggtataccgacgaggagatggctgatgcgtttctttgccgccactccgagcggacaggcaagtattttgatcttttccgcggcagactcatgtttccgataatcgacaattctggcaatatcatcgcattcggcgggcgcgtgctcgacgat

SEQ ID NO: 3237 - DNA, 3414 bp, Unknown
  16S sequences of unknown bacteria
ggggcggttgagttagtcagcgggtcagggtgatctctccggcggccagcttattgtagatatccatggcctggttctcgaattccttggcattgttgccgaaggcaccgtaggagagaaccttttcggccgcgccggcagagtaaatcttaccgccgaagctgccgtttacccagtcctccaggccaaggctgatgagggcgacgttatcggtaacgatgctcgtcaggatcaggtccgggttttcctggaggcagtccgagggctgggcgatgccgtagcggtccgtatgctccgccgcgccctcccggacgccgacgtccacctgcccagcgttgccgaagaagacgtccacatccttggctgagatcatggagatagcgatctccttgcccttggccgaatcggtccaggagccggtatagccggaggcgacgtcaatggcggggtcaatgtactgcgcgccctgctcgtagccgttcaggcagtcgatggaggtcgtgatctcctcagcgcagacatagccgaggtgcttggtctttgtccgcagcccggcgacgaccccagccataaagcccatctggacattgtctgccttgatggagatgtagttatcgccgcagatgtcgccgttgaggaccataaagccaacgtcgggatagttgggcgcgacctccaggatggcatcggtatattcgttgccggggacgaagatcaggtcaaagcccatgttggcgtagtcgctgagggtcgtgacatagtcggccttgtcaatgttttccgtgtaagctgtttcaaaattgtactgcttggcagcttcgaccatgccgccgtagcaggcttggttccagccgccgtcgttgatcgaggcgttggtcatgtaggcgattttccccgctgtgccgccggaagcggcggagccgggggcggcattgtctccgcagccggtaaacaggcagacggtgagcaggatggtgagcaaaagtgatgcgatttttttcatagtgatctcctccatatggttttatgtggtaggggatacacacccctgatgggacgggatcagcagccctcccgggcgtagggctggccgttggccttggggccgctgctcttttgccgcataaagacgagggcggcaaaggtgcaaagatacggcagcatggccagcagctggtacggcagctgcagcaggacctgcagccgcagctgcagcgcgtcgacaaagccgaacagcagtgtcgccaggaagacgcccaggggcgtccagccgccaaagatgacggcggacagagcgataaagccccggccggtgaccataccctcagtaaaggtgctcatgtagcaggtcgtcaggaatgcgccgcccagcccagccagcgcgccgcagatcaccgaggccagatacttgacccggttgacatggatgcccatagtctccgctgcccggggatattcgccgacggccatgaaattgatgccgggccgcgtcttataaaagaagaaccaggtgccaagcagaagcagcaggctcagataggtcatcggggtggcggagaacagcgcgcccaggatgggaatgtccgagagccagggaatgtgaatattctgcatcaggttgacggagatgagcgtatccgtcacgccgaaatagcgtcgatagagataggtcaccagcgccgggccaaggatattcagcgccatgccgttgatgatctgcccggcccgcagggtgatggtgcagaaggcatagatcatattcagtgccacgccgcacagcgcacccagcagcaatcccatccaggggctgcccgtaaggcagccgccgagaaatccggcgatggtaccgatgctcataatgccgtcgaggccgatattcgttagtccggcgcgttcggagtagagctcgcccagggcgaccaggagtagcggcgtcatcatccgcagggtcgccccggtgatgttgtcgaggaagaacagtgctgtcatcgtttggcctcctttcttttggcaaagcgggcctggagcgtttgaaatactggcagcgcgacaagggcggagccagccacggcgaagataatgataatgccttgcagaatgtcgacaatggccgttgtgatgccggtggcgacctgcatcgtattggccccgcagcgcaggacggcgaagagataggcgaccagcagcgttcccagcgggtgcagctgcccaatgagggcaatggcgacgccatcgaagccgtagcccaggccgaagcccgtctggagccggtaggacgcgcccagcagttcgaccgcaccgcctagtccggcgatcataccagagatgacgaaggaaagaatcatgtaccgctccacggcaaagccgttgacccgggcagcgtcccggtttacgccgacgacgcggagactgtagccttggtaggtgtgaaacaggaagtagtagacgagcccgacgaaaagcagcgccagcagaatgccggtgtgggcccgggtcgagccgaggaagcgggtcagcttgatctgggcatcgacggcggcggtttggggaatgcggtcctccatcagggggccggagtagagataggacataaagagcgtcgcgatatagttgagcaggatcgtaatgatcatctcatttgtgtggtgctttgccttgagatagccgggaatggcggcccagatgccgccggccagaatggccagcacaaggcacagcgccagccgcagcggtgcgggcacgccggggaaggcggtcccaaaccagcaggcggcgatggcccccatgatgaattgcccctccgcgcccaggttcagcatgccacagcgataggcaaagacggcggcaaggccggtgaagatcagcggcgtcgctttgaccagcgtctcgctccaggactgcaggctgccgaaggcaccctggaggaggtagccataggcggtcagcgggtcacgtccagcggcggcgatgatcaccgcgccgagggctagggagaggacgacggccagcacgggcatgatgatcctgcgcagcaggtcggttttggctgctttcataagcgatcctccatttccatgtgatgttgccatccggcagcgattcggtctccgcggtgcgcctgtgtggagaccggccggacgatttgcaggaagattggacttggcactattttaacacaagacgatataatgaatctattgacaaattaaaagaataatactagaattgttttggctaatatgtatatatcctggcgaataacttgcggaaatttgacgaaaaagtagcaagaaatatcgtatcagtactactgaattggagcggaaaaaccagaaaaatggaggggaagccgctggagaccgggggattttccttggcagctgccagaaaagctggggacggcatagattgcag

SEQ ID NO: 3238 - DNA, 21079 bp, Unknown
  16S sequences of unknown bacteria
cgatctcgtccttaagcatttttacggctaataccgatccgtctacttttgccataaataatctcctcatcaaatttatttaggtttttgaaggccacctataagcctgtttttttgaatttcagacctttctatccgtctgttacctgcatattaatacattttcacgttcaaaaccacagtttttcaggtttaaggttttttttggtcaaatctcgtttttttttagattgaatgagtgatatatgcagagtagaatattttcataaatcaaacaggcactggagaattacaatgaaatattttgaaaagcaccctcttcctcttgtcattacaggagtgataggagtttcactatcggcaattttcgtgcggtattcgcaggcgccggcactcataacggctgcctacaggcttatatggaccgttctgattatgacgccggcagttcttgcaaacaaaaaggtaattggtgaaataaagaatatgaaaggcagagcgctgcttctctgcgcagcaagcggcatttttctcgcgtttcatttttccctctggtttgagtcgctcaatcttacgtctgtcgcaagctccaccgccatagtatgcaccgaggttatatgggtagctctcggctactgcatatttatgaaaggtcaacttgtgacgaaggctaaaatcagtatagcgataactgttgcaggaagcattgtaattgcaatggcagacggctctgccggcggaaacagtctgtacggagattttctcgcgcttctgtctgcgcttttttcaacggtgtacacgctcataggcaagcaggtaagaaagaatttgagtaccacggcatatacttttatagtgtattttttctgcgcggtctcactgtgtataatgattcctgtttcgaatatctcctttaccggctacggctggtccgcaatcatcgtagggctgctgctgtgcgttttttcaacgctgctggggcacagtatattcaactgggctataaaatactattctccgtcatttattgccgcaatcaagctctgtcagcctgcaatcgccgcagtgtttgcatttatactgttttcggaaattccatctctgcctgttatcataggaagcataataaccatagctggagttgtaatatattcaaaaacagaatcggaataattcaatacggtatgtgcataaaatgatgttttacatatttacggcattgtttcttaaaatttttcatttgccacctttaaagatatagacgatatacaaattcttttcatcagcaaattacgttcatatcagaagtgcgcttcatatggactcttgatgtattgtaatataatgcaaccaccgattggccttaatgtcgggctgtaatgtcaaatatcattttattctgcatataaagtaagaccgctttacttaactggtaaaacggtcttttatattgactttattatgcctcatcatacagcattctgttacatgtaaggtatgcattttcggtaggagttattccctttgctttagcctcggcaaaattattcagggtggagccgggcagggtgcggtcaataatgtccacaagctgattatatgtcgctttatcgccctccatatactccagcgccgcgcacattacacctgcggtattgtgccaccattctgtctgaaatacgatgcccgcatcattcaaaagctttgcaatctgtatttcttcatctatgtcagatgcttttatctgattgttggcagagccccatatgtatctgcatttaaacttttcgatgttatcctctgttataatgcctcccaccgcgcacggagatataatatcaacatcaagatagagcgcctccgatacatcggcagcctttatgtctttgcccggatttgcggctataaatttatctatatttccggtattggtatctgaaacatacagtctgacgccgttgtctgcaagcatctgcgccatatgcattcccaccgcgccaagtccgattacaacagcgcttttgccatcaaggtcaggttttccctctttgaattcaacagcttttttgagcgtttcaaacacgccgtaggcagtaggcctgccgctttctccaagaggtgatgacggtccgctggtgtagctcatcgaatagtatctgttttcgacgtctgctatctctgtaggcattttcatatctgcacctgtcatacatctgtttctgtcaagggcgtatgcgagaaatccaagagtcttcatatcctcaaggtcaaccggagtcatctgaaccgtgcttttgctgcctccgaagctgatatctccggcaatgcatttcagactcattcctctgcttatggcaagaccgtcctttatcatatcaagctcattgtcctccggctcatatcttctgattccgtcgataaacattgcgccgcgtctgttatttattcctcttttgacgctgtgcctgtggcatacaaatttaatatccctttcactataatagtataaggtaattccaagatgttttccttttttaatcagtgaaataattgtatcaagatagtcctccagcccgtatttcctgtacagaagccttgtctccgctgtgttaagataacgggcatcctcagtcagtatgtcatctgcgcagaaagttctgttgtactgtgaaaagtctgtatcgctttcccattcctttgcggcttcgagtctgacgatatcccgcttccagttatactgtattctgagggtagtcagactttcttttttcaatggatcaataatgcttgtcatattcgtttcctttccggctttaagctctcttatacagcagtatcaggtgagcatttcaaatcctgcccacctgaaaaaattatatactattccattataaatctgccaaaatggttagggcaatgatattccggattcggaagatcaatgtaggcccatgagaagtagtgaggtgatggcgtcagttctccgcatttgtagaagttgcctctgtatactgcgccgctgcctaagtcaatatctccgtaaactctgtgtatgagttcaagggatacgaaatattcaacccaccagtattcaccgcttcttccggctgttatttcgggcagcataccaaatctctcattaagcggaattctgccgtttctgcctgtaccggtgcagcagttgattgcagcgcaggcagtcgcttcaaggttcatatacccctcggtatttcccggcaggaagtccataaaccattcaacacagctgtcatcgcatacatcatcgctgaagtcatacggtttgtatgtcatacgtgggttttcttcttttgcatatatctttgcgtaaaagcccctgccctctacaaatatcagctgcgcatagcagtcggtttcatatgtgctttcccacagaatattgtcaatgtgcgctttggcagcgccctcataatctttattctgctttcttttaattatatatgtttccatttcttttctccggtctgtcatacaatatcatcatctatgattgcttttatggaatttgcatattccgacggggtcatattaatagtctttttgaaaaccgtagagaaatagtgaggcgtactgaaccccagcatttcggaaatctccgtgaaattatatgcattttcgcgtatcattcttttggcctcttcaatcttgagcttcgtaaagtatctcataaccggctgacctttaatctttttaaaggcagtttccatacttgtaatgctcacgttgaatttatggcagaaatcgcttctctttatccttttgtcaaggttttttttcatataggcgattatctcctccacaaaatcagactcgaaattgtcacgaggcattgactttgatctttcgtatttgcttacgaattcattatcccttataagtcgtatcaggaattcctcaagatttattttgagaagctgctgcgctcctatcagcccgtccttctttttttccatttcaaaggagtccagcctgtagatattatccggaggcattacaaacgcatttttggattcgtacacgattgatgacagcagctctttgtttcttttatttattgaaactattttatcctggaaataattcatagcctcgctgtcacagaagaagcagccgacaaggacatttggcgcaataataccgtctccaaacaggtcatgcgcctgtcccggtttatgaaacaccatttctccctgcatcagcgtaaaacagttgtcatctgcaattatcttaatctgacccttgtccacatatacaaattcccagaagttatgcacttcaggcttgttaaatattacatcgttctggaactcataatatctcatggcaacgatatcctttatttctataacggattccagtttgctttcctgaaaataaatataatttatattactcatctttttccctcacatgcataacttctttatattataatacttcttttacatatttaacaggaaaacagcagcgcatccgagaataagtgctataatacctgtctttgtaagtttttccttgaagaatatgaatgctacaagtgaagtcagcagcattgagcctgtttcaactgtagggtacagaactaccgcaggaatatcagctgcagcctttacatataatgcgtttgcaataccgtttgtagctgcctgaataactgcaaacaggaaaatcagcttgtagttcagttttgataacagttctgtttccgcagcatcgtctcttgtcttgtttttcattacaaagaatcctactgcaaatgtcagtgcgcagaatatatacagcattcccataaactgcgcattgttagggttttcaacatacgcatagtgcatattgaatgtgaacagctgcagaccgtacatagcaaatgcaccgaatgccagcaggaaccatttgagtgtaggtcttttgtcaacaggtcccatattaacgataatcataacaacgattgtaagtccaagtcctacaaactgaattcctgtaggaagctgtccaagaaaaatacctgccagtacaaccggaacaataggtccaagccccagtgttactgatgacagtgacagcggtccgtggtaaagcgacattacataacagaggttgcaggcgccggcagttatgcctccgatagccgcaaacagtatatccataggaatgaaagtccagtcgccctgaatgatgatggtaatccaccagccgcacgcagtcagtaaagaccacataataccgaacaggaaaggaataacgttggagctctgcgcattctgcagagtcatcattttattctgatttacataagatgctgaaaacagtacagcagttaatactaaaaataacgtacccatatatatgtcctcctaaataaaatattagagatatttttttaattattcttcattttcatcttttaattccacaatcatttcaacttcaatcggaatgttggcataaaaagatgttacgccgatagcagatcttgcgtgtctgcctgagtcgccgaatacttcaacaagtaaatccgagcagccgtttgcaacctttggctgatcatgaaaatcaggtgttgaatttaccatgcagagaagctttacaatctgctttacacggtttaagcttcctatatgtgattttaatgatgccatcaggtttattgcgcataagcgcgccgcttcctgcgcatcttcgatggaaatatcctctcccagacgtccggaagtccacgatccgtcaggatgctcaggaccttcgcctgatacccatacaagatttccgacctgcctgcataaaacaaggttccatgcgctggtatcaacaggaggaggagtcggcagttcgattcccagctcctttaatttttcttcaggtcccattacctttttaatattttcactcataatttcctcccgaatattaatagtctttttctacttttgcaacaggcctgccgttgagcttttctgcaactgaagtcataccgtctcttataaactccgcgtcatctccgattatcatcatattgacgcctcgtttttcccacctgagaacttcttccggatctccgctgaaaataccgacgcacttgttatttgccacgcagatatccatagcgtcctgcgcaagctgatctatttcctcctcacagtccgaataaaatcttcccgttgactgtgaaaggtcgtttcttccaactataaatccatcgatgccttccattttgcaaacctcttcaagctcgtccaccagagatttcttttccagcataagcatcagtaaggtatcgtggttcgccctcttgacataaggatcaatctgagtataatttttacttgggcggtacggtcctacacctctgtgaccaagcggcacgaatttgccctcttcaatacacattctggcttcctcgacgccgtgaatgttaggtactatgactccgtcagcaccccagtcaagtgctttcttaataaaaggtccgtataccgacggtacccttactatgcacagcataggtgagtctttaagtgcctgaatagctgcgggcagtgttgtcgcattccatagggcgtgttcccaatctaatacgcaccagtcaagaggtgtaagggccgatgcctctactactgccggagatcccagatcaaaagaagttccaatcatattttctcttgcgcggaatttctctattgcagcgcttttaggtgattttccattgttgttgctcataagtttactcctttcttaattttcttcttttatttttccaaacagaaacgactctgttcctctcactttcgtatctacagcaaatattcctcccgcaagcggctgctcttttttttctttttcgctgagctctgctcttgcggttgttatgtataacgtgctcatatctcttccgccaaaggtacacgaggttacatttgaaaccggaatatttatgcggtctatgatttctcccgtatacggattacagcagagaatgctccagcctccccacattgcaacccacagatttccgtcagtatcaatagtcattccgtccggcataccctgctcttttgtgaatgctattacggttcttttattggaaatcgtttcggtctcaatgtcatagtcaaaggctgcaatcctgtaggtagggctgtctatgtaatacattgtcctgctgtcgccgctccacgcaagcccgtttgagatagtcactctgccgagcttttcctcatatccgcagtcggctctgaaacagtacagtccgccgcattcggctttttcatatatattcattgttcctacccagaatcgtccgtttctgtcgcatttgccgtcgttatatatgttgtcttccctgtcttttgcaggattgcatatgaactctttttctccgttatgaagatttaatctgtaaataccgtcttcaagtgcacatatcatactccctgaattttcttttgctatggagccggttttctgatcaagctgaaaaacctgtttttttctgctttccgggtcaaagctgtacactcttttgtaatcggtgtccacccagtaaagcatctgctctctgtcgtcccataacggacattcaccaagctccataaattcatcaaggatcagtctgcattcttttttcatcatttatcttcctgccttttatgaaagctttataatctgtccgccgtcaacaacaagcagatggcctgttatatatgctgaatcgtcagatgcaaggaaaaatgccgccgatgctatatctgaaggcttgcctactcttcccataggaattgttttgagatattctttcagccattcttcgttttctatatctgaacggttgagtcttgtatcaataaatcccgggcatatagcgttaacacgtatattgtattttgcaagctctaatgccattgacattgtcagcatattgatgccgccctttgaaacgttgtaatgtgcaatctgcgcctctgccgcaagtccgtttacgctggacatatggataattgaaccgccgtccttctgctttgacattatgcgtcccacagcctgtgacataaggaaatatcctttaaggtttattcccataaccttatcccagtcctcttcggggatttcaagaaaatcggcccaaggacagattcctgcgtcgtttacgaggatatctatatgtccccatttgtcggcaactgcatttacggcattgaaaatctgctcttttgagagaacatcaaccgtaaatgtcataacatctccgcccatgcttttcatttcagcctcggttgcctcaagcatgtccttgtcgatatcaaatatcgcaacctttgcattttcttttacatagcgttcaacaatgcctttgcctatgccctgcgctccgcctgtaactattgccactttaccttctaagttcattttgtgcctccttatttaatgccacaccattcgatgatcagttctgcataccagcagattaagtctctgtatgatttcaaatccataaattcgtcagctccgtgcgcattgccgccctttggtcctaaaaccattgcaggtgtgctgctgtaaaggttgaatataaatgcgtcacatgcaaacggtgatcccgcaggttcagggaattcatctccgagaactttctttcctgtctgttctgccgcttcaaggaatttatcagtaagctcacagtccttcatttcagtacctgtcagaaatgcgtgtacaggttcgagtaccggttcacaggctgtcagattggtgtatttatctgcgctcttatgataaaaatccataatatcgtctacaagctcctgatagctcattcccggatatgtttcaatccagaaagcaactgtagcttccggcggattgtcatcaataatctgaccttctaccgtacccgatgaaaatccgcttattgaacagtcaagttcccagtctttgtcccaccatttcggcactgtaatgttcttgtttctgtattccttatagtctttcataattgcgacaaatcttgccgcgccttcaagggcgtttacaaaggtttctcctgcaaaggatatacctgaaactccgctgaatcttgctctgaatgtacagccgccaagatgtgcagggtacattgtaaggtttgtaggctcaggtattaccgccatgtcgggattaggtccgtgaatacgtcctgcaagtgttcccattgctccgccgtattcttcgtctataacggtttccacatagacagggcctgctacgggaacttctaaatccttaaggcattttactgccattgcagctgccgcaagtccgcctttcatatcatatgagcctctgccgtacaacttgccgtctttcacttttcccgacagcgggctgtctgtccagtcatcctcgtttccgaatgatactgtgtccatatgtccggagaacataatcgagtgtcctttttcctcaccgaaaaaagcgctgattgtgttaggtctgtccgtataatctcttgatttgaaatatgccggatgctctgtaagcccctctacttttgatacatcgtacacctcaacatctccgcctattttcttcatttcttctgcaaaacgaagctggcactgtttttcattacctttcggcggcaggttgcgtgaatcaatcttaagtaattcacttgcaaagttttcaatgtaatctttgttttcttctgcccacgtattgatgcgctgtgttaattctttgcgctccataaattttcactcctttccttgtagttaatatatttatttttcatggcgaaccgcagttgcatctgcaattacttccatttcaagcagataatctttcatatccacatagcctgtaactcttgccggatacggcttgctgaatatttccgaataaaccttgtcatatccgtcaaagtcctccggtctgctcaggtatgtgcttactcttacaacgtgatcaagggtaagccctgcttctgccagaatttcctcaacgtttttcaggcactgtcttgtctggtcttcgatggtgtctcctgcaacctcaaaggattcaaggtcatctcccacctgccctgaaacaaataccaggttgcctgctcttactgcctgtgaaaatgcaaacgggaaatctctgtttttttcaagctgatatgtaatcgacattttttcacctaattataaaacctttcctctggcatcaattttaatggttctttcaacgatgccgtttcttactccgtatatatagtcgtgcatatttacagctgcacagcagtggttcggcagtatttccagtctgtcgcccactttgagcttcacgtccgacggtactttcataattccgtgctcctcgcataagtctgatatatatatgcgatggtctgttctgcacattccataaccctctctatgaggacagccgtcactgcacagcgttttgagacctgcatctgctattgcgcttccctctctcggagtgcttacaacagttgtcagtatgtgcattgcgcattcatattctgatattattcctgtggaaagctgctggtcatctccaaacacatatgctcccggtcttacttctgtaactccgctcatttcgcctatgaacttggatgttggcgttgagcccacgcttatctcttttatttcaataccttctttctccagcattttctgtgttgtaagaagcgcatcagcttctttgtgagctgctgctcttatgctgtcctccccgacataatcgtaggaaaagcccgcgtgggttattaagcctatgatttcaatccccggcaaccctattatgctctttacaagttccactgtttcttctccgggctctctgccgcatctttgcagtcctgagtttacctgtacataggtcttgatttttctgcccattgatactcccagatcagacagtccctgcgaaacctcaacactgtccgtgcatacgattattgaggctcttttaatgagtttttccagtcttttcagctttttttcacctacaataggataagcaacaagtatatcatctattcctccgttaaccataacctctgcttcgctgagctttgcaacagtaattcccgctgcaccgtattcgagctgttttttcgcaatccatatgctcttatgggttttgcagtgaggccgcagcttcactcctgcatttcttgcaagctctgctgtatgtttcagatttttttccattatatccaaatcaacaattacagcaggagtttcaagatcctttacatattccatatgaatattcctcctaacttttatacaaaacatcttcaaaacatttacacattatctttataacccaaatttgcggttttgtatttataaaataaatcggaatttgtctaaatttgtgcaatcctcaaataattcaagttccggtttgttgcttcaaaaacagaaaaagggcactgcttcagataaatatctgatacagttaccctctaattttatgtatattatgttctttatttatgttcctaaaactctgtactcatctattactgttttcccccatttctttaggtaaaattggcacccctgccggcacccctctacctggaaaaagcccttttataatggaaataatactatttgtcagacaatttgtcaacgtgtaaataatgggaattaaaaaagaggcgctctaaattatcgtgtgggtgtgggtggacaataaattatcgtgtgggtctttttctcctgttttttcagaccgtgtgggtgagctttaaattattgtgtgggtaaaaaaagtccttcacgttatgattatcttgcttaataaaaaaacgtaaatttaaaagataccatttactatgatatatccctgatataaaagcttatacgctgccacgaaaaaagaatttagcacgaacataagcgtatcaaacactctacctcgtaaggtagtcttcagatgatatctgctataatgtaaagaaacgtttctgcaaagaatacaaaaaaagcaacacgtccatatcataagacaggaaattaaaataatcaaaatagcacttaaaacaaccattttgcggttgccttaagtgcctgattttgatttaaacccacacgataatttacagtacctaaaagagcctgcagtcagacccttttatcgttaaattgatgtatatattttaattttcgtctattcaggcgttctttttgcctgcaagtctgtatgtgaacagcttgcctgcagacgtcctgcaaagtgccgtagacagcgcaacagctataatcatacctacaacaaactgccctatattccaaggtattcctagcgcagccgctgcccagttgccgtacattataccctctgcagcaaaatatcctgcaaccataaacactccgcctgccgccatagctataatctgtctgataactgatatatgctcgccgcctctatcaagtataaggcccataatcatcgccattataaatttgataaccagtgtccacggtgcccacattgcaactccgcagaatatatccgccattgccgagcctaccgcagttgccgccgcgccgtatttccagcctagcagcataactgaaataaatatcattgcatcgccgagatgaacatacccttgagtcaaaggaataggtacctttacaaacattgtaagaactataatcatacacatcataagcgccgtcattaccagcttatttgttttttctgccgttgtcatttgcaaatctcctttatcataatcctatgtatatattaacgtataattgtatatatttaaatatgcagactccattatttttatatatacaatttgactttttcagcagtttgggctatcatttaaccacattgttatttctttttttaacagaatagatatacagaggagttatgtatgaaagctatcattcccgattttgaccttaaatcaacaaggcccatatatcttcagctttacgactatatcaaatcagatattctgacaggcaatatgctctgcggagagcgtctgccgtcactgcgctcccttgccgaaagccttggcatcagcattacaacggtatctcaaagctacaatcagctggcagttgaagggtatatagaaccccgcccccattccggctactatatcaaggatataggcaaaatcccgtcagcagatgccgacaaaacgatttccgcatatgaagctccggttgacataccgggaaaccacatatatgatgtttcctgttttgatttcaacaaatggaaaaaatgctccaacaggatttttaccgaatactcgcatcttctcatgtttgagggtgacccgcagggcgaagctccgctcaggtatgaaatatccagatatgtattcaacgcaagaggggtaatatgcagtccggagcagattgtaataggcgccggcacccagcagataacaattcagcttacccgtatactaaatgagatgggtataagtcacgccgccatggaggagcccggctatatacctgtacgaaacatatttaaggacaacggctttgtaatcacgcctgtccccgtaaaagccgacggaatatgcatcgaaaagcttcccgacaatatccgctctgtcgcatatgtgagtccgtcaaaccagttccctacaggagccgtaatgcctataggcaggcgccgcgagcttcttgaatgggcctacaaaaacgacagcataatcattgaggacgactatgacagcgaactgcgctatttcggtcgccccgtacctgcaatgcaaggtatagacggcggcagatgcgttgtctatctgggctcattttcatcaacgctgtttccgtcaataaagataagctatatgatactgcctgacaaaatggcggatatattccagaagataaaatcaaactacacccagacctgctccaaggcggagcagcttacactatctctttttatggagaacggcatgtaccagacaaatataaagaagctgcgaagcctttattcccataagctgcagaaaacccttacagctatcagcgcctgcggcagtgacagtgtaagggcagtcaatacttcctcgggaataaatataatactggaaacaaaatcgcctgcggccgcagaggctctgtgcgcaaaggcagccgaaatgggccttgatgtgcagctttcaggcgaaaacacccttatattctactacagccgcatacctctggaaaaaacagacgaactgatttcgcagtggttaaattaatgcattcattataacaggggttatatatgtttcgactacagcggcaatcataagaagcggcactgcgacaaacagaaacagcttgccgatgtttttgaaaaactcccctgctcggatatgggacagctttcccttgtctaatatcttctggcatatgaacaggcagacaattatacccattgagataccgaggcatattgcagggatttcaaaaatcccgtgaggcagtatgcctcctataaaatatgccagcaggttgtcgctgtgctgccctataaccgcaaaggccgaacccattatcgctccgtttgataaaagcactattgcaggcaggaaaaagaacggcacaatgccgaggacaacagccatgcctgttgctctgagattatttaaaaacagagctacaaccgatatctgaccgtcgtctttaataagtccgctgtcatctgccatatccataaacgcacctatcagattatttgctatatctatatttttgccgcatacatagtagcctgtgatagacagtatcataaataccgctatacagataatgaatgttaccagtatgtatcttttgaaaaatacttttaatttcataatatctcccttttgatttctcaagtatataattatatgcagatattataccaaaaaaagaacggaatgaaaacaaattatgctttcattttaaatccgttcgctcaatataacaggcggccgaattacccgaccgcctttttgtcaccgatatattattcgttcatttcagggttcatagccttgtcaaacagctcttcgatgtccttgtgaggctctttgtctgcaagtgatgcaacaacagcacagataagtcctacaataaatccagggaacagttcatatattcctgttgagcctgaaaggaatatgtaccacagcacatctgttacagctccgcctacaacgcctgcaactgcgcccttgtaggtaagtcttctccagaataccgacagaagtattacaggtccgaatgatgaaccgaagcctgcccatgcgttttctaccaggttcataatcgcctgcgcaccttctcccttgcttgaagctatgatgaatgcgataacgcatacgataaatacgattattctgcctatccacaggatttccctgtcgcttgcattctttctgaagataggcttgtatatgtctgatgtaaatgagcttgaggctaccagaagctgtgagtctgctgttgacattgatgccgccattatagctgccagcagtattcctgctataaatgcagggaacagctttcttgcaaaggttacaaataccattttctgcgcgcctactgtaagaagctcttctgcaaggaacattcttccgaagtatgctacaaggcaggttgcaagaagtgcaaatactacccatatgatagctactgtagcgctctttttaatcattgaaggtttttctattgacataaatcttacaagaatgtgaggcattccgaagtatccaagaccccatgcaagacctgatatgatttccttccatgatgcgctgaatacgcctgaaccgaatgaacattcaacagactgtccgcttactgcatctgtgtatgagtaaacaacatctaatgccgctgtatccatattctttgttgcaacaattacaataggaactgcaagaagcgctactaccataagaagtccctgtatgaagtcagtccagcatacagccttgaatccgccaagtgatgtgcagataagcattgcaactgcaaatattatcattgccgctctgttgctcagggcagggaatattgtcgtaaatactgaagctcccgcaacaaatcccgatgccacataaagtgtgaagcatacaaagaatattatcgcgcatataatctgcagtgtgtggctctttgccataaatctgttgctcagatactgaggaattgtaattgcatcacctgcaacctttgagaatttcctgagtctttttgctacgaaaatccagtttgccgcagtacccagcgcaaggcctattcctatccacatctggccgaaaccgaatgccataatacttccgggcagtcccataagaagccatgctgacatatccgatgcctgcgctgacattgcagtaacccatggtcccattgctcttccgcccaggaagtagtctctttcgttgtcactttccttgccctttacaaagaagtatattcctattccgattatcattacgaaatataaggcaaatgctaaaatttctccgttcatataattctccttctaaatattcaatcctatacttaagtttctcataaagtcctgtacattggtcacaatgcccttggcagcaaggcttcctctgtctcccagcttgtttgccgcaaattcagaggtatcaaccatatagaagtacagcggtctaattgtgccgtcttcaagcactctgtaagtcggcgtcatatttcctgccgctatggtatgaagcactgttgccatacctattactgtagttgcttttctgacgtgtgagcgtattgtgtcctgtccgatatatgtatgttcaaacacctcggggagagggccgtcatctctgattgagccgttgagcacaaacggtacattgtgtttaacacagttgtatataattccgctgtctatgccctcgccttctatgaaggccgggattgactcatatgtattgatggcattaattgtatcgagatggttgtagtgaccgttgaaatgctctctctgattgactatgtcgcagcccagcgctgtcccgagataagcgccctcaaggtcatgagtagcaagagcatttcctgcaagaagcgcctggcagtagccctgcgctataagctctcccattacccgtctggcttcaacatcaaagctgcaggccggacccagtacccatactacataaccgttgtttgctttttcgtatttcagaagctcgatcagatctttgtaatcctgtgtgaaagatgtctctctgcttctgctctggcgaaaactgaaagtgttctttacatcctcgccttctttttcccagcagtctgcgtggacataaattccctcgctggcatcttctgttctgccggttactatcatatcgccttctttgatatttctaaattcgacaatccttatttcctcaccatcccatacggggactgcgtccattcggctgtccttggcaagatgccatttgccgtctatcttaaaatattccggaaaaatagaatttgcgtgaaagccctttggcgccgccttggcatgcggtgcaaccatcagctttgcatcaggtgcctctgcaaatttcttttgtgtaaaatccggctctatgtatttagcaagtttaaaacccataatacacctctttctttctgacttggctattgtaacacatttaaaactagaacgaaacacagaacgaattctgtacattattccatatatgcaaaatgtattttcacatcgtatattgaaactacagcatttatatggtagaatacattctatacaataatgaatacgaaaatataaataaaaatttttttaataaaaacggagagattatgaaaaaaaactcaagaaacaccaagggaaaaattgtatctgcagcgtggcagctgttttatcagcagggctacgatgataccaccgtagaggaaatcgtagaggcctccggcacctcaagaggctctttttatcactattttgagggcaaggacgcgctgcttgcatctctgtcctatctgtttgacgagaaatatgatgagcttacggaaacaatggacccggagctttctcctgtagacaagctgatatttatgaaccaggagctgtttcttatgatagaaaacacagtttccgtagatctgctcagcaggctgttttcgacccagctcataaccagcggggagcgtcatctgctcaataccaacagaacctattacaaaatgctcagacaggtaaccgccgagggacagcagcagggtatattcaaagacgagctgtcaatcaatgatatagtcaaggcatacgccatgtttgagaggggactcatgtacgactggtgcatatccagcggcaactactcgctgtgtcagtactccgcaagcatgctgcctctgtttcttgagggactctgtaaatagtcaaaaaccgtcaaactgccgcacagcgaattgtgcggcagcattgttttaaaacgatattactcccagatgctccagaagtatttttattcctatcagtatgagaataattcctccggcaagctctgcttttgatttgtatctcagtccgaatacatttcccactttaagtcctactcccgaaaggataaaggttgtagaacctatgagcgttatggctgctatgatgtttacatcaggcagcagtccaaatgtgacacctacggcaagagcatctatactcgttgcaattgccatcagaagcattgtcttaaaggcaaatgaagcgtctgtgtgctcctcttcctttgagaagctttcttttatcatattaccgcctatgagcaccagcagtatgaacgctatccagtggtcaaaggctgtgatgtatttttcaaaggttgctcccagcagatagcctatggcaggcatcagcgcctggaagccgccaaaccacgcaccgattataaggtagtgggagggtttcagcctctgtgtagagaggcccttgcagattgatacggcaaaggcatccatcgaaagccccacgcctataagtataatttcgataaatcccatacattcctccaaaaaaaatcaggcataatgcctgaaaaaaacgagacttcaggcatagctcagctatagtccttgagtctcgatatttaatgcaagccagattttgcaatcagtatgttgacttgccacgcacaaagcgccatctactccctcaaatctttaatagaatagcatattataaaggtttcgtcaattcaaaatatcaggcggcactagtccagcacgctcagatatctttctcctgtgtccggaaggaaagctactattgtcttgcctttgttttcgggtcttttggcaagtcttattgccgcatttacggctgctccgcttgttatccctgcgaacagtccctcgttttgcgcaagggctttcatagctcccatagcctcatctgtggtaacagttattatctcatcatagatattcgtatcaagcacctccggtacaaagtttgcgcctatgccctgcagtccgtgaggacctgccttcccctgtgaaagcagcggtgagtcataaggctccactgcaacaattttaattttcgggttctgttttttgagatatgctcccacacctgtgattgtgccgccggtgcctattcccgctacaaatatatctatctgaccctctgtatcatgccagatttcaggtcctgttgcggcaaaatgggcagcggagttcgcatggtttacaaactgacctgctattatggaattgggatttgctttgtttaattcctctgcttttgaaacagctccggccatgcctttggcaccctctgtgagaactatctctgcaccgtatgccgcaagcagcttgcgcctttcgatgctcatagtttctggcattaccataacagccttgtatcccttggaagctgcaaccattgcaaggcctacgccggtgttgccgctggtaggttctataatagtgccgccgggtttaagagttcctgctttttcggcttccgctatcatattgagggcaggtctgtccttggcgcttccgccgggatttaccgcttcaaatttaaccagaagctctgcatctatattctcgattttttcgatgttgtttattctgacaagaggtgttcctccgataagttctgttacattctgtttaatatttctcatatctatatcctttcatatcctgtcgctttgccgtctgtgatgctgatgctccagcctctgcccgggtcgggcatccagctccagaatttatttatatctccctctccaaacagctcaaacataatagctgatataactccgccgtgaataatcgctatggagcttgcttctctgcccgaatgtctcagcgaaagcattttgagctggtgtcttttgaaaagctcttcaaatcccgtatgcactcttgcaagaaatccgtttcggctttctcctccgggcataggcatatcgcctgttttgtcatcgcaccatatgacatatctctcatcggggagaagctccttatggctcttgcattcaaactcaccgcagttgatttctctaagctcgggaattatcgtatactcaatatctccgtaaatggcattgagtgtctgtatgcatctgagcatgcccgaagtgtatatatcagaatccgcaaggtcagggtaaattccctctgcggcagatgccttgagcgctgctatgccctgatcaaccagcggtatgtcctttgctccgtaataccacctgttcaggtttccctctgtaatgccgtgccttataagatgtatatgtgatttcatagccttgtactcctcaaatctcttaatccgtttaattatatcatatgccgcagcatatgcaacctgcatacactgctctccatgcaaaattattcgtttttctctcgggaagcaatctgctgcgtgaactactccgacttatagaagtctgagcttcctgcttcaaccactactgcgttggctgcggtattacgcaactcaatgtcttacacaatgtccacaggcgtataagtttgggctaatt

SEQ ID NO: 3239 - DNA, 11375 bp, Unknown
  16S sequences of unknown bacteria
tcagctcctgcgcaacgatgcgccgcattcccagctgcgcaagatcttatattacatcctgaacaatcatacggtccgcaagctctgcctgcaggatgtcgctgcccacctggacatcagcgagtattatatctgcaagctgttccgcaattataccaatttcacctttacggaatttctcaacatctgccgggtggagcatgcgaaaaatctgttgaagagcgaatacaaggtgaaggagatcgcccatgaggtcggctttcagagctcgacttatttcggacgggtatttcgcctgtacacgacgatgacgcccagggaatatcgttcccgcttcatcttccgatagcggtcccttcttcagatcatgtgaaaaagcaggcagcgtttactcagctgcctgcttctgtttattgttcttgatgaccttctggcgggaaaactcttcccgctctttttcttccagcgcgtctgagatgaacttgatgtcatgctcaaagccgggaatgacgatattgcggagcgcattggctcgcttctgcgccttgcggatggcgttggccagacgatagacgctgttttcgacctcgaccagcgtaacagtcatcacctttacccgatgaaagcagagatacgcgtagtccagcttggaattggcatattccatgccgtaacagaaatccagcttctgttccgtatagtggaccttggggatctccacgcccatcacgctgtggtaggtgacatgcagaccgtcatctaccggaatggcttccgcgagattgctgatgacgccaagggtgatgttggcttcctgcagcgcctgatacgccgtctggtaggtctctgtgatctgctcacgcagcatgcgcacattttctacctgctccatcatctcgcgggtcaggatattgcgcttgcggtccatcagctcatagcccatggtggccagcgcattggacttctttgcggcaatcaggttgcccttggtcggaaagacctgcttgtttgccatcgctattcacccggtttcttcagttcccggatgatcggatccgggctgaggtggaaccttgcggctgcgcgctgcggatcgtagtgttcctcgagcacctcattgtcgatgcggtcaagctcgccgcgcggcaatacgctgagcagatcccagcccagatcgagcgtttcatcgatcgtccggttggaatcaaagccctggttcaggaaatgctgttcaaacaatgtgccaaatgacatgtactgcttatcagtctcgctcagctcatcctcaccgatgacactggcaagggaacgggcatcctgcaccttggcatatgccgcgaacagctggttgctgacatcgctgtgatccttgcgcgtatagccttcaccgatgccgtctttcatcagtcgggacagcgaaggcagcacgcccaccggcggatatacgccggtctgattgagctcacgatccagcacgatctgtccttcggtaatatatccggtgaggtcagggatcggatgggtaatgtcatcgttaggcatcgtcaggatcgggatctgagtgaccgagcctttcgatcctttcatgatgccagcgcgctcatacatcgaagcaaggtcagaatacagatagcccggatagcctttgcggccggggatctcgcctttgctgctggagaactcgcgcagcgcctcacaatatgaggtgatgtcggtcatgatgaccagtacatgcatatcgtgttcaaatgccaggtattccgcggcagtcaatgcacagcgcggggtcagcgtacgctcgatgatcgggtcgttggacaagttgacgaacatgacgacatgttccatgacgccagcttcctcaaaggaacggcgaaaataatcagcgacatcattcttgacgcccatcgcggcgaagacgatacagaaattcttgccgtccccatcggagatctttgcctgcttgaccagctgtaccgccagttcgttgtggggcatgcccgatcccgagaagatcggcagcttctggccgcggatgagggtcatcagcgcgtcgatgctggagatcccggtattgatatagttacgcggatagacacgggataccgggttcagcggcagaccattgatatccgcgctcttctcggcatagatctcgcccagaccgtcgatcggacggccgctgccgttgaatacgcggcccagcagttcaagtgacagcggcagttccatcggtttgcccttgaaacgggtcctggtgttggtcaggctcaggccgttggttccttcgaagacctggatggcagcacggcttccttccagctgcacgactcttcccatgcgggaggagccgtccttgcagcggatctccaccatttcttcataccctacgccttccacgtgatccagaaagaccagcggtccgttgatctcgtccagtcctaaatactgcagactcatactgattcacttcctattctgttccgcggcggatcgcttcatcgatcttttgcgtataggtgtcaaacaattcaaggtgatcgtttggcacgtcgtatttcatcttggtgaccgtgtcaaagatgccggtggcgagaatgctgctgagggcattcccctggcgcagcgcgtcgatgcagctgtggtaaagataaaggatggtatccatcatcttcagctgcttttccagcggcacataggtatcatcctgatggaaggcgttctgctgcagataaccgactcggatgaccttgcagatctcgatgacgagcttctggtcttctggcaatacgtcgctgccgatcagcttgacgatctccatcagtttgttttcttccgtgagcaggctcatcagttcctgacggtcgcgcaggaaataggggctcacgttatggttgtaccaacggctcaggtcgccgacatattcggaatagctttcgttccagttgatggcaaaataatggcgggcataggccagtgacttatccagcgcccagaaacagcgcacgaaacgcttcgtgttctgtgtgaccggctcagagaagtcattgccctgcggcgataccgcaccgatgatcgatacgctgccctcatgttcgttcagcgtgcgcacatagccagcgcgctcatagaactgtgaaagccttgagggcaagtatgccgggaagccttcttcagccggcatctcttccagacggccgctgatctcacgaagcgcctcggcccagcgtgaggtagaatcagccatgatggcgacatgatagcccatgtcacgataatattccgccagtgtcagaccggtgtagatgctcgcttcacgcgcggccaccggcatgttggaggtattagcgatcagcaccgtgcgatccatcaggggacgctgtgacttcgggtcgatcagctcagagaactcttcaagcacctgggtcatctcgttgccgcgttcaccgcagccgacataaacgatgatgtcggcatcacaccatttggccagctgatgctgggtcatcgtcttgccggtaccgaatccgcccggaaaggtgccgcccttggcgatcgggaatagcgtatcgaagatccgctgtccggtgatcagcgggacgctgatgggcagtcgcgcactgaccggacgagcctgcttgatcggccatttctgcatcagcgtgagcgaatgcacttcacccgcctcatccttgacctggatgatctcatcaacgatgcggtatgcgccttccgggctgaccgcgacgacctcaccggaaagctgcggcgggatcatgcagcgatgctcgatgagcggcgtttcctgcaccgtggcatagacctgtcccgggcggacatgatcgcccgcctttacggtgatgcgcacatcccattgcttttcttcatcgagcgaggcaacgtcgctgccggtcgcgataaaagcgccggaacgttcagcgatcgcctgcagcggacgctcgatgccgtcaaatatatttctcaggatgccgggggcaagggtgacagagaccggcgatccggtcgggatcacttcttcgcccggcatcaggcccgtggtggattcatacacctggatcgtcgtaaaggaacgggatatgctgatgacttcgcccatcagtttctttttgccgaccagcactctttccagcatggaaaaggcagtggtgtctttcacttttacgaccgggccattgattgaataaattacattttctgccattgtatcatctcactttttctatttgataaacaggccagaattgctgaagaaccagtctttctcttccgccagggcattatcgaaggtatcatcgatgacgatgccttcctcagcgcattccaggcggatcccaccgcagcggatcgcgctgtctttttctacgcggcaaggctgagcgaatgcctcgcggatcagctgttcatgccgcatatcttcctcacgcacatacagacaagcgccggtgtggggatgcccgcccagcttggcagcctgtttgcgcaagtattcaggataatctttactgtctgcaaaggcagtgacctgcgcttcgcaggcattgaagatctcagctgtcagctcgttgcgtttctgcatgagtcggcggtcggtcgcttcgtgcagctggctcatgcgcaccgcaaattcgctgttgagctcgcgcagctcctgctcttccaccatgccagcttcctgctgggcttcagcctcgatatctttgatcgcgttgctgcgaatatcctcgatctgtgtttccacagcgcagatctcactgctgctgacgcgctcgatctcatccttgaaatactgttccagatttactttttcattaaatggcattcctaccacctcacagttttacgccaattgcttcacttacgtatcggtcgatcgtctctccgatctttgcggatccgtgacgatccgggatctcttcgatcaacggttcttgagcttcagcttcagctcactgatcacttccgggcacgtttccaccagacgggtcgtcatcagtatgactgccacatcctcgcggtgaagcactttttccagtacttccaaaacttcctggcgttcgtgtacgacgacgccttcgatcccggccagccgcattcccatctgggtgtcgatgttgtcactgatcagaaagaatttcatgaatgtctcctagagcttcatgaagatcatgatgatcgaaatgagcagaccatagatggcgacaccttcacccatggcgacgaagatcatggccttaccgaagttctctttgttttcagagaaggcgccgatggctgccggagcagcaaaggcgacggcgatgccggcacccagtgaagagaggccggttgccagcgctgcggccaaaaagcccagcccctgcgcgatggaaccgttcatctgtgaagcggtatccaccgcttcagcggcctgtaccttatacatagagaagatcacaaagccgatcgcaatgccgaagaacatgcagatgtgagatgccagacggatcttggcacttctcagggaagtcttgccgcggatgactttgatcaatggcagaaaaatcaaaatgagcatgacagcgggcatcagtaattcaagtggacttaacaacataatcttttcctcctatcatccaatttgttccatagtgcggaacgcagtgccgtttccctcgaaatatcgggaaaacatttcataaaattcaagacgcagtgcctgaattccaacaacgagaccttccaggcacatgaccaggacgtttccaaatattccgactgccgcggcggcgacgccggagcacattcccatgatcatcgtgacggccatcatcatgccggcatgagagaggacgaatccgcccacacgcagataagagatggtattggtcacataggaaaggcagacttcgaagagctcgaagaagccttccatgaagaaggcgccgaagccttctggaaacatggcctctttgtgcagcttgcgggtcagcggttccttgaggaacacacagagcaacggcagcacgatgaggatcacgatatatatcgggttcaatacattgattccggcaacgaagagcgcagcagcagccacgactgagccgtaaaagataaatccggccgctccgttttgcgaaaagagaaattcacccatatttttccggcgcagctgcagacgcatattgagcaccatacagaacaagttcagcacggcgccgatgccgactgcgatcatcagcagcacgagaatgaagtcgctggacatgacgttgatcggccttccgtcaattcccagcaaagcgtgatagagcgggtcgagcatggtctcgtttccgaatacggaaccaaagacaaagccgaagatcgtggagaagatgccgatgcgcatcatcacttctcccagcttcatgcccttccatttgctcagcaaaagacctgccaggatcaccacgatgccctggccgacgtctccgaacatgattccgaacaacaaggaataggtcagggccacgatgggcaccggatcgatcccgtcatagtccggaatgccatacatttccacgaacatcaggaatggcctggcaaaccacccattcttcagtttcgtcggagggtccagccgcttgtcactgtgtgccggacgcacttcgatctccacctccttcagttcgctaaaggtatccttgagccgctctacgtctgcggcatcgataaagccggtaatggagaaacgctctccaaggccgacgacatattttcgggcgctgtgcatccggttgaggaaattcagctcaccgcggatcttcgcaaagttttcgctgcactctgctttcagcgacgcgatgacttcttccacatgctgaagctgcctgcggtcgctgtcgatctcatcttgcagcgtttcctgcgctttttccggtgtgccatgcacgaactccggaatgcggatccgttcaaagtacagagaggagaacatgttgtccacatctccctcatatttctgtgtggtcatatacagacaccagctgtaagtatcatcctggctgaatgacttgaacacaaagggacggttgcgataatactgcagcttcttcacactgtccaaaggcagccgtccgaaacggatcttgatgtagcggcattcaaagagatcatccagattcaggtcgatgctttcgatgttgcgcacctgaaccaaggcgtcctcgttttcctggatcacagtctgcagatcttttttcacgctgactgcattctcatacttctgatcgatcttttcgatataatcgcggatcctctgcatatcgtagtcacggcgtcgcacatcagcggcttccaatgcttccaatcccatgtcggaacagatttcctgaaagcgggcgctgagctctgccacaggattctcttcatccatgctgctcagtccgtgcacgctgtcaatgaacttgctggccggttcaggatgaaagtaatccagatcgatgaacttctgcagaacatccagcagatgctctttttcggcactgatggtgatcagtttcatttttgcaattgccatcgtaattctcctttcacttacgctcagtagatcagcatgctcttgatccgctcggcaggcacctgataacggatgccttcgatcacgcgggtcacattggccagctcggtgcgctgcagcacgatatacgcgccgaacatgacagatgcttgttgagcgtagtacagcctgcgctttgatgtctgaaagcgcagcgcgtccatataccacccgatatctacttccgcttcgtcgggaatatcaagatgataccatgtggatcggatcagcttcagcagcgagcgatcatcctgcgcggcgatcatctcttccagctgcccggaattcacatgagtgaaaaaaggataaagcgaatcacggatcacgtcgcctgaggcatggtaataatgcttcagccggtaaatgatctccatgttcttcagatcgatatccagtccgtgcagctcgcgcaggtcacgttgaagctttccttttgcaattttgtcgatggtgcgcattaccttcgtatagtaatgcttcatcagcgcatgctcgcatgcggtataactgatgtcgttctcctcccctttcggctggcgatagggtgcgagcagcaatgcgtatggtgtctttgccaagacatccagcatgtcgtcgaagcagcgcacagcaccgatcttcatcagatcgaagctggcaaattctttcagaaagagcggcagctggatgatggcgtcatcatagcgtccactgatcatcatgcgcagcgtttccaggatcaccttgatctcattttcttcaatgtagagatgataataggcggcctccttgcggtccgcatagcgatagagcttgatcacttcgcggaacacatctttgcgcagaaggtcttccagctgcccgcggtgcacgttgttctcgcgcacatcccgcagcgcgtacttgtaatgggtctcatttttcaggtacgccgcgatctcaggcacgttgcgcctgcttaagagctcggcgtaatcgcgttcatcaagctgctctccatgcaggcttctcacctttgccgcgatggcattggctctggccatagacctccctcctttcttttcctcgctcagtcggcgtcaagacaatgcgtgacgagcttgcggacccactcttcgcggctgccgtcaaactgctgctgcagctgcgcagcagtgttctcgtaacgcttattttctatctcttcctggcgggtccgctgcgcctgcagctcctcgcgtttcttgcgaacgcgttctttcgcgtcctgcagatactttgccttgatgctttcccgttcctcacgaatcaaagactggatgttgtctttttccttctgtttctcgagcagacgcaggcgtgcttcccggtcagcgtctacaatgtctctgatcattttttccactgcaaaacacctccgtttcctgtaacgcgtttacgagtaatcgtcagcgaaacgcgtcacgttttcttcctttccgatcacggtgatcgtatcgccatggcacaggcggcagtccggccggacatctgtctcgatctgttcttcgtgatggatcgcgatgacattcagcgaatagcgtctgcgcagatccatatcgacgattgtcttgccgaccatgcggtcactgacttcgatctcgatgatctcgatgtccttgccgatcggcaggaagtccacgagattcttgcgcaggatgcgcttggcgatgcgcagcgccatgtccctttcaggataaacaacggtagcgcccagcttggcaagcacctcgccctgttccgcgctggtcgccttggagatgaccggcacgcccagattgagcacattcagcgtgaccaagatgctggtttcgactttgctgccgatacagacggcaacaagatcacaattctggatcccgatctcgatcagcacctcttttgacagtttcttggcgacaaacgcgtattcgctgaattcacgaaattccttgacgcgctcctcatccatatcgacaccgatgacttcttttccggcttctgcgagcttcttggccagcggcatgccaaatctgcccagaccgataacagcgattgcatttttcttcatatgttttctcctatccgatggaaatatcctcacttgtgtatactgcggtgcccggttccttgaaggtacccagggtagcgatggtcatgacgcccagacgtccggtaaacatcgtcaggatcaggatgatcttggcgatgacgcccagctcggaagttatgccggtggacaacccgaccgtaccgaacgcggaaacgcattcgaacagcagctgcatgaaggaatattcaggttccgccacacacagcagcatcgtgccgagacagacgacgaacagtgacatgatcagcacgatgaatgcctgcatgatcgtcttatcttcgatgcggcgcttgaatgccacacagtgcccgttcttcatggtgcggcggatcgcgctgaagatcacgaagatggtgctcgtcttgataccgccgccggtagagcccggggaagcaccgatgaacatcaggatcaccaggatgaacaagcctgcattcgtaaaggtgcccagcggatatgtggaaaatccagccgtacgggccgaaacactgtgaaagaatgcgccgagccatgtgatgtcttcggtcagcttcagaccgatcgtaccgatgacgatcaagaagccggtcaccgtgatgaccaccttagaatgcagcgtgagcttgcgaaagctgcgcttgcgccaaacttccatgatgaccagaaaaccgataccgccaaagatgatcagccctgccgtcaccagattgagcaagacatcattttgatacgggatcaggttctgcaagccgcccagcacatcaaagcccgagttgttgaacgccgccacagaatggaacaatgcgatgccaagggcatccatgggcggataatcctgcacgaatacgatgaagctgagcagggcgcccacgccctcaaacagcaaggtcagcttcagcaccgacttgacgagcttgacgagcccgccgtaggtgctcacgttccaggattccttgatcagctgcctggccttcaggccgatacgttttcccgccgccaagatcaaggtgacgccgacgcatgtcacgccgagcccgccgatctggatcagcgccgcgaccacggtccgtccgaacacagtaaagtgatcggcagtgtcgatggcgatcagtcccgtcacacagacggcactggttgaagtaaagagtgcgtcgataaaactgaccgtcgcgtcatccctgaccgagatcggaagcatcaagatcagcgcccctattaagataacagccgcaaaacctgcggacagcagctgcggcggggatgagttcgagatcagttttttcgcgcgttgcaatacattgcccataacaaactccttcgctgtcaaaaaaagacagccggcaacgaggctgtcttttcattcaataagaaaagcattgaataaataaagcttacgctttatgacagactccaccgcttattcaacggtaagactttatcatagtcgcatggcaaagtcaacatgaggaaaccaacgaatgctatcttgttcatttccggttcatattatactcctgtccattcaaaattccagtaaaaagtcacgcaaaacatacactttttccgtcaacgtctattttccgcatcatctatgcaaatatacgttactattcacagtcagccaaaacctgtcaagtggaaaactaaagaaattgtttttgtttgaaggcgaatcaaagactttctggccgatgtgatctgtctggttgt

SEQ ID NO: 3240 - DNA, 19200 bp, Unknown
  16S sequences of unknown bacteria
tattttaaaaaagtcttttctgcatagttttaaaattttttctatctatttttaaaaaatatttcaaaatcattctttttcaattaaaaaatgattgacaaatattccatttatcgataaaatgatagtgttgttaaaaatcagtctatccaacccattaaatttgtgaaaagtcggtctccgaaagagaaccgacttttctttatttttgaacaaaaaacgttttgatttcgtccgtatatataatcagattattcgtacaatacgaatacagattcagctctcccaacgatttgcttaatgtcccaaccaactcatagtgatccgcgccgataggcctgcaaatactcaaggcagaatatcggttttataaatggtaaaagtttagttcactatcagggcaacagccccgatagcgaatatcgtttctgttactttttttctatttatttttatgccttcaccgttcacagactcttttcttggttgtccaccgtaataacattatacaatttattaatttgtaatttttctatccaaaaaccgtctggtgtttctttatcaaatattttttctttactgcattgatattttctatcttgttgcaaatcagcttttagctctaaacagcatttgcgattacgttgcggtgtaaatacgtaatcataatcgatatacctcgaattggaatctaatatagaatacccataacttaattcataaatatatttttgatttttatatagttctaaaggaaattcatgtacagcaagttcatcttcttttatatcgtattttttacaaacttctatagctttaacaagttcctcataaggacaaaaatatcctaaaacaaatctatcttcaacattttcatcatctttttcgtcgtaataatgaaatttaaacttttctaagcgatagatagtatattttttcatcttaatcaccatgccatgcggctacggcacaaatagggatgaaaaatacagccgctatattttgtatttttcacactatcctcctacccgaaattttataattctatcaaaccatttttttaatgcaatatattcagtttttgcacctttcctccaatttcccaatccacgtttattattcaacaaatattctgatgcctttgcgctatctttattaaacattttataaacattttcaccttcatctatagtggtccaacttaccggcggtttattgctcatacccggatcacttttagagtaacttatatctggaccaccgccaacaagagcgacactagccccgacaacgacacacatggcaacagcttgttccaaagatatggcagctgctcctgccaagaccgcttctccagcggcactacttcctattattcccggaagggcacaactcaatcctgctccaaaaaagcctcccgctattcctcccaatattgcacataatcctattcccgccaacttctgtcttgtgctcagtgtgggatcattcactacactcgtatatcctatgtaccctcccgcgactaatcctgccaccactccgactataatcaaccccgtcgaccaaaccaacgttccgttttcgtcggtgtacatgatggggttgttcgcgcaatacgaatacagattcagctctcccaacgatttgcttaatgtcccaaccaactcatattgatccgcgcttataaaccggcagatactcgggtcgtaataccagctttgtaaatagtaaaaacctgtttccgaatcgtaataatacccgcgatatctaaattttactttatctgccatacttccgctttcgctcaaagtattttcataagccacctgcatcaaacgggatatttcctctattcgtttacgctttatccgtaattccttctcagcggattttatcgctttgtccgcaagctcggcattgcgccgtataaactcttttttaacggcttcttcgtcgagcatgattcctcgccatttcacggatatcttcaagcacgagttcttctataatgcttgccgcaatggaatgcgaaaaacaataggcttttccgtaccggatatgatatccgcaatcgaatcggtagaaccgttttcccgtgctgcgactgagagatgtacacagtttcattttattcccgcaatccgcgcagatcagaaatcccgataacggatgtgtgtagccgatttttgtttttctacccgttgctaccgactttttacgttcctgaactctgtcccaaagttcctgtgaaataattgcttcatgggtattatatacaaccatccattcgttttcttcctttctgaaccgtttgtggtttttataggactgtgatgtccagcgtaattgcggcatatgcccgatgtatatgattttattcagcatttctcttatcgttacggctgtccataagcccattacgttcggtttcggcttttgtccggtttgggtataagcataggcggccggtgaaggtatcccttccagattcaaaatttcggatattcttctcggacttattcccgaagcgtacatttcaaatatccgccttacaatcggcgcagtgtcttcatctatgaccggcgcacgttttttatccgttcccataatataaccgtaagacgctttctttgccgtatatattccttctttcgcatttgctcttttaacggctcggattttcttactcgtatttgccgcgtgccactcattaaaaacgttcataatcggcatcatttccattgcgttactgtctcgattttccgtatctacattatcctgtatcgctataaaccgtattccgaacgccggaaacacataatccagatactgccccacttcgatatagtttcttccgaaacgggacaagtcttttacaataatagtgtttataacacccgccttggcgtcgtccaacagccgctgtacctcgggtcgggcaaacgtcgttcccgataccccgtcgtctatgtattctccgtaaatctcaaaaccgtgctcttccgcgtatttgcggagtatttgccgctggttatcgatcgaaagcgattctcccgctcgttcgtcctcttgagacagtctgaaatacaatcccgtaatatatttgttcatacaatctccttaaatttttgcttcggtcctccacggttttatccgtagatgaccgtatatctttgtcgcatttttataaaatattcgaataccgtggactgcgctctttccagcattcggcctatctcgggataactcaagcccgacatcctgcattcgagcgcaagtcgcatattgtccgttaaattcaggctctccacaattttatcgtacatggtacctatcgtcaacattaaaaccattgatatcagcaatattatggctactgtccatgggcgcgtttatgaagatttgcgtatcgttctcaactctgttttcaaatatgctctcgccaatagttttattatcaataatcccatgcttcttattccctttaagaaagctgaacgcatcaacagacgtgctttgacaaacgaggaacttaaaaaactttttaaacgcttaaatttacctgaatttaaggactataaaccaacctttcttattcttcttttcttcgggcttcgcccctgtgaactgaaagacgcacgtttcgaaggcgatttcctgatcgccagaaacgcaaaacgttgtttttgatttctgactgcataaacggtaagagccgcttcgcaggataattcctgtaaagcggctcttttttattttcttttctcctaagacttctctctgttttatccttacttttcctgtcgttcaacacgccaaaaaactcgccaattcagcccaaaatcacgaaatcaatagaataattattcgttccaatataaaataaagcgatttattgaatattcattcaataaatcgcttatttggtgcggtcgacaggaattgaacctgcatggtgttagccacaagatccttagtcttgcgcgtctgccagttccgccacgaccgcattgataacgggtctattatataataacctctgccgtttgtcaacttatttttatcccctttcgcaactttttcaaaattttttatacgccccgcgtacgtttccttccgcgctttcttctccttcgcactttcttaaaattaaaaagttttcccactaaaacgaaaccgtgtgcatctctatgtttttttgctgaacgttaccctgcccccgcaaaaaaatgtatattctttcgtatacatacacacaatattgtaaacggaggaaatttttatgaaagcaaccggtattgtcagaagaatagacgagctcggcagagtggttatccccaaagaaatacgccgcacgctccgcatcaaggaaggcgatcccctggaaatttttacggaccgcgacgaattgatgctcaaaaaatattcgcccatcgccacattggaacgtttcagcgaagccacggccaaatctttgaacgatttgagcggacagctggcagtcatctgtgatacggacgaaatattatacgcctacggcgacggaaagaaggatctcgataaaaagaatctttccgacgaaatggaccgcatcctgaaagaacgccgcagctatatggccaatgcggcggaaggcggagatatacttccgctgacttcggcgcgcgaagaaggcgtgaccgctcagatcatcgttcccatcgtatcgggcggcgattgtcttggcgcggtggcgattctctccaaagaagagggcgcgaagctggacaacaacgtcatgaatctcgcccgccttaccgcggacatactcgctaaccaattcgattaaatctttcgactcgtcattctttcaacaaatcgaacgagcgcccggatttttccgggcgctttctcgcgtttgcatgggacaggtatgcgccgagcttccttttatccttttaatttttcaacgtggagagaataaaaattttattttttaaaggagcaaattcctcgcggagcggaaattttttgtccgatggcatatactgtaagtatgcctgccgcttatacacatttttcaatcgcaaaggccgtgcttcaacgcctgccgaaagatcttcaaaacgccgtaagctctcccgaaatgtattttttcggcgctcagggcgcggatttttgtttcttttaccgcgcattccgcccgtcggaaatcaatttcggcagatttcttcacaatcgcggttcctacggcttttttcatactcttcttccctgcgcggggcgggacaaagggcttttttcctatgccctcggctatatcactcattacgccgccgactgcgtatttcatccttacgtttatcatctttcggggaaatcccccgtcaagcattcccgcgccgaaggcgctttggacttctatttccgacgcaaagatgcggaaaaagaagatttaaagcgtttcggaaaatatttcaactgcaccgtttccgaaaaagaagtttcctccctctataccctgtatgccctcgcggcggcgcgcgcggacagagatcccctgatcaagtcgtcgttcgtcaagggtatccgcaactatcgggcgtatacccgtttttccgcgcgtatgttcgccaaagaaaacgagggcttgctcaacgccgaacataaagaatggagctatcccgacgatatgaccaagatcatgacggacggcgcggaggaaatgttcgagcgcaccgtcgaggattgccttcgtctgataaacgaatttgtcgactgccttgaaaagaagcggcctcttcgcaaggaaaaattcggaaaaaattttttgagcgggctttaataagttccgctctttctttgttccgaaaaggcacgctcttaacgcttttcgcccttttcccccgaaacttattccttcattttggaaggggatcaatccgcatctctacgcttgcctttgggatgcgttcgactctttcgactgccgctttcccgtcctcgaccaattgaaaaaaccgtagagatcgttcgccagaaagacgagaaaacaaatcaccatcggcagataacggacctcgttcaaggaagcgaggatccataaagcgacgagcacgacgtcgtttgcggcataggcgacggcataataggcgctccttctcatcgtcagataggaagcgagaaagctggtcaacacggaaaccgtactgacaaggaggcgactggtatgaaacgcccggaggataaagaaaaagacgaaagaaacaatcagtcccgcgccgaacagaccgaggtactcccttggactcagcgaatttactttcacgtcctttcccttgcaggaatggcgcagccacgtgacgacggaagcaacggcgatgggcgcagacatacccaggtaagtaatcatctctccataatagcgggaacgaaaggaaatgatgccgtaaaagacggcgaaggccacggtgaggacctgccccgctacatttcctttggaaacgagaatcagcgccgtcgcgccgacgagagaagccgtaaggacgaggtaatcatcgttccccgtaaggaaaaaggaggaaataatcaaagcgagcgaaccgagccacagcgccagctcgaattttgtaaaggttttcagagtatcgatcaaaaatttcataaagacctcaaaaacggcatccctgtttacatcttctcagacctaacgatgtaaacgagaatgccgttccgcatttttctgcccggtggtagatattttttgttttttctattgtaccatatccctcgtgcttttggcaagcaaaaatatttctccgagaaaaaatttttttcctcgtttcaaatatgtgttttcatcctccaaaaagcggaaactttctcccttccgcgttcatttctccgcgttttcgagtatcgggaggagttcccgaaggcgagaaatttcataatcgggcaccacggcggttttattcgggcgcctgtcggcgttcagccaacagctgtctattcccgcgccttccgcgcccgcgatatccgaatccaaagagtcgccgatcatcagacactcccggaccttggcctccaaatcgctcaaaatcctggaaaagaaggcggacaggggtttgatgacgccgatatcctcggaaatataaatgcggtaaaaatacttttctaattgacgcagcctgcccgtctggatgctgtgcaaaccgttcgttgccacgcagatcctgtactccccgccgttcgcttcggaaagcgccgccagcacttcctccgcgtcctgcacctgcacgccgccctcttccagatagcgcaaaaatttttcgcccgccgcttcgggacgcatcgaaacgggatattcgctgaaaattcgtccgaacagcaacgtcagatgactcctgtatagatcgtgataggtgcgctggatcgtttcgtcccccacattggaaagccccacgtcgtcccaggttttcaccgaccattgacgacagcgcgttagcatttccgcatccgtttctctgccgcattcggcaaaaattttcttgaacgcctcccgttcatccgcttcaaagtcgatcagcgtgtgatccgcgtcgaaaatcagatacctataccttttcattttctcactcctttttttccgtattgggacgccacgaaaagaaaacgccgcgtatttttagagtttttgccgaacgcaaagcgggcaaaaacaaagaaatcgccgcgccccgcgcgtgtttccggacaaaacaacgccgcgcgcgtgctttccgcaaaaaattccccgaacagagccgcgctcctttttacggcgcgggtatagcccgcgcgcacgtgtcccgatgtcccgagagggacaaacggtaaactttttatgaactgtgcctaacggaaatatcccgcccgcttcgcgcccggcgaagctcccgtttcaccagtcctgacgcttcatcgatttatccttcacatcatcataatattcaaaatatttctttttgaactcttctttcgtcaagggcagcggctcgtcgccttggcgcatcctttctatcagttcttgaagctctgcgggcgtaaagtcggcaagttccacttccccgtcgtaactctccaaaaatttcagcagatccagcttggacattattctccctcctcgaaatagtttacgtcctcgggtacgaaacccagggaataaatttccggcagcaatttttttccgagcgcccgatgcgcctttttcagagcgctcagtaaaaccctgcccccttcgtcttccgtaacggctgccttcaactgcgcgtaacccgcgtcccatatttccgcctttcccgtccgataacagtatgcgtaaaacttgcgcgcggcttgcatcagcttttgcgcggcgtccgaaaattcacgcttttccgcccaaagccggaaaaaggattccccttcctccgcgaaggcgaaatcttccccgctccacccgtcggcttcccgccgggaaaagggaaagagctgattgcggacgcgataggtttccccttgatagacgacttcttttaaggaacaggtgttattggaatcggcaaaagcgctccacaccgcgcagtcggtgtaaaattcctcggacggctcccgcgaagggcaatagaattgatcccgattgttcgaccaggaaggactcggcagttttctcacggcgtgcaccgccatcgatttttcaaaattttccgcggtaacggaataggagccggcgctcgcctgcggacccgaaaagagagcggtctgattgcgatgctgaaaatcgttcccgcagcacatcaacgaacagagaaagccctccgccactttgtcgcgcacgtccacattccccttgcaaacgttgacggcgcccgtaaaagcgggaaagacgtatttcgtgggaggacgctttacccaaccgctcaacaatcccctcttttcccccgtaggcacgcgcttgacgcctatcttttccgcctcgcggttaaatacgtcgaaaattagccgctgcgcctctatcggcgattccttttccatgttccatacggcaaaacagacgggaaattttcctttgctgccctcgaaattttccgaagaaaagagaaagccgcgctccgccttatagcgaaaaaatccgtcgcgcaggcgtttgtcgttgggagcgttaagatatttaagggtagaaaaaagccccagatatgccttttttcccctgaattcctcggaaatgcggaacaaaaactgcgaaaacagctccctgcccgtttccccgaatcccgcttccagcatcatccttctcacggcggtgtcggaaacgccctttttcgacaccttacccgcagagaacgcggacaaattgctggtggcaaacggcggattgataaagatcagccatttaagcttgggattttcgaggtcccgacgcagccgctcgggcatcttccactcctccgttccgtcttcctccttttgtaaagtttcgctttcggagttctccgtccaatcgacttccagctgcacggcgccgcgttcgtgagccgaccgcgttttcaggcgcttttccaaaaacttcacgtcgtcgttgagataatcgtattgaaacacctccgcggaaggaaaaatgcggcggcaatagttcgcgtcgtcttcgttcagcgtagagatgtaggtgtacggcagggcggcgctcggcagggtaaattcgaggtttccgctgcccgccgccatatcccagatgcgataaccgccgctttccaacttgcttttgcccacggttttcaaaatatattcgtacgccttcgcggcaaaggggataggcgtataaaattccccctcgaaacggcggacgaagtcctcgctcagtctgtctattttgcggcgaatggcaaaaatcgtcttttcgtccttcacccgctcgtacacgctccaaaaatagttatattcgtacacgggcaggcttttggtcactttttcgccgttcagggaaaactctaccctgccgtttttattcagcgcctttcccgtttcaatatccgaaagaaaatactcggcaagtttccttacctcccctttttcgctcagcgcttcggtgaaaagagaagcccaatactcgtatactttgagaaagttgttctcgtctatcgtctttttttcccgctcgaacagggagatctgcacggcgcggacgcgtgccagcgccgtaaaaaacgcgctttcttcccccgcgtctttcaggcggtaaacgcggatacgggcgagagaaggacttttcgaaaggtctgccaccagttcgggacagggcgagagaggggtacggtcccaatcgtatttttctttgcgccgccgcgcgtaaaagcgagaaaagggcttcgtttccgcgagaaatgcctcgccgcggcagacggcgcacacgtacggcggaacgggacaggtagcttcgccgtatttaagctcccgcaggatatatagcgcctgcgcgagcggggaagccacccccttccaagcggaaaaacgcttttctttgcggaatatataaagcacttgctgcgtgccgtcgaatttctgcttcgcggggaaggaaagtccgaatgccgcgaaacacgccgcgcgcacttcctcgcgcgtcgtgcagttttttaaactttcgtaaaaaatatccatgtcacctaatcctgcgtttttttcattctccgcataactcttgtttggtcctctttgcaacgcgcgcttttgcattcttaaattttttaagaggactttccgtgtttctgaaaacaaaaattttcttgtatcgctttaaaaataaaaatccgattccgtacggcgcagccctttcccgcgagcagcttttccgatgttttcaacgcctttttcagtcccccgatttttccccattatagccttacggaaaagccttcaaaggcaaacgttccgcttccgtgctttaaaagtcccctttctttcagcgacgacattcccgccgccgcccttttcccaagcgcctcaggaatattcaaagcgtaatgcccgggcaaaagcttcccgaaaggcagttcccgaatgcacaggagagaggagaggaacgcctcgggatcggtcgtcagataaaaggcgtccagctgccccgcgtaaagcagatctcccgaaaagagatagccgcgttcctcttcgtaataacacagatgtccgggggaatgtccgggcgtatgcagagcggtcaggcgcctgttgccgagatcgagagagtccccgtccttcaaaagtcgggaaggagagccttgaaatatccgatatttttccgcagagaaatcttcgggaaaatcacacgcctctttcagcagattttccctcaccgccgcgggcgacaaggggaatttttcgcgcagccacttttcttccgcttcgtgcatggcgaaatcgggaaagaatttcaagccgccgatatgatcccaatgggcgtgcgtcaaagcgacggtaacgggcaagctcgtcagcgctttcacctgtgcgcctatgtccgcgacgcccagccctgtatcgatgagaagcgcgcgcgtatcgcccaaaagaagataggtatgcgtctgctcccaatgcccgtactcgctcaaagcatacgtttccccgtctatcttttctatcgtaaaccaccctttcatcgctcggcttatccctgccccctcttttcagctattttcttcttttcaaaaaccaaaattccgtcttcgaaaaacgctttttttatacgaaaaaaccgtctgcggaatttagatctccacttcgatccgtttcccgcagcgaggcacaacgacgtatgcaaagccaatttctttgagcgcggcgacgatcttttcccgctgagcgcctatgcgcgaaacgccgtgcgcgtccgaggcaaaggacacattgcgcccccccaagaaataatatcgccgcaaaatatccgcgtcgggcaaaaacgcgctcggagcgccgtagctcgaactattgacttctaaaatcttgtcccgctcgataattgcccgcaaaattccgtccaattcttcgggaaaatcctcccaacgcgcccgcttgtcggcatagggcgcatagcgcgtgcaataagtaagatgccccacgacgtcgtaaggatagggagcgtcgaggctctttctgacgagggaaaaatattcccgatagacttcttttttgtcgcgaaaatgccccgatacgcccttccagtccgtgagatgagaggagggatcctcccaatcggcatcttttaaaaacgcgcctgtttccgcaaagtcatatcgtccttgcatatgcacgctgttcacgacgaaatcagggcgatacgttttcaaaagcgccgcgtaaagggggaccgccgccgggttatccgtaaagccaaactctccgccaacgagcacttccatgcttccccgatacgcctgctgcaactttcgtgcgcggggaaaatatacagacggatcggtatagacgggttcggaaaaacccgcaaatctaagaccgttcactttatagtcgtaatcgaaatgttcggaaataccgtaatatgccattcccttttcttttgctttttgcagcattttctcgatggaatcctgtccgtcgggagaaaacgccgtatgcgtatgtacgtccgtcaacaacttttccatagttctattatagcacacgcagggaaaaacggcaaccgcagggaatcttatttttctctttccgcaaaaaaatttccttttcccgtctttcctgtttccttttcttttgcttcgactacgctgttcaccgcttacctgccttattcttttaatttttttaaccgttttttgccgaaaacattttcctctttttgataattgtggaaaaaatcgccccgcctaagcctaaaatacctgtattttcctcttctgccgatttttgtgggttgatttttgcatgaaaacgcgctaaaatttatatatatccatcaaaatcggaggttatttatgaaaaacgcagcgagggcggccgcagcgatgcttgccctttctttcacctttacaatcctcgcgggatgcgcgaagactccttcggattcttccttccccgactcttccgtttcggacgaaatccccgacgcggattcttccgggggaacttcctcttccgactcggacgacaacagcggcgctcccgattcgagcgttcccgacgacgtgacgccccctccgcccgacgacaacgttcccaaccccgaaccggagccggaacctgatcccgagcccgtaaaaaactacgcttcttacatacgctgtacaggggagagcgtcaacctccgatccggcgcggggacgggatatgccgtcgtcggaagcgcggagaaggataccatgtacgtggtggcgggaaaaacgggagattggtataagacttattataagaatcagacggtgtacataaattctcactacacttccgtattctccatcgaaaagagcgacaaccaagcggtggaagacgtcatttgggaagggtataagcaattgggagtgccttacgtctatggcgcggtgcgcctgcacgacggctacggcaatcttctcaaaggctttacaaaaatgaaatacgactgttcctccctcgttcaatacgtatttttcgaagcggcaaacgtgcttttgcagacgacgacgcgcttgcaggtggtacagggcgaccctgtcccccgctcgcagctgagccgcggcgactgcatttatttcaccaattctacccgagaggattatacgggaatcgaacgcgtcgggcacgtggcgatctatctcggagataattatatcctgcatacgtcctcggattatgcgcgcattgaaaaaatgtcctctcaacgctgggcgtactatatcgaagcccgtcgattcgtttgacttttacgaacttactgccgtcgataacggcgaagcgcaggggatgcccgtatattttgtaatgccctcttttgcctttcccatcgaaaaacgccgttcaaagcccgcaaattctctttgcgggcgatagggcctcgggattggcagagcctcacaaacgaagcagggcttaatacgcgatcttacgtacgtccccctcggtcaacaaggcgacacggggactcacggacgacttctatggacgcgctctccttagcggacaaagtcccgccatgggatagaggaacgactttatacgctctctcccataaagacgataagcccgcggctcccttttcatttgctcattcctttgcctgattttattctcataaaaatactccccgtatccgattcgtcggcggcggggagtattttttcaagtctacgttcctttgatggaacgcttgaaaattataaatttattcttttttttcgtccgcattttccgcgtcggcggacggcacatcctgcggaagttccctttcgtccggcgcgttttccccgccttccccttccgcgttttcctcttgcggactttccttcgcggactcttctatctcatactttttgcgcagctcttcctcttcggcacgggcgttttcggcgaccgtatcgaaatcctcccgcgtaatttctccttgaccgaggagcgactcagcgtacgtcttagacgccgtcgcgcccagccaggtattcttttcgccgcggatttttttgaggagccagacgaagaaaatttttaaatccccgaacagactcaggctctttgcataagaaagatcggaagaaaacatttccttataatccgtttccccgttccccgtcgtcactaagggattgatcagtcccgcgcgaacggcatagcgcccctcgtccgcttccgaaacgaacgccgcgtccgcaaaggacaggcgcttaacgccgataaagctgagtttgccgcagaaaacgtcgaaaatataggggagtgtgtataatcccgtctttttcagccaatgcccgtatccgcccgcttcgtcgccgtcgtcgtccacgatgcagaaagtatgcagtacgatggtttttgcttttttgcccacaaaaaattcccgcgaaagaatggatttcatggcgcccgtcctcttttgaaagagcttggcgcggataaaaatcgcgagatagagaggcgagagcaccgccatgctgacgacggacgccgccagatcccacaggcgcttgaatatccagcgatacccgatcgccatcaccgcgacgattgccgccgcgtcgaagagaatgaacagcgtcattccgtaccacgtctttaaaaattctcccatcgaaaatacccttttatatcctttctgtaaatatcttgcgctcctgcttttacgcggatgcaaagcccggaaaaaaacgaatcccaattttccgactccctccgcccgggcacaaacgcctaaaataaagcgcgctcgccttcttaacctttcgcgcgaatacaaagcgccgaaaaaattgaaacggcgatccctctccatacggcatttcagagagcgtcccttcccaatttcttacggggaagaatcgcgctctgccaaagaagctgaattttaacgctcggaccgctgtgcatcttcgccgcacgtttctttttcgtcccgctcgccgtcctcttcgggctgtcgtttccgcttttccgccgcgacgatctcgccgattttttctaaaaccgcgtccttgccgaagcccgtttccgcgctgacgggaatgagattccccacccccaggcaaagatccgcggcaatcgccctgacgtgttctttcagcttcattttggataacttgtccgttttggtgagaacgacggtaaaaggaatgatgtgatagtgcagaaattccatcatctgcatatcgtccgcagtcgggtcgtggcggctgtccgccagcatcaggacgtgggaaattttttgtttgttcttgaaaaaggcgtccagcgtctttccccacttctccttttcgcttttggaaaccctcgcaaacccgtaaccgggcaaatccgccagcacgaactgtccgaaatcgaaataattgaccaatcgcgtccgccccggctcgctgctcgtctttgccaattttttacgattggcaagcatattgatgaacgagcttttccccacattggattttccgcatacggcgatcatcggtttttcggtcgcaataaattggctttcgcttgccgccgacgtgatgaacgtcgcatttttgacgacgattttttcgatgatctcttccatgggtacctcgtttgttttttatatcgcttttttccaaagaggaaaccttgcggcgccccttgtctttaaaaatccgcccctcgccgggaaagcctttgcatacggctccctgttagcagcgcacggcgggagaaacgggcgcatctccgccgccgacgggaatgacaggctcttttttcggcttggtcacgcgcttgggacgcgcctgttttccgttctctttttcggcggacgaagcgccgagcaccgccagagaaaacacctcgtccgcgtccgtgacgggaatgaaatgaatttctccgcgcaccgattcgggcacttcttcgatgtcctttttgttctcggcgggaatgatgacgttcgtgatgccgatgcgccgcgccgccagcgccttttctttgagtccgccgatgggcagcaccttaccccgaagggtgatctcccccgtcatggcgacgtccttgcgcacgggacgccccgtaaacgccgacaaaatggcggtggcgatggtgatgcccgcgctcggtccgtccttgggcgtcgcgccctcgggcacatggatgtgaatgtccgtcgtttcgaatttgtcctcgggaataccgtacctgtccgcatgggaacggataaacgaaatggcggcgagcgccgattccttcatcacgtcgccgagttttcccgtcaggcggatctctcccttgccgtgcatggcggaagcctccaccgtcagcgtagtgccgccgaccgcggtccacgcaagccccgtcaccgcgccgatttcctctttctgtcttgccgcgtccgccgtaaagcggggcgcgcccagaagttcctccgcggtcgccttgtccaccttgactttgggcagagatctatcgtccgcgtatttgacggcgatcttgcggcagacggtgccgacggtgcgctccaaggtacgaacgcccgcctccatcgtatagccctcgatgatcgcccgtacgccgccgtccgtaaaggcggcgttggcctccgtcaagccgttggcggcaagctgtttgggaatgagatatcgcgccgcgatttcctttttttcttctaacgtataccccgacagctcgatgatctccatacggtcgcgcaaaggccccggaatggtatccagagaattggctgtcgtgatgaacatgaccttgctcagatcgtaagggacttcgagatagcggtcgcggaaggtagaattttgttcggggtcgagcacttccaagagcgcgctcgaaggatcgccgcgcatatcggaagagatcttgtcgatttcgtccagcaggaacacgggattgacggatcccgcgtttttcatcgcgtaaaggatacgcccgggcatcgcgcccacataggtgcgccggtgccctcttatctccgcttcgtccttgacgccgccaaggctcatgcgcacgaatttgcgccccaaagcgcgggcgatggaacgggcgatgctcgtcttgccgacgcccggaggaccgacgaaacagagaatgggcgccttcatgctccccgtcagtttgagcacggcgaggtattcggtgatgcgctccttgattttttccagcccgtaatggtccgcttcgaggaccgccacgcagtccgaaagcttctccgtgtccttggtttcctctttccaagggagatccaggatccagtcgagataccccgtaatgacggtgtattcgggggaagcggactgcattttatccagacggtccagttctttaagacactttttttccacctcttcgggaagccctttggcgaggatcctgacgcggtattcgtcctcttcctttccgtcgtcgcccagttccgtatgaatggctttgagctgttcgcgcaggaaataatccttttgcgagcggtcgatattctgacggacggtggaagcgatcttcttttcgattttggcgatttccagctcgtcgtttaaacaccgttcgaataatttaagccgttcgatgacggagtcctcttccaaaagctcctgtttgacttcgaggcgcacgcgcatggcggatacggtcatgtcgatataggcgtcgggatcggaacaggcttccagctgcgtcaatacgtccttgccgatcttgccgtccgccatcaggacgtcccgcaccatctcccgcgcggtgcggaaatacgcctcttccagcacttcgtcgccgtggacgggcgtaagctcgtcggtgacggcataatagtagcccgattcaaactgaacggaacgcgcgcgggcgcggtaaacgccctccgcgagtacgcgcagggtgccgcccggaagctgtgtgacctgtttgatgcgcgcgacggtgccgacggtgtagatgtcctccgccgtgatctcgtccttctccgtgtcccgctgggcacagatgaagagcagcctgtccgcagccgcggaagcgcggtcgatcgcctttaaagtaatatcccgccctacttcgaaagaaatgagggtaccgggaaacgccaccttgccccgaaggggcacgatggataatatatttgtttttggtgtctgtttttccatatacttttccatataattattattaaccctcggaaacgctttttaaacaatttcccccgaaaagcggcgagagatgctctcttccaacgcaaaagcgcggtatccacgccccttcgccctccgttttttaaagctttctcctttatgtttccttccgtcgcctcgctccaatcctcccgctatgcgccgtactcgtccgggagctttccagacgatattttcggcagcgtcgaatcccgtgcgttcgcccaaagaacgccgctttgcgtttcgttttccctccgcgcaaaaattcctccacaggacgtttttgacgggccgaagaatcccatcggaggtaatttcccgacgatacagattaaatagtttcggcgcgataaaagacgcgccctacgattcttttgcctgccggctc

SEQ ID NO: 3241 - DNA, 2131 bp, Unknown
  16S sequences of unknown bacteria
atcctgagcggaaaatacggtgcaactgttaaaccgttcaacccggatgttgttaagaaagtacttggagacaatccggaagttatcacatgccgtccggcagatctgatcccggatgaacttgctactcttgaaaaagagatggaacagtacaaagagcaggatgaagacgtactcagctacgcactcttcccgcaggtagctacagacttcttcaaataccgcgaggcacaggagaagaaagtagatgctacaattgcaaaagacggaagttatccggtataatagcgacgaactgacgaaagctgttacagacagtattttgtgagcaaaacgtaacttcaggagccataaaattcgagttgaattttatggctcttttgcttataataaaaagggttgtgaccttatttataatagaagtaaatgattttataaaaaggcacgtttcttatttggaggcaaattgtgagcacaaaaaatgagttactgataagaattgatgagagatatccgaagttcagcaaaggacagaagcggcttgcggattacatcaaagaaaattatgataaagcagccttcctgacggctgcaaagatgggagaggcagttggtgtcagcgaatcaacggttgtccgtttcgcgacacagcttggatacaaaggctatccggaattccagaaagcactgggagagctggttcgtaccaagctgaattccatccagcgtatggaagtgacctacggacggatcgaccggagtgagattctggcgacggttctgcagtctgatatcgagaagatcaagcagacactggaatccgtggacaatcatgcatttgagctggcagtggatacgatccttgcggcaaaaaaggtttatgtaattggaatccgaagctgtgcaccgctggcgaaattcctgactttctatctgaatctgatctgtgaggatgtggtagaggtcgataccaacagttccagcgagatttttgagcagctgatccggatcggggaagaagatgtgatcatcgggatcagttttccgcggtattccatgcgtactttaaaagcgctggaatttgccagcaaccggaaagcaaaggtaatcaccctgaccgacagcgtgaattctccgatgaatctctattcctcctgcaacctgatcgccaagagcgatatggcatccatcgtagattccctggttgcaccgctcagtgtgatcaatgcactggtggttgcactctgtatgaagaagcaggatgatgtcatcgagacgctggagacactggaggacatctgggacgaatatcaggtttattccagagatgagctggagcctgtagaagatgaggtaaggatcaaatgagtaaagtactgatcgtagggggcggagctgccggtatgttcgcatccatatttgcggcgaaaaatggcaatgaagtccacgtatttgagaaaaatgaaaaacttgggaagaagctttttatcacaggaaaaggcagatgcaacgtcaccaatgcctgtgatgtagaagagcttttccagaatatgatatccaatgagaaattcatgtacagcagtttttatggatttaccaatcaggatgtgatggatttctttgaaaatgcaggtctgcgtctgaagactgagcgtggcaaccgtgtatttccacagtcggatcattcttcggatgtgatccgcacactggagatggaaatgaagcgaaacggtgtgcacatccatctttattccaatgtggacaaggttgtggcagaggatggaagattctcccaccttgtgatggcagacggaagcagagaagatggggatgcctgtattatcgcaaccggtggtgtcagctatcagacaacaggttcaaccggtgatggctaccgtttcgcagaagcgatgggacacaagatcaccgagcctgcaccgtcactggttccgatgaatgtcagagaagagtatattccggcactgatggggctttccctcaggaatgtccaggcaacggtctatgatgggaagaaagagctgtacagtgatttcggagaaatgttattcacccactttggagtcagcgggccactgatcatcagtgcgagtgcctatgtaggtaaaatcct

SEQ ID NO: 3242 - DNA, 2751 bp, Unknown
  16S sequences of unknown bacteria
cccccaactgatgcctacgaattgctccgctgcaaagcaactcccgcaattctataaacattcgaaatccgctgatttactgcgtaaatcgctgctttctcatgtttggcgggtcccaagttcaaaagccttatcatgcaagcatgaacggctttttgaccttttgacccttgtgtcatcatatcaataaggcctggaaatgtcaatgagcggaccgggagcaggataacttgtaattaaaaaaggattgtgctagactgcgaatgtctgttttccacaatttgtacgaagcagaagtaagaaaagaagctaaaaaagaagctagaaaagaagctagaagaaaggaaaagcaagatgccgcagcagcaaaataaaatcaattatcaaaaagaactggaaaaggtgttagacaaagagaaagagcgtgttccgacccttctgctgcacagctgctgtgcgccatgcagcagctatgtgctggagtacctggcacagtatttttccatcaccgtattttactacaatccgaacatttacccggaggcagagtatgaaaaacgggtggaggagcagcagaggctgatccgggagatgaatgcaaaaaatcagcttgctttgtgtgccgatgacaggcaggaaaagaaagcttccgggcagaatataaaagaatattatgagatccgcttcctcgccggccgcttcgacccgcaggaattttaccacgcggtaaaagggcttgaaaagatcccggagggcggcgagcgctgtcacgcctgcttccgtctgcgtctggcggaggcggcgaggatcgcaaaagagggcaattatgactacgtgacgacgaccctgacgatcagcccgctcaaaaatgcggaggcgctcaatgtgatcggacgagaggcggcggatgcctgcggtgttgcctggctgccgtctgatttcaagaagaaaaacggttaccgcagatcggtcgagctctctgccgaatatggtctgtaccggcaggattattgcggctgtgtgttctcaaagcaggagcgggaggcatcaaaatagtatttatatgtaagtcagcattgtatcttacacttgcaacaacatcaccactgtgttacactaaagcgacatcatccgtgtatcatagggggaaaaataccttttgccccaactgatgcctgcgaattgctctgctgcgaagcagctcccgcaattctgcaaacattcgaaaaatgctgcatggaacatccgaatacatgaaaaaagagaggatcaacactatggcacaattatggggaggtcgtttcacgaagaaaacggaccagatggtatatgatttcaatgcatccatttcatttgataaacgtctgtaccggcaggacatagaaggcagcatggcccatgtccggatgctggcgaagcagcagattctgacggatcaggagcgcgatcagattctggaggggctgaccggtatccttgcggatgtggagagcggggcactgcagatcacagcggagtatgaggacatccacagcttcgtggaggcgaacctgatcgaccggatcggagacgtcggcaagaagctgcacaccggacgcagccggaatgaccaggtcgccctggatatgcggctctatgtgcgcggagaagtgcagcacaccgaccatctgctgcgcgagcttctgaaagtgctgcagcggatcatggaggagaacatcgatacattcatgccgggcttcacccatctgcaaaaagcgcagccggtcacgctggctcaccacgtcggtgcatattttgaaatgtttcgcagagaccgttcccgcctgaaggatatttatgagagaatgaattactgcccgctcggcgcaggcgcactggcaggcacgacctatccgctcgaccgggaatataccgcgcagctgctcggctttgcaggtccgacgcgcaacagcatggactccgtatccgaccgcgattatgtgatcgaatacctgtccgcactggcgacggtcatgatgcacctgagccgtttctccgaggagatcatcatctggaactccaacgagtaccgcttcgtcgagctggacgatgcctacagcaccggcagcagcatcatgccgcagaaaaagaacccggatatcgcagagctggtacgcggcaagaccggccgtgtctacggcgcactcatgggctttctgacgacgatgaagggactgccgcttgcgtacaacaaagacatgcaggaggacaaggagggcgtgtttgatgcgatcgatacgaccgagatgtgcctgaccttattcaccggcatggtcgatacgatcacctttaataaagaagtgatggaagcatccgcaaagaacggtttcacaaatgcgaccgatgtggccgattatctcgtgaaccacggcattccgttccgtgatgcgcacggcatttccggacgtctcgtattaaaatgcatcgcagaaaacaaggcgctcgacgacctgacactggaggaatacaggcaggaatgtccggcctttgaggcggatatttacgaagccatcagcatgaagacctgtgtagagcgccgtctgacgcttggcgcaccgggtgaggccgtcatgcggcaggtcattgacgagaaccgagcatatctagataaagtatgtttatgatgcctgcgaattgctccgctgcaaagcagctcctgcaattctgcaaacattcgaaatccgctgatttactacgtaaatcgctactttc

SEQ ID NO: 3243 - DNA, 3203 bp, Unknown
  16S sequences of unknown bacteria
cacgcgagagtggcggaactggcagacgcgcacgtttgaggggcgtgtggttcttaccatacgggttcaagtcccgtttctcgcaccatcagggcacagccctggaccgataccgcgctgattatttcagcgcggtttttcgtttttccacgcgctcgcgccgtacagtacggcttcgctgtgcgaatttggatgaaaatgccgcggctaaatgtaaacaatatgtaaaataaattcgaaaatccacggaaagtactggatatttcggcgattttatgatataatataaggtataataattattctcaaggtggtgaaacgatgacacgaaacgcgatagttgtagaaacaacgcccgactacgcggtcgtcgaggtcacacgcgagtccgcctgcgccggatgccacaattctgacaactgtagcatctgcaagatcggacttaccgatcacgccgaaatgcgctccaaagccgcgaacccactcggcgcgcgtgagggtgacactgtacaaattgaaactgactccgcgactatacttcactattccgcggccgtttttctacttccactggcgctcggagctgccggatatatcatcggatacattgccgattttgacatcatgataagatatatcatctcgctgattggctttgccgcggcgttcgtcatcctgaaaatcttccttgaaaaacgcgcggcgaaacgtctggatgtccggataacgcaaattattgccagaaaagccgctccggaggaaaaatatggcgaatgacccgataaaacagcaaaaattatggataatgaagccggagccggacccgctcgaagcgaaaaaactgacggatgagctgcgtgttcatcccgccttcgcgaggctgctggcgcagagggtccggtcgctcggcggggaaaagtactccgatcttgacatcgccgaatccgcgagacgcgtcataggcaaggacgacggcatcctcgaggatccgttcacactgaacgatatgaaacaagccgtgacgagaatccttcgcgcggtccgcgaaaaagagaagatcgtcatctacggcgactacgacgtcgatggcgtcacatcgaccacgattctgctcgaatatctgaaaaaactcggcgccgacgtcgatttttacataccgaaccgctcgggcgagggctacggcgtcaatgccgccgcgcttcgacagttgtccgagggcggaacgcgcctgatgatcacggtcgacacgggcatcacggcgatcgacgagatcgcggaggcggcagcgaacgggctcgaaactgtagtgacagaccaccacgaatgccgcgaaaagctgccggaatgctgcgcggtagtgaatcctcggcgaccggacgacggctgcaacttcaaggagtacgccggggtcggcgtcgcgttcaagctgatttcggctctcgaatacgcgcgagatctgccggaaaacgccttggatgggtcgacggatcacgcaaaaatgcaagccgcgaccgcgaaaattgcacgcgagtatggcgcgttcgtcgcgatcggtaccatcgcggacgttatgccgctcgtcggagagaaccggctgatcgtcagctatggtctgatgctgctcgaaaagaccgaaaatatcgggcttttggcgctcatgcgcgccgccggagtgatccagaccgaccagcgcgggcttgagacaatgaagaaaatcacatctacgactgtagggtttgcgctcgctccgcgcataaacgcggcgggtcgacttgcaagcgcggcgatcgccgtcgagcttttcacgacaaacgacaaatatcgcgcgtcgcggattgcgtcggatctctgtgagacgaaccgccgccggcaggacgaggaaaaccgcattcttgttgaggcggaggaggcgatcccggagcagtgctcgccggatgaccgcgttctggtgcttgccggggagcattggcatcacggcgtgatcggaatcgtctgctcgcggctgaccgaaaagtacaataaaccgtcgattctgatctcctttgagcagctcacggatgaagcaaatacgggagatttgtgcaatataccgaatactgaaaagtacaagtcagacgacgacctcggaaagggctccggacgctcggtgaagggctttgacctcgtgaaggcgctcgcggaatgcgccgattcgctttccaactacggcgggcatgagctggcggctggattatcactgaaacgcgggcagctcgagggattccggcgggcgataaatgactacgcgcgcgaggttttcccagtttcgccggagccgtcgatcgacgttgatctgtcacttcaggcgggcgagatttcgatgcggctcgctgaagacatcgggctgctcgaaccgtacgggacctcaaatccgacgccggtattcgtcactcgcgggctgaaaatcagtgaagtaataccactttccggcggaaaacatataaaaatgacgctttctggttctggacgacgcttcacggcgctgctttttggcagggcatacgacggatttgtgcattctgccggcgatataatcgacattgcgtactctctcgacataaaccgtttcggcggaagatcggaggtgcagatgcttctgcgcgacattcatgatggcacggctgataaaggtcgcgggcaatttgtgcaatctgccatagcggccccagggcgagaaatattcggcaaattatacaaattccttatcagggagcgacagaatcaccttatcggagagctgacacgggagaccgggtacggcgagaccgagacaaaacggatgctggacgtctttgccgaaataggaattctcgactggaaaaactcaggaaatacgcttgaaatcaggcttcttgagccgagcggaatcaagctcgaagagtcgcgcatctatagaaaatggatatccgacgccgcgtcggcaaatgaaacgggcacgacgcccgacgaacgaaacagcaaaaacgatcacccgggggaggggcgggaaatatgaacgaagaacgatcaacgaacgcgaagccggagcgaaagaccgacattccgaacgtcgacgcgatcaacacgtcgagcaaggatttggctaaattgacgacacaaaacacgatcccaggtgaaataaaccgacctgatatgcccgcggagaacattccggagcacccgat
